United States Patent Application Publication US 2005/0196754 A1 - sequence listing, part 7

SEQ ID NO: 13126 - DNA, 3196 bp, Homo sapiens
  SIMILAR (2)..(754): 961254mologous to Homo sapiens Human secreted protein 1,accession number W63681,Smith-Waterman Score=1266.
gcgtgactgaaactgccctgaccctgccttatttagtggccaagcatggctacttcctgccgcaggatttggcaaagcgtactgaaacgatgaactggctgttctggttacagggcgcggcaccgttcctcggcggtggttttggtcacttttaccattacgcaccggtaaagattgagtacgccatcaaccgctttaccatggaagccaaacgtctgctcgacgtgctggataagcaactggcgcagcataagtttgttgcgggcgatgagtacaccattgcggatatggcgatttggccgtggtttggcaacgtggtgttaggtggtgtgtatgatgccgctgagtttcttgatgcgggcagttataagcatgtacaacgctgggcgaaagaagtaggcgaacgtccggcggtgaaacgtgggcgtattgttaacccgaccaacggaccgctgaatgagcagttgcatgagcgccatgaccccagtgatttccagacgaatacggaaaaataaccgccaggggtaatgggtggtgttcgttgcaacaagccttcccggccggataaggcgttcacgccgcatccggcaatcgtgcacaatgaaccctgactgccgatcagaaaaaacagtttggtccttttgtctctgattacgcgattctgtatggttattctcagcaggtgaatcaggcgatggattccggtctgcgcccggttgtagacagcgttaacgcaattcgcgtaccgcaggattacgttacgcaaagcggtccgctgcgtgaaatgaacggttcgctgggtgtgctggcgcaacaactgcaaaatgcgaagttgcaggccgatgctgcgcactctgcgctttccttgtaacgcatcaatcaaattatccacggcacaggcggccatgccataacgcgtctcatgggtggcagatccaatatgcggtactgcgacgacgttggccattgagagcaacggcgaatctacggacagtggctcttgttcgaagacatccagcccggcagcgtgaatttcgctttcaatacagaagctggagaaaatccgccccagcaggtcgtctgaagtaaattccccggtgatttcgcttaagttctgctgtgccagacgcaactcttccgccagcagttcacctgcccaggctcccaacagttgcgctttgccctgttgtagatgttccgctgcctgttccagcgcctgtaggtggcgacgacgcgccagtaagccgacttccatgtaggtgtcaaagcccatgctctgtatgagatggttacgcagcacgtccacgccttcaccagtcgaggagtacccgaaaacccgttttgcctgttccctcaggcgtcggtaaacgaactcaacgaacaggactcggaatgcctggcacgccgggtttgaagcctgattcaggcagttctctccgaagtagtacagcgcatccagcagatccagcggcaaaacgacgatcagaaccggcttcacgataccgtcattaatcaggatcatcagtgccttactcatctggatggggtcgctgtccagtaacccgataccaaccggaatggtgtcaccctgataccacggttttttaaagcgtttctgtttccattcgcgggtaggcatgttgccggaacgttcttccgccaggtcgataccggtgtaatgaccataaccgaatttacccatccattcggagaggcgatcgatccccatatcgtaggccactttatataaccaatgaccattgcgttgtacataggtaccccggtccggagagtaccaaatcgcaggcatgttgacttcgatggatgccgagagtctggtacagtcctggggaacctggtcatcatcctgggcatcagcatagactcccacttccagacccccatgtacttctttcctggcaaacctgtcgctgattgatgtctgcgtgggcaccagggcattcccaaaattcaggctggttccaatgacagttatacggccatggggagtagacatggagtctaattcagtgcttgaggctaagaatgaagttgtatgcattgtggaaattgttccaggagatcttgcaactttcaagtttgaagtcatgtctgtgacagtccaggaatctgatgcagctgtggaagaccaggtggaagggtgttctgtagaagttgtgtgcctctctgtggccggggtgctgtccatggtactcatacccacttctgggttgggtgtggtagttgagattgagttggttcccatggtggtgatggtggtggagatacctggagtaggagctgtggttatgtccaggatgctcacttccgcaggagatgaagtctgagatagatgcccagcagtaggggcaatgtcacttgtcactgcacttacattggccatcagagtctcaagccctattgaaggagatgtgacagatgatgcagagcttgtttttcctcctgagggattggtgaggcttgtaatgccttggtctccagagggcagagatactagtgaggtggtttgtgctgtggaggtgatgtataatgtgtttgtgacatcaggagatgcaccaagggtgatgtcactcccagatgtctgatctgaccaagaactagttgatgaataagcctcatccacagatcgacttgtctgttgttcagctgccattatcttattattcaggacagtggagggaatggctgtggtgctgacccatgtctcggttttatgtttggatatatctgtcaatgagctcacagagtttggaatgttaggggggtaccgagctcgatgatgtgctggagacacggagactgggacaccgttcgtggccagagtcaaatctgcggatgtctcagatgatgctgtggctctggtgagtaggtgggttgtgccctggcttcccctggtgctgctgcctcctgtcattgaaatcccagtgggaacagcaaactgatgggtggttgggccagctgtggattctccgatgagtgtgtctgcagatgtttcttcaagccaaatcccttttgtggagctggtcttcagggtggtgaagccagagaccacttctttaaacccaatcagccggtaccgaactgcctgctgctgggagttgcttggaggttggcagcttggggctgaaggctcgcagatggagcggtcatgtcccacaaacaaatttaattccat

SEQ ID NO: 13127 - DNA, 928 bp, Homo sapiens
  SIMILAR (1)..(240): 921254mologous to Escherichia coli RIBONUCLEOSIDE-DIPHOSPHATE REDUCTASE 2 BETA CHAIN (EC 1.17.4.1) (RIBONUCLEOTIDE REDUCTASE 2) (FRAGMENT),accession number D90891,Smith-Waterman Score=368.
  misc_feature (1)...(928): n = a,t,c or g
atgcgcgtttttactggcctgacgctgctcgggacgctgcaaaatgttatcggcgcgccttctctgatgcccgatgcactcacgcctcatgaagaagcggtattatcgaatatcagctttatggaagcggttcatgcccgctcttacagttcggatttctcgacgctatgccagaccaaagatgtcgatggcgcctacgcctggagtgaagaaaaggcaccgtggcagggaaaagctcaggctgaaatttaagctgcatgaacccagctgggcctgggtaccaagggtgggcagacctcagcgtgttggtgccaggggacccggggaanaaagagacagcaaaagcggcaaaggagaagacaccaggagaaggcagcggagaccacgaacaccagcagaaacaacgaaaacgacaacaggcacaaccaagcacggaagagaggaggcaaggggccggaagcgaagcagccgagaacaaccaggcacacagcaggcacgggaagacaggacaccgcagccaggaaggaagacgcaggccaagaggcgagcaacacacccaacacacacagggaagccggaaggcagtgacaaacaccaaagggacacacaaccgaacacggccaaaccaccagccaggaagcaccagagccagccaacggcacaaaagaaaccggacaccttacccagacctggacgtgaaggtgattgcaatacattcatcgccattcacctctcctcaaccagcggcaccatcacatcacgcgaccaggaaaccatcacctgttgtccgggctccatcaaaaacattcgatgtaccaacgaacccggcaacaaacggcgtgcgcgggcgactatagagatcgcgcggggaatcgacctgctcaatgcgtccattattgaaaaccgccacaggatcggacatcgataa

SEQ ID NO: 13128 - DNA, 492 bp, Homo sapiens
  SIMILAR (97)..(312): 751254mologous to Escherichia coli similar to,accession number D90890,Smith-Waterman Score=271.
atggaaaggaccggcaagggaatgaccccggcggggccaaccggctcaaccacacaggtacagagtgaggtccgaatcgttgggtttggcggagggctcgaggctgcccaggtcggccaggatgtcggggatcctgtcggccacggccacggcgttcatacggcaattgtggcgggctgtggttctcactatttgctgcaaatgcgtgaacggttgtttgatctggcggcgcgttatcgatttatctggctgcggcgaacggtgctttcggtggaaatgctggaggataaacacgatcagcaccagcttatcttattctcacgctctcttctcactcataataagcttgcaaaggacattagagtcccaaccacctgttgccctggggtttccttaaggaatttgacaattttccagtctttctttagcttctatggggatcctctagagtcacctgaagcaggactgtacctgacgcggttcatcggatag

SEQ ID NO: 13129 - DNA, 1554 bp, Homo sapiens
  SIMILAR (88)..(606): 261254mologous to Arabidopsis thaliana putative ATP-dependent RNA helicase,accession number AC002337,Smith-Waterman Score=125.
ttatatttttgtctctcttcctttgttgtgtccggtttgccgcattcttggattttctgccttcagtgcaggggtgtccatttttgccggctgtcttgactcagcgctttgggtcattgccggctcttcccattcttgggataccagcatgagccacttgcacccatccttgggaatgctttcattagcagcatgaagaacagactgacacagtgtcccgtcaacacttacagggaccaatggtcccagtttgcacaggactgtccttggtttatgggatggttttttcgcatcgcttggcgttacggcgctattggcggcgacaccagcactggtagggcgtgaaaacttaatgcaggccggggcgatcaccatgttgaccgtgcgtctggggtcggtgatttcgcccatgattggcggtttattgctggcgaccggtggcgtagcgattgctggttgtgtttttgtgttgttggatggggttccctgtgcgtttgcgggctggtgtgtggggcattgttgtgtctgcgtcttcgctgggttgggtcctctcgtttttttttctgttttccttattgtggggcgccccctgtcgatgtgatcacggcctacggttaccgttttttggctggtgctgtccagcctttgtccgttgtcggccgtcatctttgcgttgttggttgcctcctggttgccgctcacttctttccttccctgcgagtgtggcctgatctcgtggcggtggctagttctaggtggagctgctgtgttcttcttcgtctgtcgtgcttgtgtgggtattttcgaatcgcttggcgggattgtcctaatgatgtcggcaccagctttggtagggcgtaggtaataagtgccgtcatggccggtctctatgttgacggagcgtatggggtcggtgatatggccgtctattggcggtttaatggtgacgatcaggtggcgtagcttgtaactgtgcggtgtcggcgtcgtgcatgttagtaaccgtgttgccgtggttaagccttccggtgttgtgtagccttccccacttcgtgtgcatgcgataaggcacacgagcgccgtgtgcattgtccccttgtttgcgattccctgaacggttagtctcaggggttttcgcctcgttaattccgatcccgcgctatagcctgtcacgcagacgcgtattagcacaaacctcgatgcagtgtaggggctctggatctcacccgtcttacgagatttaccactgtccaatctactatagatataggcagcgtcagggtaccggtgaccttcacgctctgttatccccacgcactgatttgaagtctctttctgccagggtcccttatgtctcctgggttgctccctccagtttgatgaaggccctgaaaaggatggttccccctgctgattctcggaatctctagaatctccatcgtgttctggctcttccagtactccagatgtccaccaatttccttcacccaatgtaagctccaactcacatactgcaatagaaacaagaatatcaaatgttgagacccacagcat

SEQ ID NO: 13130 - DNA, 282 bp, Homo sapiens
  SIMILAR (62)..(280): 941254mologous to Escherichia coli glycerol-3-phosphate dehydrogenase subunit A,accession number M20938,Smith-Waterman Score=351.
actaattctagctccggacccggagatccatttcgttggaccgcacctgacatgctggatgtcaaagaacatcggtgccgatatccttaccgctcatgaagtcacggggctgattcgtgaaggcgcgacggtgtgcggtgttcgtgtacgtaaccatctcaccggcgaaactcaggcccttcatgcacctgtcgtggttaatgccgctgggatctgggggcaacacattgccgaatatgccgatctgcgcattcgcatgttcccggcgaaaggatcgctgct

SEQ ID NO: 13131 - DNA, 1113 bp, Homo sapiens
  SIMILAR (1107)..(793): 991254mologous to Escherichia coli similar to,accession number D90889,Smith-Waterman Score=559.
atgggcagcaaaatttttcacaatctcatcccatactgcacaacaggccggataaggcgtttacgccgcatccggcaacagtgccaactgcctgatgcgacgcttgcgcgtcttatcaggcctacaaattcccgcaccatccgtaggccggataaggcgtttacgccgcatccggcaacgcaacacgaggagacaacacaagacgacgaggtgaacacagcgaacaggagcgagcacgcagacgaagcaagcagggagcagaaacgacaacgacaacgctgcctgcaccggcgctacaactcccagccctggcgcgccgcgcaaacggccactagcctggtccgcactactccgatccgaacgccgaaccgaaaaccaccccaagcacacaggccacccagcaagtccggatctcccaagaacccttgccctggcaagccccggcccaagaaatatcctcggtcgagtctagaggatccccaattgcagatcacaccaggtttctgtttcacgtcccaaacgctggtgttaatcacctcgttgacgtttattccggcaattttactgatgatgaccagtttcacccgcatcatcattgtttttggtttattgcgtaacgcgctgggaacaccctccgcgccacctaaccaggtattgctggggctggcactgtttttgaccttttttattatgtcaccggtgatcgacaaaatttatgtagatgcgtaccagccattcagcgaagagaaaatatcaatgcaggaggcgctggaaaaaggggcgcagccgctgccgttgagtggggtaaacagcgatgtatacgtagccgcaactaccaagagtatcggcttcgcaggtaaaaccgttgtggtacagggtgacgcattgggcattgcggggattcagttcaccagtggtcagcatcgactctatctggctgataaaatgtggaaataccacatccagcttaggacattcggcgtcactaaacttaccggtgatactggcccggtcagccagatagtgcagctggttgccctcctgcaccagacgtgctcccaggcgcggcgtgatatctcgctgcaggccccatgtggtgttgctcattcataa

SEQ ID NO: 13132 - DNA, 1597 bp, Homo sapiens
  SIMILAR (1)..(408): 981254mologous to Escherichia coli Flagellar biosynthetic protein FliP,accession number D90834,Smith-Waterman Score=671.
atgtcaccggtgatcgacaaaatgtatgtagatgcgtaccagccattcagcgaagagaaaatatcaatgcaggaggcgctggaaaaaggggcgcagccgctgcgtgagtatatgctgcgtcagacccgtgaggcagatttagggttgtttgccagactggcgaataccggcccgttgcagggacctgaagccgtgccgatgcgcattttgctcccggcctacgtgaccagcgagttgaaaaccgcatttcagataggcttcacgattttcatcccttttttgattatcgacctggtgatagccagcgtgttgatggcattggggatgatgatggttcccccagccaccattgctctgccctttaaactgatgctgtttgtactggtggatggctggcaattgctggtcgcgttggtcacgggccttatcatcagtattttgcaggccgccacgcagattaacgaaatgacgctgtcgtttattccgaaaatcatcgccgtatttatcgccattattattgccggaccgtggatgctcaatctgttgctggattacgtccgcaccttgttcactaacctgccgtatatcatcgggtagccgtactatgttgcaggtgacaagcgaacaatggctatcctggttaaacctgtacttctggccgttactgcgcgtgctggcgctcatctccaccgcgccgattctgagcgaacgcagcgtacagaacgggtggtacccctctgcaacgctaagtagcactaactggcaatacgcctgttcctgctctgcgggcaaacgacattccaggactcacaaccgaccaggttgtctctggttaacaaaggcgcgacggtgtgcggtgttcgtgtacgtaaccatctcaccggcgaaactcaggcccttcatgcacctgtcgtggttaatgccgctgggattctgggggggcaacacagttgcccgaatattgccggatctgcggcgattcgcatgcaatatctacaagggtcgtgtaagtcgtgtacttccgggtatgcaggcggcttttgtagatattgggctggataaagccgcgtttcttcatgcatccgacatcatgccgcacaccgaatgtgtggcgggtgaagaacaaaagcaattcacggtgcgcgacatctcggaactggttcgtcaggggcaagatctgatggtgcagaccctgaccccacagtccttatgcctgatgtctaaccttcggaaattttgggatatgggtcacgtgttttggttctcagagatttttgacaaaaggtggtgcaatctagtgaaactcctggtgctttgttttttgttctgccggcttttccgggccataccgagatgtggtgagatttttgcccggcggcaagtcagatacttgcctgctgtgatcaacattgaagccgcgcggctgggtttcctgttggttggaaatgcgagctttgcccggaacagtaagccaatggagttcaggacaagaaagacgccgagcataaagagtggggcgtttgccagcaaggagagatccaactctgaaaatgctttgatatggaaaatatcaagcaaattgaccgacataccatag

SEQ ID NO: 13133 - DNA, 243 bp, Homo sapiens
  SIMILAR (299)..(1120): 951254mologous to Rattus norvegicus G protein-coupled receptor,accession number AB015646,Smith-Waterman Score=1376.
atggtttccagcctgcgcgacagaccgctgccgcaggatctggtggtgtttggtgaagtcgggctggcaggggagatccgcccggtgcccagcggtcaggaacgaatctctgaagcggcgaaacacggttttcgccgggcgattgttccggcggctaacgtgccgaaaaaagcgccggaagggatgcagatttttggcgttaaaaaactctccgacgcgcttagcgtgttcgacgacttataa

SEQ ID NO: 13134 - DNA, 678 bp, Homo sapiens
  SIMILAR (1)..(69): 1001254mologous to Escherichia coli UUG start,accession number U28375,Smith-Waterman Score=116.
atgacgggacgtataacaccggaacgctttgttgaattaaccagcgcaatgcccgccaggttgtttggcactgttcatccgccatctgttgatgcgctgtttgacgccgccagtcttatcattattcttatgattgccggtcgggaacaacctgctcgctgccatgctgtcattgaatgtaatcgcgccgaccgccgcggggaagcaggcgggtttgtcgttgattgggccgcctcttcctgccttcatcgcctctactgtactctgctgcgcctccgctcgcttcgtgctgcggacgcagcggttatcagcctccactcgaaagggcggatacatacggattcatccgacaatcaatcagggaggaatttctacagcagtgactgctgcttagagaagatgatcattagtttatgtgatgaacactgtcacagtgccagtgaaagatgcttctgtgatgctcctcaaaaaccagaacgggccaggggacaaccaccgacaaaacaccgcacaacacaagcgcaaaagcgcaaagggccctttaccggcaacggcaaaacgcaaaccgggaaaaaccaaccgggcggggcaggcgcgcaacagcggaaaacacacggctttcggggaaacacgggcaaaaagggcaaacctttacgtcggtaccgagagacactttag

SEQ ID NO: 13135 - DNA, 3039 bp, Homo sapiens
  SIMILAR (421)..(1506): 1001254mologous to Homo sapiens G-protein coupled receptor,accession number AB019000,Smith-Waterman Score=1960.
tcaccgacagcgccttcggcaccgtacgcggcggcaccagacgcatggtctcaatacgtcgcactcattgcgctgattcgccagttcaatggcgcgaacaatttgccccggcgcgtcatcgccctgaacggcggcagggtagatgatcaccggcagagaaggatcgcgacgttttaacacatgcaaaatatcatgtagcgcagcaccggtttttgaggtgatcacaccaacgcaatgcgcaggggagggaagtggttttttgtattgctgatcgaacaaaccttcagcctgcaacttcgctttgagctgttcgtacttctgttgcagcagcccttcaccggccggctgcatactctcaacgattatctggtagtcgccgcgcggctcgtagagcgtaatattggcgcgaactaaaacttgttgcccatgctgtgggcggaaggtcacccggcggttgctgttgcggaacatcgcgcagcgtacctgggcggtgtcgtctttgagtgtaaagtaccagtgaccggaagctggttgcgtgaaattagaaatttcgccgctgatccaaacctgtcccatctcatgctcaagcagcagacgaaccgtttgattcaggcgaggtttcacgtactcgatagcattaacataccagctcgcttccccggcaggggtattcaccaccgccagatcgccgacttcttttttcagcaatgcgcgggccatcggggaatcgatagagatgtaatctttacggccaaaaatttcatcgtagccgacaatacggaaacggtgagtcacgccatcgtcgttttcaatctccacccacgcgccaaaaaagactttgccttcctgctgaggggagtaatcgacgattttgagattttccaggcatttagtgagatagcgcacgcgacggtcgatttcacgcagacgctttttattatactgatagtcagcattttcgatatacgcatcgatctcggtacccaacagtggatgcgcatcgtccacggcgacgcttaaacccactttttccattaccggccagtcgatgagatcatcgccgacataagccacattttccggggcaatcgccagtttttccagcagatcgctaaaggcgatcagtttgtttgactgcccctgatacaagtgagtgatccccaatgtggcacaacgatcttctaccagtttagcctttcgcccggtaatgatagcgacttcaatatcagaggtgagcgcacaacgaatgccataaccgtcacgaacattgaacgctttcagctcttcgccattattgcccatataaatcaggccatctgacagtacgccatcgacatcgaggatcagcagacgaatgttctctgcttttgctggcgcagcagctggcgcatcgccactattcttattgtcatcgcctttactaccgtaaaggaactgaccaatgagatcttccagcaccatcgcagacttagtgtcctgaattgtatcgccatccttcaggatagcagtccccagttccgggtcttcaaaaccgacgtttaatgccagatattgttcccccagcaggccggaagtacgaatgctcagcgaactggtatctggaatgtggttataacgttgttcaatttccagcgttacgcgcggcagataggttttcgggtccagcgtaatatccgccacccgacccacaacaacgccaccaatactgaccggagagcgcgctttcaggccgccaatgttatcgaacgtcgcataaagcgtgtaggtcggttcagtacgtatggacgtcacgttcgccgccttcaggcaaacaaacagcgccgccagcagtgccggtgtggaaaaccgcatgcagttactgttttccagtggcgtgatgacgggacgtataacaccggaacgctttgttgaattaaccagcgcaatgcccgccaggttgtttggctccgccatgtaatcgatatagtcggcagtaaaagccacttcgacttcagccagctgctggatcttgcccccttcttcaacaatcagcgcactgatttcactggcgcgttcgcggatcccggcggagattttgcgcaaccaactggcgcgttcaatagcaggcaacgcttcccattctggttgtgcacgttctgctgcatcgattgccttacgggcatcctcggcctgaccatcgggtatgcgggaaatgacagcctctgtagcagggtttaccacatcaatccatgcgtctccacgccaggtaacaaactgtccatcgatatacataggatgttgaacgggtactgacatgggcgactcgagcgactttccatcgcctcgatgagcaactttaactttggtgttttgctgatccatattgatcagcgcaccacccgcggcgatgtactccagctctttcttatttacccccggatgttgatttggctcgtggatgactttcaaccagataaagctgatgacaatccccagaccgcccataaagaagaagacgtgtgaccagcccacttcatgcgtcagccagcccataatcggcgcgaagatcaccgttgcgaagtattgagcggagttaaaaatcgacaccgccgttcccctttcctgcgccggaaaccaggccgcaacaatgcgactgttgccggggaaagatggcgcttcagcaagcccgaccaggaagcgcagcgtaaacagggcaacgataatgccgaatccactaaagatatcgacgaagccttgcagcaaggtaaacatcgaccagataaagatcgaccagaagtagacgcgttttgaaccaaaacggtccagcaaccagccaccagggatctgcccgataacataagcccatgagaaagcagagaacacatagcccattcccacgggatcaaggccgatatctttggccatttccgaaccggcgatagagagcgtagcgcggtcgccgtagttgaaggatgtgacgataaacaacatcaccactatccagtaacgagcatttgtgcgtttttccacactgctcgcagcctgacttaaagaactcat

SEQ ID NO: 13136 - DNA, 429 bp, Homo sapiens
  SIMILAR (187)..(414): 681254mologous to Pseudomonas aeruginosa probable ATP-binding component of ABC transporter,accession number AE004712,Smith- Waterman Score=266.
atgccagcggaaaacattgttgaagttcatcatcttaagaagtccgtcggtcagggggagcatgaactctccatcctcaccggagttgagctggttgtcaaacgtggcgagaccatcgcactggtgggcgagtcgggatcgggtaagtcaaccttgctggcgatcctcgccgggcttgatgacggtagcagtggcgaacaacgagtggcgctggcacgagcctttaatggtcgacctgatgtgctgtttgccgacgaacccaccggtaaccttgaccgccagacgggcgataaaattgccgacctgctgttttccctcaaccgtgaacatggcaccacgttgattatggtgacccacgacctgcaactggcggcacgctgcgaccgctgcttacggctggtgaacgggcagttgcaggaggaagcatga

SEQ ID NO: 13137 - DNA, 3238 bp, Homo sapiens
  SIMILAR (109)..(2): 521254mologous to Homo sapiens FasL isoform,accession number AF288573,Smith-Waterman Score=102.
gaaatcttctggtgctgacgctgatggtgacctcgaaagggattgctggcgtgccggcgtgtcgtttgtggtgttgctggcaacgctgggtagcgtaggtattcgctggaaggtctggcgtttattgctggtgttgaccgtatcctcgacatgcgcgtactgcgctgaacgtggtggtgcagctgcatgcgtttctgacccgagaattaacccagagtatagccacgcggctacgtcgccgccgccagctctttggcgaggaagaagccgcccatatcgcacgccagcagtttccggcgaacatcgatggcgccgagcatttcgtaaaccggaatattaccggcccgagaacgtgagccagtaccggtgccagcgcggtcatacgaccatcgccaggcccagtgcgcccattgccataaagccttcttcgaacgaccgcctgatccttcgatacttttaccgaacttaccgaggaaacgagcgaaccgccgaactgcgacaggatcctgtctacggcagctatcagcataagaacatcatgatgtacatgatgatttcgttaattcccatcgcctttactcctgttagtatgttatttattggcggatgcggcgtaaacgccttatccgcctacatgtgcaatccccgtaggctggataagacgcggcaagcgtcgcaccggcaattgcaccgcgccactggcggatgcggcgtgaacgccttatccccctacatgtgcaatcccgtcgacaaatctggtccaggcggcggaacgcgggttactgcgcagaccaatatcttcagcgcgggctgtgccatgcgccgaaatgcgcgatgtcgaccaacatcgccaggcgtttaccatccaattcggatacgtcacttacgggtaaaacgcacgacccggattatatcgaatccggcactgctaaggttcgacaccacggaaggaaggagaaagaaaaaaaagaaaggaacggaacggaacgcgagaaagaacagaacacaggaagcaaaggaaagaacgcgacccgtcaacgcgaccgaaagaaacgggacgggaccacagcgaccggacacgcgtgacgcggaacgtggaagggaggggacggagggaacggaggggagggaagggaacggaggggacgtgaacggggaagcagggcgcccaactcagcagacaagaccacagcactcaacacaccccaacctgcccacgcccgaacactacgcgaacctggcactcaaccaaaaccggcggcaaaaacacgatcggaaagcaaactcggccaccgctgaattcccgagggaaaacgcccaaaagacgggaggtaacaccaaaagaccaaacctgacaaacgatcgcccacaaccacgcacgcaacgaacgcgaagccccagacgcacaccgaaggccaccaaggacaaggaactaagcgacaccaggcacaacgaagcggcaagcgccagcgggaagtcaagacaagcaaaacagcgaagcgagcaccgcacaacagaccacagacacacacaaagaaacacccacaaaacccccaataccccaccccacaaaccaactcatacacacccacaacaaccacccgcaataaccctactaacccaccactcttctaaaacacaaacaactacaaacacaacacaacatgaacaaggcaccataccaagcattaatgtcctgataatgggagaagtcagatccagttgcaataaaccaaagcctttcgggttgtatgtcggcaccagtaatgctggcgctatcgagcaacgcataaacggtaaagtagttgcccccggttttaccgtatcaaaccagaaggcggtaaagtcgggaactcttctttactgtcggtgtaagtgtcgatcgccaggccgcgggccgcaaaccgtattgatatgtatcatcaacggcgcggaaataactcgcgccggaaatgatactacatcacggcgcgccagttcgggggctttaaacacgcgaaaccggcaaagccgagatcgctttgcccttctaattgttttgtatcaaacctgcatcgttgtatttgaacaactccgggcgaaagtgaatttcacgcccagatgtgttgctggatctacagaaaacatacgaacgcggcgacggaacccattcccatatggaagaactgagcgtccagttgacggttctcaacgtatgccagagcgatttttcggcgtcgtattgaatactgttataagcctgcgcgtcattgtcgccagcgtgtcagctgtttgcgctaagtcgtgcgccattgactgtagaatggagaagtcaaacgctgggtttgcccgtcggcaatatcagaatctgccgcgaatgccgccgagaaaaaagagaagcaatgccgctggtaccgcacacggcggccatagcattgaacctttaataaatcgtctacgatccatacctgaaacctgcaggcacagcagtgcagcacccgtgtctcaaacaacaaaaacaaaacacacagcaaggcaaggcagcaaagcaaacagcaacaagcaaaggcaaggcaaggaaggcagcaacagcaaccagcaacaacgaggcacaggcaacaggcacacgcaacaggcacagtggcacagagcaacagcacacagcacacagggcacaaggcacagcacacaggcacaggcacaggcgcagtggcacagaggcacatggtcaggtggcagtggcacagtggcacaggagcagtgcggcagcggcacggggcacatgggcagtgcggcagaaagaggagtgcatcggcagatcgtaaccggtgaggtgcagcaggctgtagatcagcatgggccgtggccgttggacagcacgaagcggtcacggtcagcccaggacggatctgcgggttgtgtttcaggaaatcacgccacaggacttcggcaatgtcgccatacccataggggcacccggcattggcaagctctttacgtgaggacttttgactccagatcggatgatgaagggcacgcccttaacgacttgacgcagcgcgttttgggctacgccggaaaatttgccaacaatttaccgcaagcgcgcgtcatgtacatggaacatccttttgccgcttcagaaatctctggtcatgctcgcatgttgcgcaatctactcgcccgtccgctgcgcttttcctatactgagactgagcgtcgattcacctgcaaacggcgcatttttagaaaatcctga

SEQ ID NO: 13138 - DNA, 2373 bp, Homo sapiens
  SIMILAR (925)..(1290): 711254mologous to Mus musculus Pro-Pol-dUTPase polyprotein,accession number Y12713,Smith-Waterman Score=475.
atgcaggaaatcggcaaatgcaccgaagaacatcaggcgattgtgcgtaagtggctggaagagcgcaaactggatgagactatgatgcgcaaaatgctgctggcggcagcactttcagtgacggcaatgaccgctcacgccgactaccagtgcagcgtcacgccgcgtgacgatgtgattgtcagcccgcaaaccgtgcaggtgaagggcgaaaacggcaatctggtgatcacgccagacggcaacgtgatgtataacggtaagcaatattccctgaatgccgcccagcgcgagcaggcgaaggattatcaggctgaactacgcagcacgctgccgtggattgatgaaggcgcgaaaagccgcgtcgagaaagcccgtattgctctggatcaaattatcgcggataagctgctgcagctgatgcgggttctcttcattcagcagtgggggattcccgccggcacggtgcagatgctcgaccggctggaaagtgaaatcctggctgaccgggtgagtgaggaaagccgccgctggctggcatcgtgcggcctgaccgtggagcagatgaaaaaccagatggacccggtgtacacgccggcgcgaaaaatccacctgtaccactgcgaccatcgcggcctgccgctggcgctcatcagcacggaaggggcaacagcgtggtgcgcagaatatgatgaatggggcaacctgctgagtgatgagaacccgcatcatctgcagcagctcattcgcctgccggaagtgcgttacaccggagcatcgttctcttacaacgtagcgtcgattctcggggcttccgttgcgccatatatcgcagcctggttgcagactaactacgggctaggtgcggtgagcgactggggctggggaattgatccactcggtctgcgtatcaccatgaatatgatgtacgatcgttatcagaagccgctgtttctggtggaaaacggcctgggcgcaaaagatgaatttgctgccaatggcgagattaacgacgactatcgcatcagctacttacgcgaacatatccgcgcaatgggcgaagcgattgcagacggcattccgctgatgggctacaccacatggggctgtattgatttagtttccgcctctacgggtgaaatgagcaaacgctacggctttgtctttgttgaccgtgacgacgcaggcaacggtacgctgacgcgcacgcgtaagaaatcattctggtggtataaaaaagtgattgccagtaatggggaagatttagaccttccagtcgaagctctgaaagtgcgtatcaacgaagtctataccgcgctgaacatgatcgactacggtctggataacctgccgggtggcccactgatggtggaaggctttacctacattccgcaccgctttgcgctgggctttgccgaagcgccgcgcggcgatgatatccactggagcatgaccggcgacaaccagaagctgtaccgctggcgctgccgtgccgcgacctacgcgaactggccgaccctgcgctacatgctgcgcggcaacaccgtttccgatgcgccgctgattatcggtagcctcgacccttgctactcctgtaccgaccgcatgaccgtggtcgatgtgcgtaagaagaagagcaaagtggtgccgtacaaagaactcgagcgttacagcattgagctcatcaaaaccggcacggcgacctcgtcttatccgctggagccgattgcggttgataaaaacttccgtggtaagccagagcagaacccgcagcagtgcatcggctgcgcggcctgcgtcaatgcctgcccgtcaaacgccttaacggttgaaactgacctcgccacaggagagcttgcctgggagtttaatcttgggcactgcatcttctgtggacgctgcgaagaagtctgcccgaagcggggatcaactgttccagagtacaactggccgcgtggagaaaaagactctggaaaagcccctttcgcgtgtaaatgcggtttgaaaagcttttacgccgaaaaaattaataccctagtcactttccctgggggtagtcagctgtcgtgtcacgaggacattcaaacagccctgtgggaagacccatgtgacaaggagctgaggcctccagcaaacagccagtgcagctccatgctggctacgctgggtagcgtaggtattccgctggaaggtctggcgtttattgctggtgttgaccgtatcctcgacatggcgcgtactgcgctgaacgtggtgggtaatgcgctggcggtgctggtgattgccaagtgggaacacaaatttgaccgtaagaaagcgctggcttatgagcgtgaagtgctgggcaaatttgataaaactgcggatcaataa

SEQ ID NO: 13139 - DNA, 2799 bp, Homo sapiens
  SIMILAR (181)..(903): 731254mologous to Mus musculus Pro-Pol-dUTPase polyprotein,accession number Y12713,Smith-Waterman Score=892.
atgctgagcgcatttcaactggaaaataaccgactgacccggctggaagtcgaagagtcacaaccccttgtaaatgcagtatggattgatcttgtcgaaccggacgacgacgagcgactgcgcgtacaatctgaacttggccagagcctggcaacccgcccggaactggaagacatcgaagcatcggcacgtttctttaaagacgacgacggcctgcatattcactccttcttcttctttgaagatgcggaagatcacgccggtaactccactgtggcatttaccatccgtgatggtcgtctgtttactctgcgtgagcgtgaactgcccgcttttcgtctgtatcgtatgcgtgcccgtagccagtcgatggtagacggtaacgcctacgagttgctgctggatctgttcgaaaccaaaatcgaacagttggcagatgaaattgaaaatatctatagcgacctggagcagttgagccgggtgattatggaagggcatcagggcgatgagtacgacgaggcgctctccactctggcggaactggaagatatcggctggaaagttcgcctgtgtctgatggatacccagcgcgcgctcaactacctgagtcgactgcggcatctgctgctgccatacgcgatacagcgcaacagatgcagtcaacagcgcaggctgagtttgccaggttttattcagttcttcagctggcccctgctgggtcagcgcccacaggtcgtagcccagcgccgcagaagcttcagcaaacgtttcttcgacaattggatagctcgccgccatatcagccagcattccaacggtttgagaaccctgtccagggaacacaaatgcaaattgcgtcatgttttaatccttatcctagaaacgaaccagcgcggagccccaggtgaatccaccgccaaaggcttcaagcagaaccaactgccccggcttaatgcgcccgtcgcgtacagcttcatccagcgcgcacgggacagaggccgcagaggtattaccgtggcgatccagcgtcaccacgacattatccatagacataccgagttttttcgccgttgcactgataatacgcaggttagcctgatgcggaaccagccagtccagttgagaacggtcaagattattcgccgccagcgtctcatcaacgatgtgcgccagttccgttaccgcaaccttgaagacttcgttgcccgccatctgctgggaattgtggcgcgcctgtgcgggttaagcgtctggatcctgattcgtattctgaaagatgagctgattctggcgtactccactgccagctctgaaagcgtgctgccgcgaattattgagaagatggaagcctacggagcaccggtgtcgatcaccagtttcgtggtgccgaccggttactcttttaaccttgatggttcgacgctgtatcaaagaaatcattctggtgtgacgctgatggtgacctcgaaagggattgctggcgtgcctggcgtgtcgtttgtggtgttgctggcaacgctgggtagcgtaggtattccgctggaaggtctggcgtttattgctggtgttgaccgtatcctcgacatggcgcgtactgcgctgaacgtggtgggtaatgccgctggcggtgctggcctgctgctggtgatcagccacgcctttgccgccacggttcaggacgaacacggcacgtttacactcgaaaaaacgccacaacggattgtggtgctggaactctcgttcgccgatgcgctggccgccgtggacgtcatcccgatcggtattgccgacgataacgatgcaaaacgcatcctgcccgaagtgcgtgcgcacctgaaaccgtggcagtccgtcggaacgcgcgcgcagccgagcctggaagccattgccgctctgaaaccagacctgatcattgccgacagcagtcgccatgcgggggtttacatcgccttgcagcaaatcgcgccggtactgctgcttaagtcccgcaacgaaacctacgctgaaaatttgcaatctgcggctatcatcggcgaaatggtgggtaaaaagcgagagatgcaggcacgtctggaacaacataaagagaggatggcgcagtgggccagccagcttcccaaagagacaggggatcctctagagacgaccttcggcaatactcgctacaatggatacccgttaatcaaagagttttccattgtggcgctacttatcatcaccacgattctgtgggccttctcctttagcttttatggcgagtactatgcggggcacgtcgatagctattttgcggtgctgcatgaaaacggtcggcctgtatatgctggtgggcgcgatgcagcttggcgtgatgtatatgctgagtttccgcgcttatctctacctgacggtttccgagctgctgctgttcaccgtgtgacgccgctctacatcacgctgatttatgacatcatgagtaagcgccgtctgcgctggggctatgcctttagcgccttgctggcggtgattggtgccgggattattcgctatgatcaggtcaccgaccatttctggactggcttgctgctggtgcaactctccaatatcacttttgccattggcatggtgggttacaaacgcctgatggaaactcgcccgatgccacagcataacgcctttgcgtggttctatcttggcgcgtttctggtggcagtgattgcatggttcttgctgggaaatgcgcagaaaatgccgcaaaccacgctgcaatggggcattctggtgtttaaagttataataacgaaaaagagtcgagcttaa

SEQ ID NO: 13140 - DNA, 743 bp, Homo sapiens
  SIMILAR (1322)..(1158): 721254mologous to Homo sapiens Human secreted protein, SEQ ID NO: 6126,accession number G02045,Smith-Waterman Score=192.
tcacgacaatcgtccgcataatccgatgagattctgctcgggatgttctccggttaccgccgttcccagaatcatatggatatcgtgcttagcgacgtcaacatgccaaatatggatggttaccgcttgacgcaacgcattcgtcagttgggactgacgttgccggtaatcggagtaactgctaatgcgttggctgaagagaatcagcggtgtctggagtccggtatggacagctgcctgtcgaagccggtacgcgggccatctggcaggaaatcattctggtgctgacgctgatggtgacctcgaaagggattgctggcgtgcctggcgtgtcgtttgtggtgttgctggcaacgctgggtagcgtaggtattccgctggaaggtctggcgtttattgctggtgttgaccgtatcctcgacatggcgcgtactgcgctgaacgtggtgggtaatgcgctggcggtgctcgtgattgccaagtgggaacacaactttgaccgtaagaaagcgctggcttatgagcgtgaagtgctgggcaaatttgataaaaccggcaatgtgtgaatgcctgatgcgacgcttgcgcgtcttatcaggcctacgccagacagcgcaatagcctgatttagcgtattttgtaggtcggataaggcgtttatgccgcatccgacatcaacgcctgatgcgacgcttaacgcgtcttatcaggcctacgccagacagcgcaatagcctgatttag

SEQ ID NO: 13141 - DNA, 906 bp, Homo sapiens
  SIMILAR (420)..(64): 291254mologous to Haemophilus influenzae Rd RNA polymerase sigma-E factor (rpoE),accession number U32745,Smith-Waterman Score= 80.
atggaacgcagggccctcgctggccctggggactgggtgatgtcacggggcatgtacccacggtccaatcgtgttcccacccgcaatcgatccaacctacagggtaacgaaaatcacatcctaaacagcagccgcacaccgggtgtgaacgggctctggtacacgactgaagcaagcaatgacaatgaacaacctccaacaatcagcaactacatggacaaatctcatagacgtatgatgaataaaacaattcaggccagtgcgctgaaaggcagtgaaattatccgcctggttgaagaaagcgatccggtagcggaactggcattgcgtcgctacgagctgcggctggcaaaatcgctggcacatgtcgtgaatattctcgatccggatgtgattgtcctggggggcgggatgagcaatgtagaccgtttatatcaaacggttgggcagttgattaaacaatttgtcttcggcggcgaatgtgaaacgccggtgcgcctgcaaaatgtgccagaaccgcgtagggcggataaggcgttcacgccgcatccggcaataagtaatgagcaccgagactataagctaacccagtggtttcgccagcaccggagtatccggcgattgctggcgcttatagcgaacataaagcagcaagaagacatcgcagcaaagaaagcagggggagggaccgcagttatatttgcagcccgggtcggtgataactcggaaatggggagggcaccaggtacgctattgcccgtggccaacttctaccttgtttgggtagcaaccgtcggggcatgtgggtgtccggcgcatataaaagaagggtttgcgggaaaagtgcgtgagtatcacgcgtggaggaaagcttgtatccgcaggttctaccacgcaggcagctga

SEQ ID NO: 13142 - DNA, 1263 bp, Homo sapiens
  SIMILAR (1)..(267): 701254mologous to Homo sapiens calpactin I light chain,accession number M81457,Smith-Waterman Score=328.
atgttctgggtggtctaccagtgctatggtcccctctcccgcaccacccacaccactggcaatggcagcaaggaatctggggtgatggtgatggtgaaggatgctgctgatgaatttcaggcccagaatacagggccaaatattatatatgccccagctgcaattgaatatgcaggagctgaatgtgcagcactgcggatgaatgaaaatcgtaggaccgctaaatgggataacagcaaggtgatggaagagatcctcgcgctgcgtcacgaactggcgcaactgctgggctttgaaaactacgcctttaaatcccttgccactaaaatggcagaaaacccgcagcagtgcttggtcttcggagtaatgcaggttatgcgacaaataactcggcatataggtcagcaacatgtagtaagtcacgttggtggcaattaccagaccaatacatgtcaacaggctgcgccagtatttagtggcaatctctttaaacgagactttcgggccatcctgcaaaccttcacggtcgccctgttccagtttatcgacatgctgctggaacgccggagtcatgcacaagaaatgagtacagggaggaagattatgcagttacagaaattagtcaatatgtttggtggtgatctcacccgtcgttatgggcaaaaggtgcataagctgacgctgcacggcggttttagctgccctaaccgtgacggtaccatcgggcgtggtggctgcacattctgtaatgttgcctcgtttgccgatgaagcgcagcagcatcgttccattgccgagcaactggcgcaccagtcgaatttagttaaccgcgctaaacgctatctggcctactttcaggcgtataccagcacctttgcggaagttcagtgctgcgattctatgtatcagcaggcggtgagccaggccaatattgtcggtttgtgtgtgggtacccgcccggactgcgtgccggatgcggtgctggatctgctttgcgaatataaggaccagggttacgaagtgtggctggagctggggctacaaaccgcccacgacaaaacactgcatcgcatcaaccgcggccatgattttgcctgttatcagcgtacaacccagctggcacgtcagcgcgggctgaaggtgtgttcccacttaattgtcggcctgcctggcgaagggcaggctgaatgtttgcaaacgctggagcgagtggttgaaaccggcgtggacggcataaagctgcatccgctggggatcctctag

SEQ ID NO: 13143 - DNA, 997 bp, Homo sapiens
  SIMILAR (108)..(1): 581254mologous to Homo sapiens Amino acid sequence of Smad3 interactor protein clone S3+14,accession number B07863,Smith- Waterman Score=124.
gttgataaacaaatgggtgggtgcctggaaacacagtcgtgcacgtccgtttgtccatatcatgcaggacaaagatatcgaggaaacttatcacgcgcagtttatggagcaggcgctgcaccaggcgggctttgaaacgcgtatcttgcgtggattggatgaactgggctgggatgctgccgggcaactgattgatggggaagggcgactggttaactgcgtgtggaaaacctgggcgtggaaatccgcgtttgatcagattcgtgaagttagcgaccgtgagtttgctgcggtgccaatccgtaccggtcatccgcaaaacgaagtgcgtcttatcgacgtattgctgcgcccggaagtgctggtctttgagccgctgtggacggtgatccccggcaacaaagcgattctgccgatcctctggtcgctgttcccgcaccatcgttacctgctggataccgatttcactgttaatgatgaactggtgaaaacaggttacgcagtgaaaccgatcgccggtcgctgtggcagcaatatcgacctcgtcagccatcatgaagaggtgctggacaaaaccagcggtaaatttgccgagcagaaaaacatctatcagcaactgtggtgtttgccgaaagtggacggtaaatacattcaggtatgtaccttcaccgttggcggcaaaccagcgatttccctggggctcttgggccttcagccacagactgaacgctgcaactattgccttccctatttttgaggtgttgagacttgcactggcttcctggctcctcatcttgcagatggcctgttgtgggacttcaccttgtgatctaactttactcgcaattatggagaaattatactgcgcagtgctttctctgtctagtaattcattagtggcgatggttccttcatttccatctattgtaaagtagctgtccccatcactcttccaatctatgaagtaccttgcagatggtctattgtgggacctcat

SEQ ID NO: 13144 - DNA, 1341 bp, Homo sapiens
  SIMILAR (813)..(235): 431254mologous to Homo sapiens ubiquitin-conjugating enzyme isolog,accession number AB032931,Smith-Waterman Score=239.
atgcaggacaaagatatcgaggaaaactatcacgcgcagtttatggagcaggcgctgcaccaggcgggctttgaaacgcgtatcttgcgtggattggatgaactgggctgggatgctgccgggcaactgattgatggggaagggcgactggttaactgcgtgtggaaaacctgggcgtgggaaaccgcgtttgatcagattcgtgaagttagcgaccgtgagtttgctgcggtgccaatccgtaccggtcatccgcaaaacgaagtgcgtcttatcgacgtattgctgcgcccggaagtgctggtctttgagccgctgtggacggtgatccccggcaacaaagcgattctgccgatcctctggtcgctgatcaacctgaccatgactaacatccgtaccgtgctgggatcaaactcacgcctgctgcgtattgtcgatgaagccaccaacccgtgggggattaaagtcacccgtattgaaattcgcgacgtgcgcccaccggcagagcttatctcttcaatgaacgcgcagatgaaagcggaacgtaccaaacgcgcttacattcttgaagcggaagggatccgtcaggcggaaatcctcaaagccgaaggtgaaaaacagtcgcaaatcctgaaagcggaaggcgaacgcgcggtctatcagattatgcagttacagaaattagtcaatatgtttggtggtgatctcacccgtcgttatgggcaaaaggtgcataagctgacgctgcacggcggttttagctgccctaaccgtgacggtaccatcgggcgtggtggctgcacattctgtaatgttgcctcgtttgccgatgaagcgcagcagcatcgttccattgccgagcaactggcgcaccaggcgaatttagttaaccgcgctaaacgctatctgggctactttcaggcgtataccagcacctttgcggaagttcaggtgctgcgttctatgtatcagcaggcggtggaacacacgacaggcaaagtgggtattaccggattttgctatggcggtggcgtatcgaacgcggcggctgtcgcgtatccggaactggcctgcgcggtgccgttttatggtcgtcaggcacccactgccgatgtggcgaagattgaagcgcctttactactccacttcgcggaactggacacccgaatcaacgagggctggcctgcttacgaggcggcgttgaaagccaataataaggtttatgaggcgtatatctatccgggggttaatcacggattccataatgattccacgccccgttatgacaaatctgccgccgatcttgcctggcaaaggacactgaaatggtttaaggcataa

SEQ ID NO: 13145 - DNA, 1623 bp, Homo sapiens
  SIMILAR (7)..(612): 921254mologous to Escherichia coli flagellar protein FlhA,accession number U88319,Smith-Waterman Score=937.
atgttagttgttggccgtatacgagtatccgcaaaaatctgcccagatgatggatttctgccgccagtggtgcacattcgcgacaatatggatctgcaacctgcccgctatcgcattttgatgaaaggcgtggagattggcagtggtgatgcttatccggggcgctggctggcgattaaccctggaaccgctgccgggacgttacctggtgaggcgaccgtcgatccggcatttggcctgaatgctatctggattgaaagtgcgctaaaagaacaggcgcagattcaggggtacacagtggttgaggccagcacggtggtagcaacgcatcttaaccacctcattagccagcatgccgcagagctgtttggtcgtcaggaggcgcaacagctgttggatcgcgtcgcccaggagatgccaaagctgacggaagatctcgttcctggcgtcgtcacgctcaccacactgcataaagtgctgcaaaatctcctcgatgaaaaagtaccgattcgcgatatgcgcaccattctcgaaacgctggcggaacatgcgcccatccaaagcgatccacatgaattaaccgccgtcgtgcctcccggtttacatgctgccgatgagcggatggcactggaaaatgcccgtgatgcttacacccgtcgtagcgaaggatgttcaatttgggtggtgaaggcgagtgaaattgttgcctcgcaaccggaagaacgcggtgaattttttgatccggctgaaagcaaggtctatcgccatccaacgttttacaccatccctgatggcattgagcacatgtgaggtcggaaatgaatcagttaacggcttacaccttgcgcctgggcgataactgcctggtgctctcccagcggctgggtgaatggagcggccacgcaccggaactggaaatcgatctcgcactggcaaacattggcctcgatttattaggtcaggcacgcaacttcttatcgtatgccgctgaattaccgggagaaggcgatgaagataccctggccttcacccgagacgagcgccagttccagcaaacttaattgttggttgaaacaaccaaacggcaattttgccgacaccattgcacgccagtatttcatcgatgcatggcatgtggcgctctttacccgtctgatggaaagccgtgatccgcaactggcggcgatttctgccaaagcaattaaagaagcgcgctatcacctgcgttttagtcgtggctggctggagcgactgggcaatggtactgacgtatcagggcaaaagatgcagcaggccatcaacaagttgtgggcgttttaccgccgaactgttcgatgccgacgagattgatattgcactgagtgaagagggtattgcgggtgatccacaccctttttaaccgccacggggggaaaccccaaatttttggcggggacaaaggaaaccccatttgaaaggacccgcaagagcaaggggattggaactggcgggaaaaaaaggaatggatacccgaacaccttggaacccatgctgggcagaaatggcaggatcttcccgcggggctttgcccgggcaaagcaaggggaaccaaaggagaagggggatgccaccggcttggccacc

SEQ ID NO: 13146 - DNA, 921 bp, Homo sapiens
  SIMILAR (520)..(918): 1001254mologous to Escherichia coli similar to arylsulfatases of Klebsiella pneumoniae and Homo sapiens,accession number M87049,Smith-Waterman Score=702.
atggcacgggccgacacagtttctgtcccaatgttcatgggactggcggcgaagccttgttggagggacacggagccgaatacgggttatcgtggccctcatgtccgcaatattcaactgacccacgaccctcggctagattacagatcgatccgattgatatcaacgatatcggccagaccttccacgaacggctgcaccccgacgcctgccgtttccaatgccatcctggttcacaataaaaaaggtggcccgctggcagacggtatcgtgattacaccgtcccataacccgccggaagatggtggaatcaaatacaatccgccaaatggtggcccggctgataccaacgtcactaaagtggtggaagacagggccaacgcactgctggccgatggcctgaaaggcgtgaagcgtatctccctcgacgaagcgatggcatccggtcaaaaaacgatgtcatcgacactagtgacgatgacatgtgatgacaatgtttatcgcgaaggagcaatgaggcatcctggagcgaaagtggcgaatttagtgccgaaaaccacctttatcgatggtgtggaccagacatccttcttcctgggaacaaatggtcagtctaaccgtaaggccgagcactacttcctcaacggtaaactcgctgctgtgcgtatggatgagttcaagtatcacgtcctgattcagcaaccttacgcttatacccagagcggatatcagggtggattcaccggcacagtaatgcaaacggcgggatcgtcggtgtttaacctctacaccgatccgcaggaaagcgactccatcggcgtgcgccatattccgatgggtgtaccgctacagaccgaaatgcacgcgtatatggagatcctgaaaaaatatccaccacgcgcgcagattaaatctgactaa

SEQ ID NO: 13147 - DNA, 2907 bp, Homo sapiens; identical to SEQ ID NO: 8875
  SIMILAR (1789)..(3504): 911254mologous to HERV-H/env62 envelope protein,accession number AJ289709,Smith-Waterman Score=2670.

SEQ ID NO: 13148 - DNA, 606 bp, Homo sapiens
  SIMILAR (199)..(468): 1001254mologous to Homo sapiens protein kinase C mu,accession number X75756,Smith-Waterman Score=483.
ttagatggcatcaccctcactgtcagactcgatgacgtccagcggctgcagacgcagggagtcatagttggggggcggggtgcctgggatgggcagggcctgctcactggggtagggcccagtgttggggctgcggggggccgtgtcaggctggaagccaaagttggtgtgggcctccaccagctcggccacggtgggcggtgggccagcgtagctggcttgggctcgccgctgccgtaggctcttggccaaggccaccagcttgatccgggccccttcatcagagatgagggcatctacgccatgtcggggacagagacgtccatcggggtactcgtggtatggccggagcccaagggcagtcctagagggtctgagggtgggagcccacctgtccagggccaactgcccttggccttcaaggttcaggtcgtcgagctgatcccagacggcttcccagtcttcctggatttcaccaaaatcccaggtcgggatacccagaatgagcacatcgtactgctccattaatttcggggagtcgtccttgaggttatgtaaggtcaccagttctgggccgataatatcgcggattttttctgccgccat

SEQ ID NO: 13149 - DNA, 1110 bp, Homo sapiens
  SIMILAR (229)..(936): 801254mologous to Homo sapiens putative p150,accession number U93563,Smith-Waterman Score=973.
atggtggagatgaacgatgtgttcgctaatcggtataaaacaccggagaaaacggtccagcttgataacacgctgatcgtcttaacctccgataacggaccggaagccgaagtaccgccgcacggacgcaccccgttccgtggtgcgaaaggttcgacctgggaaggcggcgttcgcgtaccgactttcgtttactggaaagggatgatccaaccgcgtaaatctgacggtattgtcgatctggcagatctcttccctaccgcgctggatctggcagggcatcctggagcgaaagtggcgaatttagtgccgaaaaccacctttatcgatggtgtggaccagacatccttcttcctgggaacaaatggtcagtctaaccgtaaggccgagcactacttcctcaacggtaaactcgctgctgtgcgtatggatgagttcaagtatcacgtcctgattcagcaaccttacgcttatacccagagcggatatcagggtggattcaccggcacagtaatgcaaacggcgggatcgtcggtgtttaacctctacaccgatccgcaggaaagcgactccatcggcgccaaaatggcggcaattggcaataaatggttcggcttgggcccggggccggacccggttggccggcccaaccaaaaatccaagcccatttggcttttaaagaataattggccggttacccaccgccacgccgccaccgttaaaaccgacgtccatccagcccacatcgtccagcaagaaacaacccacattcggtttcttaccggtttttttctcaagttctgccagcttctgctgggtttctttatcctgcgccggatgctgcattactggcatcatattgtcggcaatagtggtcgccggtttaaccagatactggtttgggtgatcgtatccggcaaagcctttgcgtgcggtggcagttgacggggtatctgctgcgctggccatgagaggaaagaacggcggtgaacagcaaccactaatacgtttgggtgaaaacgaaaattccatgcaaaatgcttcgggtatgaggttatgtaaggtcaccagttctgggccgataatatcgcggattttttctgccgccat

SEQ ID NO: 13150 - DNA, 1208 bp, Homo sapiens
  SIMILAR (1)..(486): 941254mologous to Escherichia coli Protease II (EC 3.4.21.83) (Oligopeptidase B),accession number D90827,Smith-Waterman Score= 814.
atgacgcttcatggcgatacgcgcatcgataattactactggctgcgggacgatacgcgttctcagccagaagtcctggactacctgcaacaagaaaatagttacggtcatcgggtgatggcctcacaacaagccttgcaggatcgcatcttaaaggaaatcatcgaccgcattccgcaacgagaagtttctgcgccctacatcaaaaatggctaccgctatcggcatatttatgaaccaggctgtgaatatgctatctaccagcgtcaatcggcattcagtgaagagtgggatgagtgggaaacattgctcgatgccaataagcgcgcagctcatagtgagttttattcgatgggcggaatggcgattacgcccgataacaccattatggcgctggcagaagattttctttcccgacgccagtacggaattcgttttcgtaatctggaaactgaacgtttcccaaatgacgtggatccgatcgaaactcgcgactggctccaggcgatcgaatcggtcatccgtgaagaaggtgttgagcgtgctcagtatctgatcgaccaactgcttgctgaagcccgcaaaggcggtgtaaacgtagccgcaggcacaggtatcagcaactacatcaacaccatccccgttgaagaacaaccggagtatccgggtaatctggaactggaacgccgtattcgttcagctatccgctggaacgccatcatgacggtgctgcgtgcgtcgaaaaaagacctcgaactgggcggccatatggcgtccttccagtcttccgcaaccatttatgatgtgtgctttaaccacttcttccgtgcacgcaacggggtaccgacataccaccttattgaagcagtggtcttcagatttcttactgctggttttcctctacttctaaagaaagcttcaggtgtgttttggaatgcggaatttggtcatcagctcatcgctggcgatcactttttccaccactttcaggcacatctggtgcagttcggcggtgacttcttccagcttttcaacctgggcgagggtcaacttgtagtaagcatcttcacaccagtacggctcgccgtacatggtgtgaaaattgaaaccgtattcgtgggctttctcacgccagtccgggcgctcggtaatactgactctttccatcggtatcagccacccattgaacgagaagagccatgtaagag

SEQ ID NO: 13151 - DNA, 1758 bp, Homo sapiens
  SIMILAR (848)..(1258): 741254mologous to Homo sapiens p40,accession number U93567,Smith-Waterman Score=505.
ttagcgcttgttctcaaggcagcaaagagttagaatagcgtagtattgtatagcgatgcggaaaaagaatattgcggtctcgacggtttctgtaagtgcgtagtcaatgttaagcagaacgcatgggttaagagtggcccaggtcagtagtagtgtaacaatcaggttcgcatgcagccagttgcgcagccaggagttcgcaatagcagggacagagtgagagctgtaagagtccgttaaggtgatgtcggagctagtgaccgaattgaaatatactgtccaaggtgtggtgtaacgccagccaagcagtgtgcgtagtttacttagtcgtgaagctaggatgaaagcgtgaagtacgtacttgtcgtagttgagcgatagtccgtagaagctgtgtaccagtctgtttgcctccagagagtgtaaagcagttgaacgtaccagtctatgttccgtcgtggacgctagcaaagcttctttattcagattaccttcacaaacccacagcaggtcattgtaactgaatcctgtagcgcattcacagcggaaactgccaatctggttaatgcacacaccatttgcacaaatgcctggaatctctttacattcatcaatgtctgccagggagcaacactgctgtgtctctctctcttctactggaaagtggctgaaagttgtttctagggaagaacttgttttattaggatcatgaattttcccagtcctcttggagccatgtacggcgagccgtactggtgtgaagatgcttactacaagttgaccctcgcccaggttgaaaagctggaagaagtcaccgccgaactgcaccagatgtgcctgaaagtggtggaaaaagtgatcgccagcgatgagctgatgaccaaattccgcattccaaaacacaccaaggcattcagtgcctgaagaacttgactggaatccttcattacactcacatctatagcttccaataatgttaacacaacgtccattttcacagattcctggcttggtcctgcattcattttcatcacgcagggtccgaggttgtgccagttttagacggctgttacgcacttcttcgttttctgcgctgaggatcgggcagtgctcgtagaagccagagaacagaccggccagatcgtacaggtaagcacacattacatgcggcgtgccttcacttttttcgctgttcatgttttgtttctgctctcgtgctcgcttgtcctctttgtctcgcccgtcctcctccgctttcttctttttcggtgcctccgggcccttttgtctttttctgtccgctttctttcttcgttctcggtcttctttgcacatcttttgatcttccctgagggcatagccaatcgggcacgtgcattcataggacccaaaagtgttcatgcagcggaaagcacacagcagtgggttctgggcacattcgttgatatcatttccacacggattgccgattgaacactcatcagtatccatttccaggatctgagaagggcacatgtaaccctggcataccttgggacttggctggctggcagatatgtagtgcagagggtctgaaggatcaatgtgcaatgctctggaccccaaggcagaataactcgccctaagatgacaatccgaagaagatgtggtctccggttcaaaaccagcattgcaggctacacagccttctccatcgggccttcgggccattccaggagggcagatgcacatgaaggtgccgattagattcttacacat

SEQ ID NO: 13152 - DNA, 1558 bp, Homo sapiens
  SIMILAR (452)..(622): 331254mologous to Mus musculus immunoglobulin kappa light chain variable region,accession number AF131134,Smith-Waterman Score=73.
ctacaccgatgagggtgagtttgaccgctatctgctgttgccaaataacccgaatatggtcattgtcgacaccaaaatcgtcgctggcgcacctgcacgtctgttagcggcgggtatcggcgatgcgctggcaacctggtttgaagcgcgtgcctgctctcgtagcggcgcgaccaccatggcgggcggcaagtgcacccaggctgcgctggcactggctgaactgtgtacaacacctactgccatcgtatagcgccgatttgctgctctgagtaagagtagccgggtaactggccgcgttgcacaacgttgtgggctcgcagtgccaaaaaccctgtctgcttgaccaccactgccttcgaccataacgcccctgagaacaaattgccattgttaacaccgtactgccgatgcgtaacaacggcgcggctttggttacccgccccggcggtacgccatgcggcaacttattgcccaccccggatacatgaaacataagggtggaagtgattatactataaatgggaatagaaacgggttgggtgaggaggttggattttacgacgaccgagaatgccaacaataagcaaaatgtagcgaggagtactggaacctcatcaaccatgtgcgagataaacttgatacactggcagagttgatccgagttaatgtagcgcctaattacgtgtataattggggcacgtacggtaaatataccgacgcgacgggtaaaaactatggcgcagcccagccaggccgcaccatgaccgtaccgaagacggcaatggcaccaaaaccggcgaccaccactaccgttacccgtggcggttttggtgaatctgttgccaaacaaagcactatgcagcgtagtgcaccggtacctcttctcgttcaatgggtggacaagttgaccctcgcccaggttgaaaagctggaagaagtcaccgccgactgcaccagatgtgcctgtccaccctgtgtccccggggatttgtttgcgtgagatgttgtccaccagctggagggtgcggccttcctgcaggacccgccgtgaggaatttttctccccggggggtttccggatcggggagtccctcgtttgcaccaaagggggcgttttccgctttcccccgttagttccggataggccgcgggagtggtattccaacggacccgtaattcttgggaacgggaataggcgcaatccgggagttatgggaatcgtccccccaccatttggcaaggggaaactattaaccaccttcataaggagcggcggaaaggcccccaactgttggagcccccccaaacctcccgctttggccacgtctatacggaacctcagcaggtctggcaccccggacgttgtagcgccccagtcctgaattcccgggcagcactgagcgtggttctcccggtgcgtctgcacccccgggggcacacgtgggggggaatctcggagggcgcgccttaggccgcggtgggctccgcggcgcggcaaagcggggtgccccccttggatccacagcgccgtcagcacaaaaccaatcacccccat

SEQ ID NO: 13153 - DNA, 672 bp, Homo sapiens
  SIMILAR (2)..(97): 961254mologous to Plasmid F Protein D,accession number M12987,Smith-Waterman Score=150.
ctacacgaaggtttttgcgctggatgtggctgcccggcaccgggtgcagtttgcgatgccggagtctgatgcggttgcgatgctgacacaattatcctgagaataaatgccttggcctttatatggaaatgtggaactgagtggatatgctgtttttgtcgcacacgggtaggactcagcaccagcagtagcacacggggcagcactaacaccctgctcaaagggtggcagtggctggcggtaataaagtgtactggtaaaagtgtcctgccagtccttatatgcgtttccaggacacatcatttttatctttttaatgcagggcaaggaggctctagcaatattaccttgtactccgagggagagagattggcggtagtcttgaggtagagtgagtcctggctctgaggactcaccacgggtggacaaatttttcgcccggtggctaggggttatctcagccagtccaaacaggctccagggcgacctataagactgctgagggcgataactgcttgtgagagtctctatctctctctccccaggtctctctgtagaggtctccatcgggtctgggtcgctctccactccccttcctgtgtatgtcgggatcccttggctctgccccaaagtccaggtgcgggtcaagggccaccttgaccaacaacccat

SEQ ID NO: 13154 - DNA, 1093 bp, Homo sapiens
  SIMILAR (1)..(273): 501254mologous to Homo sapiens PRO2221,accession number AF116695,Smith-Waterman Score=201.
ttaaatgctgaagagtgaaaacaaaaccacgggcgaccgtttgtcgatcatcccggagtatacgttgaactcaacgctgagctggcaggcacgggaagatttgtcgatgcaaacgaccttcacctggtacggcaagcagcagccgaagaagtacaactataaaggtcagccagcggttggaccggaaaccaaagaaattagtccttacagcattgttggcctgagcgcgacctgggatgtgacgaagaatgtcagtctgaccggcggcgtggacaatctgttcgacaaacgtttgtggcgtgcgggtaatgcccagaccacgggcgatttggcaggggccaactatatcgccggtgccggggcgtatacctataacgagccgggacccctgggcagagaaactggaatctgcagaggcagctcctccctccctgccaactgtgctgggggtgaggggtcgggtcgtgggcaagcagtggggtcacgcacccatcatggccacggcgaccctcagctgcaggaacacccggcctgtctgcgtggccttctgcacctcgtggagcagtgccccagcaagatgaccgcacagccaggacggccttttggcagcaccaaggactacccagatgaggtgctgcagtttgcccgagcccaccccctcatgttctggcctgtgcggcctcgacatggccgccctgtccttgtcaagacccacctggcccagcagctacaccagatcgtggtggaccgcgtggaggcagaggatgggacctacgatgtcattttcctggggactggtctggaagttcgtgaatacgcttattatgatgcggaaaatcacactcttgacttcgatgcactgattaacagcctgaatgaagctcaggctggcgacgtagtgctgttccatggctgctgccataacccaaccggtatcgaccctacgctggaacaatggcaaacactggcacaactctccgttgagaaaggctggttaccgctgtttgacttcgcttaccagggttttgcccgtggtctggaagaagatgctgaaggactgcgcgctttcgcggctatgcataaagagctgatt

SEQ ID NO: 13155 - DNA, 484 bp, Homo sapiens
  SIMILAR (2)..(235): 1001254mologous to Escherichia coli ftsJ,accession number M83138,Smith-Waterman Score=391.
gaaagcactgctggagcgcgttggcgacagcaaagtccaggttgtcatgtccgatatggcaccaaacatgagcggaacaccggcggtggatatcccccgtgccatgtatctggtggaactggcgctagaaatgtgtcgtgatgtattagcgccaggtggcagttttgtagtgaaggtgttccagggcgaaggtttcgatgagtatctaagggaaattcgctccctgtttacgaaggcaacaggggcgcacggcccacaacgaccccccccacaaaccgaaagggccgcaccctccccacgcccacccgaggaaaccgccgacaagcgcacggccaaacagggcaccaagagaaccgccccacccagccccccccccaccccaccaccaacaaaaccacataaacccccatgccatagaaacccacgggaccaccaaaagaacccctcaccggttaattacacgtcaccaaattggataatttaa

SEQ ID NO: 13156 - DNA, 2499 bp, Homo sapiens
  SIMILAR (1250)..(1603): 941254mologous to Homo sapiens neurofibromatosis type 1 protein,accession number M38106,Smith-Waterman Score=570.
  misc_feature (1)...(2499): n = a,t,c or g
atgattgtcgccgccgatgagttcattcctggaacggtattccggtcgatagcgtggttattgaccgcaaaatcaatccgcacagatcaaacaagacggtggcaaagccttaaaactgctggtgctgtgggtagtgatgaagatgcgcagcaacgtctggatatggtgaaagagttcaagaactgtgccactcacacgcgtagatggcaggatggcatctcccgcactctgcacaaaggacaccagggcggtcattaccccatggtagccgacagcgcctccacactaccataccgcgaaccaattacttcccttgtcgtgaccggagagcataatcgcgccatacctttcggcagctggcttagcagctccagaccggagatatcggcatggagatatcgcaaatacacacctgcacaccgcgccccggcagcccgccagcgcctcgcgccccgaaccaaactcggcaactacctgcaaatcagttccagccccagcagctgcgcaaagccggagcggacgatgagaatgattttgacatccagctattttcactggcggtcgccatctcctgaatattcatcatcaggctgccgcgccggagaaacacaacactttgcgatccgggttcgccagcgcagcgccatcgccgcaggcaggccaaaacccatcgtgcccagcccaccggagctggttacgcacgtcatgggcgatatcgccgttgtcgctgacgcggtgacgataatcgccgccgcggtggagagcagcagggaagggatctgcgcaccaggccgtcgccgatggtcatcagcacatactgctggaaggcagcatggcgctcaggttgtatttgaagatcccgatacagacgccgccgatcaggtgatcgccagaatcatcatcccggcgatggcgtccccgcgcacaaacttgatgccccgtccatcgcgccgtagaaatcggcctcgctggcaacatcttacgccgggtttgcgcctgcgcctggttgatcaatccggcgttaagatcgcgtcaatcgccatctgtttgccgggcatcgcgtctaagcccgtctcatccgccaaaacctgccaccgtggcggtgccggaagagaggagaaaaaagcgcgtgatgtgaatgagaaaacggcgctgctgaagaagaatccgccaccgagcttgctgctggcgataaatgcccagattctgccgctctttatgtgggccgccgtcactgtcagcccccagatattgcgaatatgctgctgcggtcacttagaggatccccgaaaaccgtacacaacaaatgaagaattacagaaagatggactcaaccngcgttgggaaggcattactgcgcccatacagtgcggagatgtggtgaaattacgcggttcagtcaatcctgaatgcacgctggcgcactgggcgcagcgaaaatgtggcgtctgctgcacggtgagtcgaaaaaagctacatcaacagcctcggcgcactgactggcggtcaggcgctgcaacagcgaaagcggctgtggtggagcggatcaacaacaccttccgtcggccgatcagatccaatggtccgcgggcattgagccgggcgatccgcgcttgtcgattacttcctgccgatcgttgccgatgcggaagccggttttggcgtgtcctgaatgcctttgaactgatgaaagcgatgattgaagccgaaaaacctcgacgaaaaactattgccagcttccagcagcagctgtcggatatgggctacaagtccagttcatcacctctggcaggtactgaaaaaaatccttttcggctggaaccctacgaaatctccacgctgtttgagcaacgccaggccatgttcagtctatcaaagaaggcgtcgttgccgtggacgatcgcggcgaggtcagctgatcaacgatgccgcacaagaattgctgaattaccacaatttcattcgctcacgttctttgccggtctttgtattggcatcagcctgtggctcaggcactcgccgccgaagggcaaactaacgcggatgaccgctggttgtcgaagcatcaacgccttcgctttatgcgccacaacaatcgccgatgccgaaattctcgcgtccgatctggcagattcgaccctgcggaactgctggccccttataccggtgatatcgccgctgaggaatcagcaaagccatgcgcggaggcgcaaagttcctgcatcacggcttaagcgccagcaacgttatgtggcggaagccattactgaagagtggcgatggcacccggtccgcttgaagtggcctggtgagcgactacgactggccctgcaagaactggggcggtttggatcaagttcgggcaaatgttatcaacccgccgcgatcttttccaccgcatattgccgatcagctggcgttattgcaggacaaagttgctcgtttgatggcaagctggcgaagcagcagattgaagctgcaatgggcggctgccggtag

SEQ ID NO: 13157 - DNA, 1554 bp, Homo sapiens
  SIMILAR (1537)..(1959): 881254mologous to Homo sapiens GAP-related protein,accession number M82814,Smith-Waterman Score=656.
ttaatgctctttataatctactgctcctatgacatctacatctacatcaacatctacatctacatcaacaacaactactgcctctgaactatgcgctgggcacacctgaatcaatggtggaactctacctgaggttctccgatcatcggcatgagcagcatcaacctgcctgcgtatgcccatatgctgacctgtctggtgtgaacgtccacgccggatctggaactggcgcgtcgctttgcacaagctatccacgcgaaatatccgggcaaactgctggcttataactgctcgccgtcgttcaactggcagataaacctcgacgacaaaactattgccagcttccagcagcagctgtcggatatgggctacaagttccagttcatcaccctggcaggtatccacagcatgtggttcaacatgtttgacctggcaaacgcctatgcccagggcgagggtatgaagcactacgttgagaaagtgcagcagccggaatttgccgccgcgaaagatggctataccttcgtatctcaccagcaggaagtgggtacaggttacttcgataaagtgacgatgtaggccggataaggcgttcacgccgcatccggcaatcggtgcacgatgcctgatgcgacgcttgcgcgtcttatcatgcctacagccgttgccgaacgtaggctggataaggcgtttacgccgcatccggcaattctctgctcctgatgagggcgctaaatgccgcgtggccattttgcaggcttcgatgctcagtatggtcgattcctcgaagtgacctccggtgcgcagcagcgtttcgaacagaccgactgaaagcatgcagctgcactgcctttcttcttcccctccagtgcgtacagtcttgcggccatcagtgtggtctttgggttcagataactcacgtgaagtacgagtatggtgtctgaggtgatttcctttacctgtttctatcgtcaggaaaacgattttgatatcgaaccagacgctccattcgcggatgtactcaaggtcgaactcgacgcgtttttccattttctccagcgtgtcggtttcgccgcgccagccgttaatcagcgccccttcggagctgatgtctctgtaaacgaagtgctcaaggacttgacgtttcgcgaggaaggctcgcaatgggcacaaggttccgtagcacttgtgtgtgggatattctctccaagcgtgttgcctttgtttccgggaagccactccgggaaaggtcttaatggtcccttgtaccgggtcaagtctgcggcggtgggtagggttatcgctacactggtagtcaaatattggcgtacgatatcgaataccgtcaccttgcaactggcgcatgaacagcgaggtgtcattatccagcacatccgccagtgcgccataggccgcttttttttgttcgatatccggttccggggccggttcagtcgttgagtccgttgtcgttgtggttgtaacgccgggtatggataccgcgtgggcaggtgcgcccagcaggcagaagaggatgaacaggatccaccgcat

SEQ ID NO: 13158 - DNA, 270 bp, Homo sapiens
  SIMILAR (2)..(247): 511254mologous to Escherichia coli peptide termination factor,accession number Z26313,Smith-Waterman Score=147.
ctttatggcgggtgaccgttcgcacgttgaagaagcgtatcgggcgatatcctcggcccagggtgagatgatgaagttcaccggtattccgaacttcgcccagaactgttccgtcgtatccgcctgaaagatccgctgaagcaaaaacgctgctcaaagggctggtacagctttccgaagagggcgcggtgcaggtgtccgtccaatctccaacaacgatctgatcgttggtgcagttggtgtgctcagtttgatgtggtggtagcgcgc

SEQ ID NO: 13159 - DNA, 447 bp, Homo sapiens
  SIMILAR (304)..(675): 661254mologous to Cloning vector pEH1 lac repressor,accession number AJ007659,Smith-Waterman Score=363.
atgccagcggaatttattaccggcggagcggtcccagtgaaggcttcttcccgtattcatgcgggcattgagcaagcgatcagccgtggcctggcgtatgcgccatatgctgacctgaaaaacctcgacgacaaaactattgccagcttccagcagcagctgtcggatatgggctacaagttccagttcatcaccctggcaggtatccacagcatgtggttcaacatgtttgacctggcaaacgcctatgcccagggcgagggtatgaagcactacgttgagaaagtgcagcagccggaatttgccgccaagaaagatggctataccttcgtatctcaccagcaggaagtgggtacaggttacttcgataaagtgacgactattattcagggcggcacgtcttcagtcaccgcgctgaccggctccactgaagaatcgcagttctaa

SEQ ID NO: 13160 - DNA, 521 bp, Homo sapiens
  SIMILAR (510)..(259): 951254mologous to Escherichia coli O157:H7 isocitrate lyase,accession number AE005633,Smith-Waterman Score=427.
tttggccgtgtagtaatgcagcgcagttgctccacgaccagaccaacgtgatgatcgtaaagatggatacggtttttcatcgcctgctggacagcatgccagtcggcctgttcgaaacgctgctgcgcaccggaggtcacttcgaggaatcgaccatactgagcatcgaagccttgcaaaatggtttgagcaatcaataattccaggccacgcggcatttagcgccctcatcaggagcagagaattgccggatgcggcgtaaacgcctgtacccacttcctgctggtgagatacgaaggtatagccatctttcgcggcggcaaattccggctgctgcactttctcaacgtagtgcttcataccctcgccctgggcataggcgtttgccaggtcaaacatgttgaaccacatgctgtggatacctgccagggtgatgaactggaacttgtagcccatatccgacaggtgttgctggaagctggcaatagtattgtcgtcgaggttattctgcacgtgaacga

SEQ ID NO: 13161 - DNA, 1032 bp, Homo sapiens
  SIMILAR (148)..(981): 871254mologous to Homo sapiens putative p150,accession number U93569,Smith-Waterman Score=1243.
  misc_feature (1)...(1032): n = a,t,c or g
tcacgccagtttcagatcccgggtcatgttttccacgttgttttcgtggatcaccacgttgtcttcgatacgaatgccgccgaacggtttcagtgcttcaattttctgccagttgaagtgcttgctgaactggccttcacgccacggtgccagtagcgattcgatgaagtagatacccggttcgatggttaacaccatgcccggctggagaatacgggtgcagcgcaggtacggatattttgccggtgccgcgaggtgcgtaccgctatcatcctgcataaaaccagcgacgtcatgcacctgcaggcccagcggatggccgataccatgcggcataaacggcccggtaagatcgttttcgaccatcgcttcttcactcatatcggtgatgatttgatgtttacgcagcagtttggcgatgcgctgatggaactggatgtggtaatccacatagctgacgcctgctttcatggtggcgatcagcgccagttgttcatcattaacgtccttcaccagctgcgcgtagtcgttgtcactttttgccgaccaggtacgggtcaggtcagccgcatagccgttatattctgccccggcatccagcaggaagctgcgcatctcttccggtgcctgatggtccagtttggtgtaatgcagtaccgcagcgtgttcgttaagcgccacaatgttgctgtaaggtacgtcggtatcacgatgaccggtcgcggtcagataggcaatgttgatatcgaactcgctcatgccagaacggaacgcttcttctgccgcgcggtgaccgttgaccgccattttctgcgcttcacgcatacaggccagttcgtactcagttttgaaggagcgatagtaatgcaggtagtcgataacccctttcgggttgatgttgctggcctcaatacccagttgcagcgcacgttccggcaccggaccgatataaccgatattgccgcgcgcagacangcagacgggtgcagctagtctcgaacatatcatcgacgatacgctgaatttctgcat

SEQ ID NO: 13162 - DNA, 421 bp, Homo sapiens
  SIMILAR (192)..(380): 411254mologous to synthetic construct aceA,accession number A31763,Smith-Waterman Score=104.
ctgtggtggagcggatcaacaacaccttccgtcggccgatcagatccaatggtccgcgggcattgagccgggcgatccgcgcttgtcgattacttcctgccgatcgttgccgatgcggaagccggttttggcgtgtcctgaatgcctttgaactgatgaaagcgatgattgaagccgaaaaacctcgacgaaaaactattgccagcttccagcagcagctgtcggatatgggctacaagtccagttcatcacctctggcaggtactgaaaaaaatccttttcggctggaaccctacgaaatctccacgctgtttgagcaacgccaggccatgttcagtctatcaaagaaggcgtcgttgccgtggacgatcgcggcgaggtcagctgatcaacgatgccgcacaagaattgctgaattacc

SEQ ID NO: 13163 - DNA, 747 bp, Homo sapiens
  SIMILAR (13)..(621): 931254mologous to Homo sapiens putative p150,accession number U93564,Smith-Waterman Score=972.
gccacgcggcatttagcgccctcatcaggagcagagaattgccggatgcggcgtaaacgccttatccagcctacgttcggcaacggctgtaggcatgataagacgcgcaagcgtcgcatcaggcatcgtgcaccgattgccggatgcggcgtgaacgccttatccggcctacatcgtcactttatcgaagtaacctgtacccacttcctgctggtgagatacgaaggtatagccatctttcgcggcggcaaattccggctgctgcactttctcaacgtagtgcttcataccctcgccctgggcataggcgtttgccaggtcaaacatgttgaaccacatgctgtggatacctgccagggtgatgaactggaacttgtagcccatatccgacagctgctgctggaagctggcaatagttttgtcgtcgaggtttatctgccagttgaacgacggcgagcagttataagccagcagtttgcccggatatttcgcgtggatagcttgtgcaaagcgacgcgccagttccagatccggcgtggacgttcacaccagacaggtcagcatatgggcatacgcaggcaggttgatgctgctcatgccgatgatcggagaacctcaggtagagttccaccattgattcaggtgtgcccagcgcatagttcagaggcagtagttgttgttgatgtagatgtagatgttgatgtagatgtagatgtcataggagcagtagattataaagagcattaa

SEQ ID NO: 13164 - DNA, 2107 bp, Homo sapiens
  SIMILAR (5)..(631): 851254mologous to Pseudomonas aeruginosa probable chemotaxis transducer,accession number AE004685,Smith-Waterman Score=827.
ggcagacctgcaggagccgatcggcgtcgacagcaatgacgaggccggccagttgcagcgggcgttgggcgagatgcaggagaacctgcggcagatggtcaccatcatccgccaggaaagcgaagaactccacgacacctcccagtccatcggccagacctcgcagtcgatccaacaggccgacagcgccaccagcatggccgcgagcatggaagagatgatcaccaatatctcgcagatttccgaccacgccgacaacgccagggtgatctcggccaagtccgaggagctggccagcagtggcgggcaggtgatcctcaacgtggtggaagggatgagccgcatcgccgacgtggtcaaccagtcctccaccagcatcaccgctctcggccagtcgtcggacgagatccattcgatcatccaggtgatcaaggggatcgccgagcagaccaacctgctggcgttgaacgccgccatcgaggctgcgcgggccggagaggccgggcgcggtttcgccgtggtcgccgacgagaaaaacctcgacgacaaaactattgccagcttccagcagcagctgtcggatatgggctacaagttccagttcatcaccctggcaggtatccacagcatgtgtttcaacatgtttgacctggcaaacgcctatgcccagggcgagggtatgaagcactacgttgagaaagtgcagcagccggaatttgccgccgcgaaagatggctataccttcgtatctcaccagcaggaagtgggtacaggttacttcgataaagtgacgactattattcagggcggcaccaactgcgagcagagcgtcaaactgcattactggtcgctggatgacgaacaggccgcgattaaagccgaaagctgcgatgactgcgacacttacctgaaaattctctatcaggaaaaagatccaaaaatcgaagccgtagcagatgacctcgcctctctggtactggacgcacgaatggagcaagaaggctatgcccgcagttccatcaacccgttcctgtttccggtccagccagtcacctttgaacggacgcttcatgttttcgatagcgtcgatgatgtcgtggtgaaccagctgttcgttctggatacctacacaacgaccgccgtaacctgccagcagcagatcgatagcgtaacgcccatacgggaagccagaatacggtcattaattatgaaaactatcaatactgttgttgctgctatggctctttcaactctgtcatttggcgtgttcgcggcggaaccggtaacggcatcccaggcacagaacatgaataaaatcggcgtggtttctgccgatggcgcatccaccctcgatgccctggaagcgaaactggctgagaaagccgcggcagccggtgccagtggatacagcatcacttccgccaccaacaacaataaattaagcggtactgcgctgagctacatcggcttcaccaacttcgactggggttccgatttaggggatgacagcggtaacctaatcaacggtattaagacccgtactaataactctatcgcttccagccatattctggctctgaactacgatcactggcactactctgtcgtagctcgttactggcacgacggtggtcagtggaacgacgatgcagaactgaacttcggcaacggcaacttcaacgttcgctctaccggctggggtggttacctggtagtcagcgaatgggttgtacttcgcttcaccgacatctttctgcgcatcttcccctgcgataacggtcgtaccatactgatccgcttcggtatatttcgaatgctcatgatcgtggcaatagagacacaacaattcccagttactgccatcttccgggttattggtatggtcgtgatcaatgtggtgaacgcaagcgccgagggcccaacgctggaagatgcctgtaatgtgctgggcgtgaagccgacggatgatgcgaccaccatcaaacgtgcctaccgtaagctgatgagtgaacaccatcccgataagctggtggcgaaaggtttgccgcctgagatgatggagatggcgaacagaaagcgcaggaaattcagcaggcatatgagctga

SEQ ID NO: 13165 - DNA, 1169 bp, Homo sapiens
  SIMILAR (585)..(1166): 961254mologous to Escherichia coli SbcC (AA 1-1048),accession number X15981,Smith-Waterman Score=942.
accaacgtgatgatcgtaaagatggatacggtttttcatcgcctgctggacagcatgccagtcggcctgttcgaaacgctgctgcgcaccggaggtcacttcgaggaatcgaccatactgagcatcgaagccttgcaaaatggtttgagcaatcaataattccaggccacgcggcatttagcgccctcatcaggagcagagaattgccggatgcgcgtaaacgccttatccagcctacgttcggcaacggctgtaggcatgataagacgcgcaagcgtcgcatcaggcatcgtgcaccgattgccggatgcggcgtgaacgccttatccttcctacatcgtcactttatcgaagtaacctgtacccacttcctgctggtgagatacgaaggtatagccatctttcgcggcggcaaattccggctgctgcactttctcaacgtagtgcttcataccctcgccctgggcataggcgtttgccaggtcaaacatgttgaaccacatgctgtggatacctgccagggtgatgaactggaacttgtagcccatatccgacagctgctgctggaagctggcaataagccgttccttgcgtcgctaatggatgaacaaacactaacgcagctggaacagctcaagcagaatctgaaaaaccagcgccgtcaggcgcaaactctggtcactcagacagcagaaacgctggcacagcatcaacaacaccgacctgacgacgggttggctctcactgtgacggtggagcagattcagcaagagttagcgcaaactcaccaaaagttgcgtgaaaacaccacgagtcaaggcgagattcgccagcagctgaagcaggatgcagataaccgtcagcaacaacaaaccttaatgcagcaaattgctcaaatgacgcagcaggttgaggactggggatatctgaattcgctaataggttccaaagagggcgataaattccgcaagtttgcccgaggggtgacgctggataatttagtccatctcgctaatcagcaacttacccggctgcacgggcgctatctgttacagcgcaaagccagcgaggcgctggaagtcgaggttgttgatacctggcaggcagatgcggtacgcgtttcccgtaccctttccggcggcgaaagtttcctcgttagtctggcgtga

SEQ ID NO: 13166 - DNA, 3069 bp, Homo sapiens
  SIMILAR (1075)..(3300): 941254mologous to Homo sapiens putative p150,accession number U93574,Smith-Waterman Score=3761.
atgacgtctgcgggggagttacaatcatttctaggtcgggcactcaacaaggccggcagcttcaccaggccccgccgccggaatcggcagaagccccgctcgtctggttcaacagccacaacgaagcctggcgaagccactgaacaggccagcgcagcagcgaggtctgcttccgcagcgaagacatccgaaacgtacgcgaaagcgtcggaaacaagcgcagaatcctcaaaaacggctgccgcatcgtcagccagttcggcggcgtcatcggcatcatcggcgtctgcttcaaaagatgaggcgaccagacaagcgtcagcagcgaagagcagcgccacgacggcatccacgaaggcgacagaggctgctggcagtgcgacggcggcagctcagagcaaaagtacggcggaatccgcggcaacgcgcgccgagacagcagctaaacgggcagaggatattgcatccgccgtggcgcttgaggatgcaagtacgacgaaaaaggggatagtacagctcagcagtgcgaccaacagtacgtctgaaacgctggcggcaacgccaaaggcagtaaaatcagcctatgacaatgcagagaaacgtctgcagaaagaccagaacggcgctgatatacccgataagggatgcttcctgaacaacattaacgcggtcagtaaaacagactttgctgataagcgtggtatgcgttatgtgcgggttaacgctcctgcaggtgcaacatctggaaaatattaccctgttgttgttatgcgttctgctggctcattccacatattcgatctgctcaagtctggtcaaaacgtggtgctgagtgcacctacaagcatgggcaaaagtgcaatcgtcgattcattgctcggcatgggaactttgaaacggcttgttctggttgttccaaccgtggctcttgccgacgaaacccgtcgccgactgcaagagcgattcggtgaccgatatcagatcatccaccacagttcccaagtgtgccattccgatcaggctgtttatgtgttaactcaggagcgagtgaacgagcgtgacgacatcgtcgacattgacctcttcgtcattgacgagttttacaagttggcgttccgacaactgaaaagcggggacattgatcatcaagacgaacgagtcatcgagctcaacattgcgttaagcaaactgcttaaggtctccaggcagttttacctgacgggaccgttcgttaacagcattcgcggtctcgaaaaacttggatatccgcatactttcgtttctaccgacttcaatacagtcgcgctagatgttaagacgttcggcatcaaagcgaatgacgacaaagccaagctcaaagcgctgggggaaatcgcgcacgcatgtgtcgacgcaacgatcatttattgcaagtcaccaactgttgcgggcctggtggcgcgcgagctgatcaggcttgggcatgctatccgacagcttaactctggagcaccggacaaagccaatttactcgcagaagcctatatctataaactggcggggcgtcatcaggatgaattacgggcgatgacagagtcattacctgaaaatgcatctacgcaacaatatcccacagaatacgtgcaggcattacgtaataatcaacttgctgccgcgattgacgatgccaatttaacgccagatattcgcgctgatattcatgccgcaactgatcatcagccgaaaaaagcacagtcaataatgaccgagctcttttatcacaaggagaccattgccccggatttatccgatgaagaacttgcggatctcttttacagccacctggagagtgaaaattatccgggcgcgctaactgtcacccaacataccattaatacttcgccgcctttccttcggttaatgggcacgcctacgagcatcccgaatgatacctggttacaggggcattcgtttctctcaaccgtagcaaaatatagtaatgatcttcctcaggctgaaatgacagccagagagcttgcttataacgcaccaggaaatcagggactgcgcattgattacgcgagtgtgttacaagcccgcggttggcctcgtgcagcagaaaatgaattaaaaaaagcagaagtgatcgagccaccgaacatcggcatccataacgtcccatttatcggtttcgtaaatcggctctacacctttccagtcgtcagctgccagcggagtggtagtcacttcgcgaccatccggcatacggccatccagaacgtccagtttagtcaggcagaagccagacagggagttcagctgtaccgcacgacgaacggcaacggtgtccagccagccggtacgacgacgacgccccgtagttgcgccgaattcgttaccctgcttgcagaggaactcgccagtttcatcaaacagttcggtcgggaacggacctgcacctacacgagtggagtaagctttgaggatacccagaacgtaatcaacataacgcgggcccaggccggaaccggtcgccacgccaccagcagtggtgttggaagaagttacgtacggataagtaccgtggtcgatatccagcagcgtaccctgcgcaccttcaaacatgacgaaatcgccacgctgacgcgcctggtcgagcaggtcagaaacgtcaaccaccatagaagtcaggatgtcggcaacagccatcgtatcatccagaactttctggtaatcaaccgcttcagctttgtagtagttaaccaactggaagttgtgatattccatcacttctttcagtttttcagcgaaggtttctttgtcgaaaaggtcgccaacacgcagaccgcgacgtgctactttatcttcataagcaggcccgataccacgaccggtggtgccgatcgctttcgcgccacgcgctttctcacgcgcgttatccagcgcaacgtgataatcaaggatcagcggacatgcttcagacagcagcagacgctcacgaacggggatgccacggtcttccagttctttcatctctttcatcagcgcggccggagacagcacaacaaacgggcgtgcctccacaaataa

SEQ ID NO: 13167 - DNA, 2922 bp, Homo sapiens; identical to SEQ ID NO: 2239
  SIMILAR (288)..(2930): 991254mologous to Homo sapiens cadherin related 23,accession number AF312024,Smith-Waterman Score=4503.

SEQ ID NO: 13168 - DNA, 3723 bp, Homo sapiens
  SIMILAR (48)..(326): 601254mologous to Plasmodium lophurae histidine-rich protein,accession number X01469,Smith-Waterman Score=423.
atggagttcaccagcctgacaccggatgacctgagggtgcttgagctataccggacgccattctcggatggttatgttttccactcaatgcagttccacatattcgatctgctcaagtctggtcaaaacgtggtgctgagtgcacctacaagcatgggcaaaagtgcaatcgtcgattcattgctcggcatgggaactttgaaacggcttgttctggttgttccaaccgtggctcttgccgacgaaacccgtcgccgactgcaagagcgattcggtgaccgatatcagatcatccaccacagttcccaagtgtgccattccgatcaggctgtttatgtgttaactcaggagcgagtgaacgagcgtgacgacatcgtcgacattgacctcttcgtcattgacgagttttacaagttggcgttccgacaactgaaaagcggggacattgatcatcaagacgaacgagtcatcgagctcaacattgcgttaagcaaactgcttaaggtctccaggcagttttacctgacgggaccgttcgttaacagcattcgcggtctcgaaaaacttggatatccgcatactttcgtttctaccgacttcaatacagtcgcgctagatgttaagacgtcggcatcaaagcgaatgacgacaaagccaagctcaaagcgctgggggaaatcgcgcacatgtgtcgacgccgatcatatcaaaaacggtattggcttgcattttggcgcgctaccgagggcactgcagcaatacactgccgaccaattcaatgctggaaaactgcgctttttgctctgcacctccacgatcattgaaggagtcaacactatcgctaagaacgttgtgatctacgacaaccgcgcggggtctacacgaacgatatctgccgacatcattaattcggtaatttgtggccttaatacgctgaagtcattcgacacaaggtgggcgttacttttagaacagcaggacggcaaaactctcgcatcagtacagactctggacgaaagtcgcctgccggagggcgatgtcacggtcgatgttcactggtcgagcctgaactataaagatgcgctggcgataccggccgtacgcggtggtgatattttcatcatccagtccacttgtgcccctactaacgacaacctgatggaattagtcgttatggttgatgccctgcgtcgtgcttccgcaggtcgtatcaccgctgttatcccctactttggctatgcgcgccaggaccgtcgcgtccgttccgctcgtgtaccaatcactgcgaaagtggttgcagacttcctctccagcgtcggtgttgaccgtgtgctgacagtggatctgcacgctgaacagattcagggtttcttcgacgttccggttgataacgtatttggtagcccgatcctgctggaagacatgctgcagctgaatctggataacccaattgtggtttctccggacatcggcggcgttgtgcgtgcccgcgctatcgctaagctgctgaacgataccgatatggcaatcatcgacaaacgtcgtccgcgtggcgaacgtttcacaggtcgtgactgcgtactggtcgatgatatgatcgacacttgcggtacgctgtgtaaagctgctgaagctctgaaagaacgtggtgctaaacgtgtatttgcgtacgcgactcacccgatcttctctggcaacgcggcgaacaacctgcgtaactctgtaattgatgaagtcgttgtctgcgataccattccgctgagcgatgaaatcaaatcactgccgaacatgatgcgctcacggatgaaacattattgtgaacaaaatattttcctcacatgtgatgcctttccgcgctctgatcgacgcttgctggaattcagcgcgctgatgaaatatagtgacatccatgaatattcctgggcagcgccaggccaccagggcggcgttggttttaccaaaacacccgccggacgtttctaccatgactactatggtgaaaatctgttccgcaccgacatgggcatcgaacgaacttccctcggttctttgcttgaccatactggcgcatttggcgaaagcgaaaaatatgccgcacgcgtatttggtgccgatcgctcctggtcggtagtcgtcggtacttccggctctaaccgcaccatcatgcaggcttgcatgaccgataacgatgtcgtggtcgttgaccgtaactgccataaatccatcgaacaaggtttgatgctgacaggcgcgaaaccggtctatatggtgccaagccgcaaccgctacggcattatcgggccaatctatccgcaggaaatgcaacctgaaaccttgcagaagaaaatcagtgaaagcccgctgaccaaagacaaagccgggcaaaaaccgtcttactgcgtggtgaccaactgcacctatgacggcgtgtgttataacgctaaagaagcgcaggatctgctggaaaaaacctccgatcgtctgcactttgacgaagcctggtacggctatgcacgtttcaacccgatctatgccgatcactatgccatgcgcggcgaacctggcgatcacaacggtcctaccgttttcgccacccactccacccacaaactgctgaatgcgctgtcacaggcttcttatattcatgtacgtgaaggtcgtggggcgattaacttctcccgcttcaaccaggcctacatgatgcatgccaccacctccccgctgtatgccatctgcgcatccaacgacgtggcggtgtcgatgatggacggcaacagcggcctgtcactgacacaggaagtgattgacgaagcggttgatttccgtcaggcgatggcgcggctatataaagagttcaccgctgacggtagctggttcttcaaaccgtggaacaaagaagtcgtcaccgacccacaaaccggcaaaacctatgactttgctgacgcaccaaccaaactgctgaccaccgttcaggactgctgggtaatgcatccgggcgaaagctggcacggcttcaaagatattccggataactggagtatgctcgacccgattaaaatcagcatccttgctccgggaatgggtgaagatggtgaactggaagaaaccggtgttccggcggcgctggtcactgcctggcttggtcgccacggcattgtacctacccgcaccactgacttccaaattatgttcctgttctctatgggcgtaacccgtgggaaatggggaagttgcgggggcgctcgctgcctgtcggccactgtcgagaatgctggaatggagccgcgcatttctttccacggttctgggacccgcctcgtgcgctacgccattcccccatccagaagtcctcggaccgatatttcggtattcggcatcgttctcgttcatcagctgctggcgctggcgagcggtgcgaagactgtccaaatgaaatttggtcaccacggcggcaaccatccggttaaagatgtggagaaaaacgtggtaatgatcaccgcccagaaccacggttttgcggtggacgaagcaacattacctgcaaacctgcgtgtcacgcataaatccctgttcgacggtacgttacagggcattcatcgcaccgataaaccggcattcagcttccaggggcaccctgaagccagcactggtccacacgacgccgcgccgttgttcgaccacgttatcgagttaattgagcagtaccgtaaaaccgctaagtaa

SEQ ID NO: 13169 - DNA, 3885 bp, Homo sapiens
  SIMILAR (2)..(664): 991254mologous to Escherichia coli D-mannonate oxidoreductase (EC 1.1.1.57) (Fructuronate reductase),accession number D90797,Smith-Waterman Score=1157.
atgatgtacaagtcgatgctcggtaccaaatacagaaacactaagacaattgacagaggaacacggtctgctttgaggtattacatgaaaattatcagtaaacgcagggcaatgacgatataccgccagcatcctgagtcccgaatctttcgctactgcaccggcaaataccagtggcacggtagcgtctgtcattacaccggcagggacgttccggatatcgccggagtcctcgcgcgagatatcacgccgcgcctgggagcacgtctggtgcaggagggcaaccgactgcactatctggctgaccgggccagtatcaccggtaagtttagtgacgccgaatgccggaagctggatgtggtattcccgcactttatcagccagatggaatcgatgctgaccactggtgaactcagcccccaccatgcccaatgcgtcaccctgtaccacaacggttttacctgcgaagccgatactcttggtagttgcggctacgcggcgaagccctgcctgtcgccagtggctgtctggcaaatgctactgacacgcctgctggaacaacactatgggctgacactgaacgacacgccgttcagtgatgaacctgttcttaccgcacctatcgatgctgcggcgctgcgcggcattgagtttggcaaattccagcttggcaacatggtggttggcgacattatcgagtgcggcagcgacgttaccgactacgcggtgggcgacagcgtatgcggctacggcccgctctccgagacggtcatcattaacgcagtgaataactacaagctgcgcaaaatgccgcaaggcagctcctggaaaaacgccgtctgctacgacccggcgcagtttgccatgagcggggtgcgcgatgccaacggtgcgcgtaggggattttggtgggggggcttgggcgccatccgggtccaattggcattcaaatggctaaacgccgctgggcggcttcctggtggtggattgggcggtccgatcccttattcggcccatcgctgtgatattgcccgtcgccacggcgcggatttctgccttaaccccatcggcactgatgtaggtaaagagatcaaaacgctgaccggcaagcagggtgccgatgtgattatcgaaaccagcggctacgccgacgcgctgcaatcggcgctccgcggtctggcttatggcggcaccatctcctatgtcgcgtttgccaagccgtttgccgaaggttttaacctcggacgcgaagcgcatttcaataacgccaaaattgtcttctctcgcgcgtgcagcgaaccgaacccggattatccgcgctggagccgcaagcgtattgaagaaacctgttgggaactgctgatgaacggttatctcaattgcgaagatttaatcgacccggtggtgacctttgccaatagcccggaaagctatatgcagaatgaaacaagaagtggaaaatccggcacacagcaatcaggcgttctttccggaaaacattctggagaaatttcgttatatcaaagagatgggcttcgatggtttgagattgacggcaaatgctggttaacaacatcgaagaagtcaagggcgatcaagaaacggtttccggaaaccttcacctgggcgcatcgtatcagcaatcgggcggtggattttctgcaacagcctgcgcgcgcagacgagcctttcctgatggtggtttcgtatgatgagccgcatcacccgttcacctgtccggtggagtatttagagaaatacgctgatttttactacgagctgggcgagaaagcacaggatgacctggctaacaaaccggaacatcaccgcttatgggcgcaggcgatgccatcgccagtcggtgatgacgggctttatcaccatccgctctattttgcctgtaatgactttgttgatgaccaaatcggacgggtcatcaatgccttaacgccagagcaacgtgaaaatacgtgggttatttatacctccgatcacggcgaaatgatgggcgcacataagctgatcagtaaaggggcggcgatgtatgacgacatcacccgcattccgctgatcatccgttcgccgcaaggggagcggcgacaggtcgatacgccagtcagtcatatcgatttactgccgacaatgatggcgctggcagatattgaaaaaccagagattctgccgggggaaaatatccttgccgtgaaagagccacgcggcgtgatggtggaatttaaccgctacgagattgagcatgacagctttggcggttttattccggtgcgttgctgggtgacggatgactttaaactggtactcaacctcttcaccagtgatgaactttacgatcgccgtaatgacccaaatgaaatgcataacctgatcgatgatatccgttttgcagacgttcgcagcaaaatgcatgacgccttattggattacatggacaaaattcgcgatccgttccgcagttaccaatggagtctgcgtccgtggcgtaaagatgcacggccgcgctggatgggggcgtttcgtccacgtccacaagatggctattcgccagttgtacgcgactatgacaccggcctaccgacacaaggggtgaagacaaccccctttggagaccccggggaaaacactcccccggaggggttcacacccgacgataacgacacagaagccccaccacgacgcgcaccaggacgacaaaagagagcaagagcccacgccccaagcacgagagaaccagcagacaacaccctggtattactcgccattcgtgcactggtgaaagaaggtaaaaccgggcaggcggttgagttgtttaaccaactaccgcaagaactgaacgatgctcagcgtcgcgagaaaacactgctggcggtagagattaaactggcgcagaaagattttgctggcgcgcaaaacttgctggcgaaaatcacacctgccgatttagaacaaaaccagcaagcgcgttactggcaggcaaaaatcgatgccagccaggggcgtccttccattgatttactgcgcgcgttaattgctcaggaaccgctgcttggcgcgaaagaaaaacagcagaatattgatgccacctggcaggcgctctcctccatgactcaggaacaggcgaatacgctggtgatcaacgccgacgaaaatattctgcaaggctggctggatctgcagcgcgtctggtttgataaccgtaacgatcccgacatgatgaaagccgggatcgccgactggcagaaacgttatccgaacaatccgggcgcgaaaatgctgccaacgcagttggttaacgtaaaagcgtttaaaccagcctcgaccaacaaaatcgccctgctgttgccactgaatggccaggcagcggtatttggtcgcactattcagcaaggctttgaagcggcgaaaaatatcggcactcagccagtggcagctcaggtagctgccgcacctgccgcagacgtagctgaacaacctcagccgcaaaccgtggatggcgttgccagcccggcacaagcctcggttagcgatctgaccggtgaacagcctgcagcccagccggtgcctgtaagcgccccggcgacaagcaccgcagcggtaagcgcacccgcaaatccatccgcagagctgaaaatctacgatacctcatcacaaccacttagccagatcttaagccaggttcagcaggatggcgcgagtattgtggtcggtccgttgctgaaaaataacgttgaagagttcgctgaagagcaacactccgctgaacgtactggcactgaaccagccggagaatatcgaaaatcgcgtcaatatttgttacttcgcgctttcaccggaagacgaagcgcgcgatgcagcgcgtcatattcgtga

SEQ ID NO: 13170 - DNA, 1116 bp, Homo sapiens
  SIMILAR (199)..(125): 921254mologous to Homo sapiens Human normal ovarian tissue derived protein 72,accession number Y59795,Smith-Waterman Score= 126.
atgtatgcagctgtagatcctatggtcgcgggcattgagccgggcgatccgcgctatgtcgattacttcctgccgatcgttgccgatgcggaagccggttttggcggtgtcctgaatgcctttgaactgatgaaagcgatgattgaagccggtgcagcggcagttcacttcgaagatcagctggcgtcagtgaagaaatgcggtcacatgggcggcaaagttttagtgccaactcaggaagctattcagaaactggtcgcggcgcgtctggcagctgacgtgacgggcgttccaaccctgctggttgcccgtaccgatgctgatgcggcggatctgatcacctccgattgcgacccgtatgacagcgaatttattaccggcgagcgtaccagtgaaggcttcttccgtactcatgcgggcattgagcaagcgatcagccgtggcctggcgtatgcgccatatgctgacctggtctggtgtgaaacctccacgccggatctggaactggcgcgtcgctttgcacaagctatccacgcgaaatatccgggcaaactgctggcttataactgctcgccgtcgttcaactggcagaaaaacctcgacgacaaaactattgccagcttccagcagcagctgtcggatatgggctacaagttccagttcatcaccctggcaggtatccacagcatgtggttcaacatgtttgacctggcaaaagcctatgcccagggcgagggtatgaagcactacgttgagaaagtgcagcagccggaatttgccgccgcgaaagatggctataccttcgtatctcaccagcaggaaaatcgcagttctaagcaacaacaaccgttgctgactgtaggccggataaggcgttcacgccgcatccggcaatcggtgccccggaccggcatcggttgcgcatcacgaaggtttaacacggctaaaccgtgggccgatgcggtgatctctaatcgtccgtttgcgggtaataccggcagcgtagatgataacgacgaaatacagcgcaatctgaatgacactaactacaaccgcatgtgggaatacaataaccgcggcgtgggtagtaaagtggttgcagaggcgaagaagtaa

SEQ ID NO: 13171 - DNA, 1132 bp, Homo sapiens
  SIMILAR (811)..(1050): 971254mologous to Homo sapiens Human normal ovarian tissue derived protein 73,accession number Y59796,Smith-Waterman Score= 415.
  misc_feature (1)...(1132): n = a,t,c or g
ttagaactgcgattcttcagtggagccggtcagcgcggtgactgaagacgtgccgccctgaataatagtcgtcactttatcgaagtaacctgtacccacttcctgctggtgagatacgaaggtatagccatctttcgcggcggcaaattccggctgctgcactttctcaacgtagtgcttcataccctcgccctgggcataggcgtttgccaggtcaaacatgttgaaccacatgctgtggatacctgccagggtgatgaactggaacttgtagcccatatccgacagctgctgctggaagctggcaatagttttgtcgtcgaggtttttctgccagttgaacgacggcgagcagttataagccagcagtttgcccggatatttcgcgtggatagcttgtgcaaaacgacgcgccagttccagatccggcggtggaggttcacaccagaccaggtcagcatatggcgcatacgcaagccacggctgatcgcttgctntgcggcccatgtgacgcattttcttcactgacgccagctgatcttcgaagtgaactgccgctgcaccggcttcaatcatcgctttcatcagttcaaaggcattcaggacaccgccaaaaccggcttccgcatcggcaacgatcggcaggaagtaatcgacatagcgcggatcgcccggctcaatgcccgcggaccattggatctgatcggcacgacggaaggtgttgttgatccgctccaccacagctggcaccgagtttgccggatagagcgactgatccggatacatgctggccgccaggttagcgtccgccgctacctgccatcccgacagatagactgcttcaatacccgctttcgcctgttgcagcgcctgaccgccagtcagtgcgccgaggctgttgatgtagccttttttcgactcaccgtgcagcagacgccacattttcgctgcgcccagttgcgccagcgtgcattcaggattgactgaaccgcgtaatttcaccacatcttccgcactgtatgggcgagtaatgccttcccaacgcggttgagtccactctttctgtaattcttcaatttgttgtgtacgggttttcatgtgcagatgctccatagttatgtggtggtttacg

SEQ ID NO: 13172 - DNA, 1387 bp, Homo sapiens
  SIMILAR (1)..(465): 961254mologous to Homo sapiens Protein enc0ded by a gene reduced in metastatic melanoma cells (grmm-1),accession number Y54041,Smith-Waterman Score=785.
tattgcaacaagtgctgtttattttggggcaaccagatcccattaaaatatagtctgacgctcggctcgcatattctgaagaagattaagccggtgcataaactgcacagccgcacccccgaacaagcggcatttgtggtgttgaaatcaccgtcggttccttcggtgctggtggaaacctcgtttatcaccaacccggaagaagaacggctgttaggcacggcggcgtttcgtcagaaaatcgccacagcgattgctgaaggcgtgatcagttatttccactggttcgacaaccagaaagcacattcgaaaaagcgataagttatgaaacccgacgcacaccaggttaaacagtttctgctcaaccttcaggatacgatttgtcagcagctgaccgccgtcgatggcgcagaatttgtcgaagatagttggcagcgcgaagctggcggcggcgggcgtagtcgggtgttgcgtaatggtggtgttttcgaacaggcaggcgtcaacttttcgcatgtccacggtgaggcgatgcctgcttccgccaccgctcatcgcccggaacttgccgggcgcagtttcgaggcgatgggcgtttcactggtagtgcatccgcataaccccgtatgttcccaccagccacgcgaatgtgcggttttttattgccgaaaaaccgggtgccgatcccgtctggtggtttggcggtggcttcgacttaaccccattctatggttttgaagaagatgctattcactggcatcgcaccgcccgtgacctgtgcctgccatttggcgaagacgtttatccccgttacaaaaagtggtgcgacgaatacttctacctcaaacatcgcaacgaacagcgcggtattggcgggctgttctttgatgacctgaacacgccagatttcgaccgctgttttgcctttatgcaggcggtaggcaaaggctacaccgacgcttatttaccaattgtcgagcgacggaaagcgatggcctacggcgagcgcgagcgcaatttccagttatatcgtcgcggtcgttatgtcgagttcaatctggtctgggatcgcggcacgctgtttggcctgcaaactggcgggcgcaccgagtctatcctgatgtcaatgccgccactggtacgctgggaatatgattatcagccaaaagatggcagcccagaagcggcgttaagctgtgtcttcggcgcgatcccccctttcagcttccatccaaaactcaaactggttgccgaccctctactcttcgaacgatttgatgaaatcgccttcaatgcaggcatgctggataaatccgttattttgaaaaccgcggattatttgcgcattgcgcaaccagaactggtcaatttccgccgcactgcgtaa

SEQ ID NO: 13173 - DNA, 1143 bp, Homo sapiens
  SIMILAR (453)..(1262): 641254mologous to Homo sapiens dJ437M21.3 (protein kinase C and casein kinase substrate in neurons 2),accession number AL049758,Smith-Waterman Score=741.
atgatctatgtctttgttaccgtcaaacataggaatgatcattttactaagaacacactcgcatcatatcgaggacgaaccctgctcggtaccctgtttaaaggcgtttaccacctttataaagacgaaacctatctctatcagagcggtaaaggccacaccattcaggaagtccgcattgttaaagggctgaataacccggatctcgatgctgcggttggtgaagatctggcacagcagctgcgtgacgaactggaactggtgaaaggcgcgtctaacgagttcgacaaagagctgttccttgcgggcgaaatcactccggtattcttcggtactgcgctgggtaacttcggcgtcgatcatatgttggatggcctggtggagtgggcacctgcgccgatgccgcgtcagactgatacccgtaccgtagaagcgagcgaagataaatttaccggcttcgtatttaaaattcaggccaacatggacccgaaacaccgcgaccgcgtggcgtttatgcgtgtggtgtccggtaaatatgaaaaaggcatgaaactgcgccaggtgcgcactgcgaaagatgtggtgatctccgacgcgctgacctttatggcgggtgaccgttcgcaccgtatccgggcgatatactcgggctgcacaaaccacggcaccattcagatcggcgacacttttacccagggtgagatgatgaagttcaccggtattccgaacttcgcaccagaactgttccgtcgtatccgcctgaaagatccgctgaagcaaaaacagctgctcaaagggctggtacagctttccgaagagggcgcggtgcaggtgttccgtccaatctccaacaacgatctgatcgttggtgcagttggtgtgctgcagtttgatgtggtggtagcgcgcctgaagagcgaatacaacgttgaagcagtgtatgagtcagtcaacgttgccactgcccgctgggtagaatgtgcagacgcgaagaaattcgaagagttcaagcgtaagaacgaaagccaactggcgcttgatggcggcgataacctcgcttacatcgctaccagcatggtcaacctgcgcctggcacaggaacgttatccggacgttcagttccaccagacccgcgagcattaa

SEQ ID NO: 13174 - DNA, 2377 bp, Homo sapiens
  SIMILAR (484)..(392): 1001254mologous to Homo sapiens Membrane-bound protein PRO1028,accession number Y66714,Smith-Waterman Score=187.
atggacccgaaacaccgcgaccgcgtggcgtttatgcgtgtggtgtccggtaaatatgaaaaaggcatgaaactgcgccaggtgcgcactgcgaaagatgtggtgatctccgacgcgctgacctttatggcgggtgaccgttcgcacgttgaagaagcgtatccgggcgatatcctcggcctgcacaaccacagcaccattcagatcggcgacacctttacccatggtgagatgatgaagttcaccggtattccgaacttcgcaccagaactgttccgtcgtatccgcctgaaagatccggtgaagcaaaaacagctgctcaaagggctggtacagctttccgaagagggcgcggagcaggtgttccgttcaatctccaacaacgatctgatcgttggtgcagttgacgttcgcagcaaaatgcatgacgccttattggattacatggacaaaattcgcgatccgttccgcagttaccaatggagtctgcgtccgtggcgtaaagatgcacggccgcgctggatgggggcgtttcgtccacgtccacaagatggctattcgccagttgtacgcgactatgacaccggcctaccgacacaaggggtgaagcttgagagacctgtatctacgttccgacaactgaaaagcggggacattgatcatcaagacgaacgagtcatcgagctcaacattgcgttaagcaaactgcttaaggtctccaggcagttttacctgacgggaccgttcgttaacagcattcgcgtcgcgctagatgttaagacgttcggcatcaaagcgaatgacgacaaagccaagctcaaagcgctgggggaaatcgcgcacgcatgtgtcgacgcaacgatcatttattgcaagtcaccaactgttgcgggcctggtggcgcgcgagctgatcaagcttgggcatggcactccgactgagaatccccatgtctactgggtcagcgaaaagttcgatgccgactgggattacacagtcgcccttagaaacggtaatttctacacggcggttttgcgccttaccttctgcggtgctgttgctggcgattgggttagccgggccaaggccctgagtacggatgcggctggcgtccacgccctgggtgatcaacgcgctggcaacggaatccgcacgttgctgggagagacgcatgttcaggtcgtgaccacccgtgctgtcggtataaccaatcacgttaaccgccgttttcggatactctttcagtaccattgccacgccgctgcgcctgctgctgcgccaatcagcgcgcctttaccgcgatctttctcgaagaagagagcgcacaaataccgcgcccagagagagccagactggggatgcaattactgttcggtcgcggcagtttggcgatgcgctgatggaactggatgtggtaatccacaagctgacgcctgctttcatggtggcgatcagcgccagttgttcatcattacgtccttcaccagctgcgcgtagtcgttgtcactttttgccgaccaggacgggtcaggtcagccgcatagccgttatattctgccccggcatccagcggaaagctgcgcatctacttccggttgcctggataggtccaagttttggggtaaatgcgagtacccgcaagcgtgttcggttaagcgccacaatgttgtgtaaggtacgtcggtatcacgatgaccggtcgcggccagttcgactcagttttgaaggagcgatagtaatgcaggtagtcgataacccctttgggttgatgttgctggcctcaatacccagttgcagcgcacgttccggcacggaccgatataaccgatattgccgcgcgcagcaggcagcaggctaccatgccatcggctttcggcagcgcgatcacttccacatcttcagtccagaagaggtcggcagcgaaaaactcgacgacaaaactattgccagcttccagcagcagctgtcggatatggctacaagttccagttcatcaccctggcagaatggggttaagtcgaagccaccgccaaccaccagacgggacggcacccggtttttcggcgataaaaaaccgcacattcgcgtggctggtggaacatacggttatgcggatgcactacacagtgaaggccggtaccgactactaggatcgaaagatgcagctggcaataccgcgctgcgcatggcgatgcagactgcgagcaacatatccgccgtgagaaagcgaactccaacatttgtacttccaggtactgctggcaaacatcgccagcctgtatgccgtttatcacggccggttggcctgaaacgtatcgctaaccgcattcaccgtctgaccgatatctggcggcgggcctgcaacaaaaaggtctga

SEQ ID NO: 13175 - DNA, 1368 bp, Homo sapiens
  SIMILAR (529)..(1116): 981254mologous to Escherichia coli Respiratory nitrate reductase 2 a chain (EC 1.7.99.4),accession number D90787,Smith- Waterman Score=1032.
atgatcaccggcgatgcgctgctggattttggcgacgggcataaaattaaacgtagcgccaaaccgggctggtatatttatcacagcctgcccgccagtcatcaggcgatatttttccctgtatccggcttgaaaaaatggcgttatgacctggaatataaagtttcttccgactacgcgctggcagccaaaatgtataaagccggttatgcatttaaaaaactcaatggcctggtgtctgaattttccatgggctgtgtcttcggcgcgatcccccctttcagcttccatccaaaactcaaactggttgccgaccctctactcttcgaacgatttgatgaaatcgccttcaatgcaggcatgctggataaatccgttattttgaaaaccgcggattatttgcgcattgcgcaaccagaactggtcaatttccgccgcactgcattcttgcgtcgtataaatgcggggaacaaccagatagcagcagcaatcatccgcgtaatttgtttgtctggcgctctaacctgcttggctcctccgggcaaaggccacgagtatatgcagaagtatctgctggggaccgaaagcgggattcagggcgaggaactcggtgccagcgacgggatcaaaccggaagaagtcgagtggcaaactgcagcgattgaaggcaagctcgacctgctggtgacgctcgacttccgcatgtccagtacctgcctgttctccgatatcgttctgcccaccgccacctggtacgaaaaagacgatatgaacacctcggatatgcatccgtttattcatccgctttctgcggcggtcgatccggcgtgggaatcacgcagcgactgggaaatctacaaaggtatcgccaaagcattttcgcaagtgtgcgtgggtcatcttggcaaagaaaccgacgtggtattacaacccctactgcatgactctccggcagagctctcacagccgtgtgaagtgctcgactggcgcaaaggcgaatgcgatctgattccaggcaaaaccgcgccgaatattgtggcggtggagcgcgactaccctgctacgtatgaacgctttacctcgctcgggccattgatggacaaacttggcaatggcatggacctgaccgattacgctaacatggcgctgagcatcccgtctgcgaacaccgatatctggaacctggaacaagacaccgttggtactcgtctgaccaactctcgtcatggcctggctgataacggcggcgcatgggtaagctacttcggtggtaacttcaacggcgacaacggcaccatcaactatgatcaggatgttaacggcatcatggtcggtgttgataccaaaattgacggtaacgacggctaa

SEQ ID NO: 13176 - DNA, 1445 bp, Homo sapiens
  SIMILAR (1)..(297): 721254mologous to Homo sapiens ribosomal protein L9,accession number U21138,Smith-Waterman Score=369.
tgattccaggcaaaaccgcgccgaatattgtggcggtggagcgcgactaccctgctacgtatgaacgctttacctcgctcgggccattgatggacaaacttggcaatggcggtaaagggatttcgtggaatacccaggatgaaatcgatttcctcggcaaactcaattacaccaagcgtgatggcccggcacaggggcgtccgctgattgacaccgccattgacgcttcagaagtgattctggcactggcaccggaaaccaacggtcatgttgcagtcaaagcgtggcaggcgctgggcgagatcaccgggcgcgaacatacccatctggcgctgcacaaagaggacgagaagattcgctttcgcgatattcaggcgcagccgcgtaaaattatctccagccccacctggtccggtctggaaagcgctcccgtctcctataacgcgggatacaccaacgttcatgagttaattccgtggcgcacgctgtcgggacgccagcagctctatcaggatcatccgtggatgcgtgcttttggtgaaagcctggtggcttatcgcccgcctatcgacacccgtagcgtcagtgagatgcgccagataccgccaaacggcttcccggaaaaagcacttaacttcctgacgccgcaccagaaatggggcattcactcaacctacagtgaaaacctgctaatgctgacgctctctcgcggtggaccgattgtctggatcagcgaaacagatgcccgagaactgaccattgtcgataacgactgggtggaagtattcaacgccaacggcgcgctgactgcccgcgcggtggggggaacatggtttttcacggtgaatttacgaaatcgtcgaagccaacttttgaccacccagtaccagatgctccgtcacgccattattaaagttaagcgagacaggccttttgaaatcaacgcctgggtcgttttgccagagcatatgcactgtatctggacattacctgaaggcgatgatgatttttcctcgcgctggcgggaaattaaaaagcaatttacccatgcttgtggattgaaaaatatctggcaaccacgtttttgggagcacgccatccgcaataccaaagattataggcatcatgttgattatatttatataaatccagtaaagcatggttgggtaaagcaatatggtcgattcctcgaagtgacctccggtgcgcagcagcgtttcgaacaggccgactggcatgctgtccagcaggcgatgaaaaaccgtatccatctttacgatcatcacgttggtctggtcgtggagcaactgcgctgcattactaacggccaaagtacggacgcggcatttttactacgtgttaaagagcattacacccggctgttgccggattacccgcgcttcgagattgcggagagcttttttaactccgtgtactgtcggtga

SEQ ID NO: 13177 - DNA, 1060 bp, Homo sapiens
  SIMILAR (13)..(588): 1001254mologous to Homo sapiens ribosomal protein L9,accession number U21138,Smith-Waterman Score=974.
ccatgactacggattctatggccgtagccgtacaacatcatgcctgggacgaccctgtagttaccctacctaattgccctgctggcgagggcatggtttaacggcctgctgacctcgcgcacccgtttgtatattaaaggtaacggcattgtcgatttgcctaagttgcaggagatggtcgccgacgtgtcgcaccatttcccgctgcgcttacctgcaccgacaccgaaggcgctctacagcccgtgtgagatccgccatctggcgattaatgttaacctggaatatgacccgacagcggcgttccgcaatcaggtggtgcatttcgatttccgtaagctggatgtcttcagctttggcgagaatcaaaattgcctggtaggtaacgttgacctgctgtcaccgaaactcgtggaacgaagtgcgtacgctgcacttcaacggggagcaatcgatgatcgaagccctgaaaactattctcggcaaaatgcatcaggacgccgcaccgccagatagcgtggaagtcttctgttatagccagcatctgcgcggcttaattcgtactcgcgtgcagcaactggtttctgagtgtattgaattgcgtctttccagcacccgccaggaaaccgggcgtttcaaggcgctgcgcgtttctggtcaaacctgggggttgttcttcgaacgcctgaatgtatcggtacagaaactggaaaacgccatcgagttttatggcgcgatttcgcataacaaactgcacggcctgtcagtgcaggttgaaaccaatcacgtcaaattaccggcggtggtggacggctttgccagcgaagggatcatccagttctttttcgaagaaacgcaagacgagaatggctttaatatctacattctcgacgaaagcaaccgggttgaggtatatcaccactgcgaaggcagcaaagaggagctggtacgtgacgtcagtcgcttctactcgtcatcgcatgaccgctttacctacggctcaagcttcatcaacttcaacctgcaagatccctatttaagggcgcgggtttcaatataa

SEQ ID NO: 13178 - DNA, 1427 bp, Homo sapiens
  SIMILAR (544)..(807): 731254mologous to Homo sapiens bA287B20.1.2 (novel protein similar to rat tulip 2 (translation of cDNA FLJ12819)(isoform 2)),accession number AL121896,Smith-Waterman Score=285.
ggcctgctgatccttccggttgaacatgataacgcctccgatcctgattggtgggggtacaaagtccaaaagccctcggttctccagaatggtgtttcggtgcgatgtacccgccccaagattaggggtagcgttgacctgctgtaccgcaactcgtggaacgaagtgcgtacgctgcacttcaacggcgagcaatcgatgatcgaagccctgaaaactattctcggcaaaatgcatcaggacgccgcaccgccagatagcgtggaagtcttctgttatagccagcatctgcgcggcttaattcgtactcgcgtgcagcaactggtttctgagtgtattgaattgcgtctttccagcacccgccaggaaaccgggcgtttcaaggcgctgcgcgtttctggtcaaacctgggggttgttcttcgaacgcctgaatgtatcggtacagaaactggaaaacgccatcgagttttatggcgcgatttcgcataacaaactgcacggcctgtcagtgcaggtccactctagaggacccaaaatggcacgggcaggtcttctggttatcgaagcggccttggcgcacacaggcaaaaccaaggcccccacgcccaacacgccttcgacacccaacttcccgcgcaacttcccgccaagccccccctcggcccccaactattttcgctatggttatgctcagtggaacaaagaaaaccgtttcaccggttggtacgacgtggatctgtctgagaaaggcgtaagcgaagcaaaagcagcaggtaagctgctgaaagaggaaggttacagctttgactttgcttacacttctgtgctgaaacgcgctatccataccctgtggaatgtgctggacgaactggatcaggcatggctgcccgttgagaaatcctgtgcagtgaaaatgactgccctgatgatccttatcactctgatgaactctgccggtggtaaagcatctgacctgttcggtgaactgaccggtatcgcagtactgctgactatgctgccgtatttctactcttgcgttgacctgattcgttttgaaggcgttaacatccgcaactttgtcagcctgatctgctctgtactggggtgccgtgttctgctttattcgcgctgaatgggcgcaagctccttcgagctggcaggtaccttcatcgtcagcctgattatcctgatgttctacgctcgcaaaatgcacgagcgccagagccactcaatggataaccacaccgcgtctaacgcacattaattaaaagtattttccgaggctcctcctttcattttgtcccatgtgttgggaggggccttttttacgtggagatatgactatgaccgttattgcaatattgactcacatgggggtttattttaaagaagaacccatccgtgaacttcttcgcgcgcttgacc

SEQ ID NO: 13179 - DNA, 240 bp, Homo sapiens
  SIMILAR (124)..(234): 421254mologous to Pseudomonas aeruginosa succinylglutamate desuccinylase,accession number AF011922,Smith-Waterman Score=74.
catttcaagcgccagacattttggcgcgctggcctgtacgctggaacttggcaaagcgttgacctttgggcaaaacgatcttcgccagtttgcagtaactgcaagcgcaattgctgcgctgctattcgccactcgccgtccttcgaaatgcatatggcaagtgacacgctgaattttatgccgtttgagaaaggaacattgctggcgcaggacggagaggaacgttttaccgtaacccat

SEQ ID NO: 13180 - DNA, 358 bp, Homo sapiens; identical to SEQ ID NO: 4475
  SIMILAR (64)..(99): 661254mologous to Mus musculus nitric oxide synthase,accession number AF045940,Smith-Waterman Score=43.

SEQ ID NO: 13181 - DNA, 1638 bp, Homo sapiens
  SIMILAR (257)..(559): 491254mologous to Homo sapiens F1F0-type ATP synthase subunit g,accession number AF092124,Smith-Waterman Score=111.
atgccgcgaagttcggcgataattcgacgtttaatccgccagcgaaaacagcgtcgcagtgaaagcgcagaccaaatacccatagcgccaggccaaaaaccactgttaccgagcctgcaggtccaatatttatcactggctgaacagagcggatttttcacattaccgctggtgcccaaatacccccagcccaggccgagcgtaaaatcgaacggcccccaggctttgctggcaacaagatattccgcatcaaacagccccgtaccgccgatatcccgcgcaccaaccgccacttgcgccagctacgtaactctcttcccacaaacgcagtttgagatcgaaggctttatctttatacgtttgatcgccagagaacgcttcgacgctgctgtactgccggacggagtccgcgaggccaacataaataatgctgccgggcatcggctctacgtgacgcttgttccagtaagccaccggcgctttttgcgtgcgtccgtccggggcaaagaatctgtgcgctggcaccttgatctacataccgcaattcgtggctccttgcatccgcagttcggtgtattaccgcaacgcgacattccctgggacgagaaatttctgacgtggctgggtgcggcggggctggaagcgctggtgttccatcaggaacctggtggtacgtttacccatttcagcgccagacattttggcgcgctggcctgtacgctggaacttggcaaagcgttgccctttgggcaaaacgatcttcgccagtttgcagtaactgccagcgcaattgctgcgctgctatctgacaccactaccgcagcaccggctgacgcgaacccattgatgcaccacaaaggcaagttcggtccgcatcaggacatgatgttcaaagacctgaacctgaccgacgcgcagaaacagcagatccgcgaaatcatgaaaggccagcgtgaccagatgaaacgtccgccgctggaagaacgccgcgcaatgcatgacatcattgccagcgataccttcgataaagtaaaagctgaagcgcagatcgcaaaaatggaagaacagcgcaaagctaacatgctggcgcacatggaaacccagaacaaaatttacaacatcctgacgccggaacagaaaaagcaatttaatgctaattttgagaagggcccaaccgccaaaacggacgcgattaccgctcagtcatgccgaccaacctcattgctgcgtcgcttccacgaggcgacggcacagaatgcgccggacgtggtggtatggggcagcggtacaccgatgcgcgaatttctgcacgtcgatgatatggcggcggcgagcattcatgtcatggagctggcgcatgaagtctggctggagaacacccagccgatgttgtcgcacattaacgtcggcacgggcgttgactgcactatccgcgagctggcgcaaaccatcgccaaagtggtgggttacaaaggccgggtggtttttgatgccagcaaaccggatggcacgccgcgcaaactgctggatgtgacgcgcctgcatcagcttggctggtatcacgaaatctcactggaagcggggcttgccagcacttaccagtggttccttgagaatcaagaccgctttcgggggtaa

SEQ ID NO: 13182 - DNA, 1363 bp, Homo sapiens
  SIMILAR (1)..(477): 391254mologous to Pseudomonas aeruginosa succinylglutamate desuccinylase,accession number AF011922,Smith-Waterman Score=269.
atgctgaacgcgttgtttggcgcgatatctcacggcgagatcccgttacgttgccggttgttggtgatcctagggaatcctcctgcgttgaagcaagggaaacgttattgccatagcgatatgaatcgaatgtttggcggtcgttggcagctatttgctgaaagcggagaaacctgtcgggcgcgcgaactggaacagtgcctggaagatttttatgaccagggcaaagaatctgtgcgctggcgccttgatctacataccgcaattcgtggctccttgcatccgcagttcggtgtattaccgcaacgtgacattccctgggacgagaaatttctgacgtggctgggtgcggcggggctgaaggcgctggtgttccatcaggaacctggtggtacgtttacccatttcagcgccagacattttggcgcgctggcctgtacgctggaacttggcaaagcgttgccctttgggcaaaacgatcttcgccagtttgcagtaactgccagcgcaattgctgcgctgctatatggtgagagtgtcggtatcgtgatcgtcagcctttttctttttatatatcagttactttgcgtgccagtaagccgctgcacgtacccgctgtgggtcatactgttccgcttcaaaccggcgaagaaactgcaacagtccctgtaccctgctgatcggaatagttgtgctcatcaacgcagcagcagaaacactagttttcctctcaaaccacatggaggaccaaggaagggcggggtaagaccacccgcactgcaccaagagaatgtcggagggtatctccagactccggcgaagcccaactggcggagcctggggggtggagaggagcgcgccccagttatcacgcgcaggcagcggggtcaaacggggattaacccgggatcccgtcctacggcatttaacattatggggctgcccgcgcagggtgtgggggggaacaccttagcgaagctattggcaagtgacgatatcgccaaaggggggaaaagaaataaaagcgaagctagcgtcgtgagaaacgcggcggacgccccaaaggtgcttcaggaccaggagttcaagccaagcttagccaactgtagaacacacggcacgcagttccagtccatatcagaggttacaggtggtgcctctgtcatgcccacagtggaggagctgtccagggccttacgagccctcatcgagagtcattgtgatcggatgttaatcataagtactgaggggaaaaaaaagccttctttccttgggaaatgcaggaagccagcaagcggccggagtctccggagcccgcaaggaggcgcgttggctgcgcagaggactctagaggatcccacgg

SEQ ID NO: 13183 - DNA, 455 bp, Homo sapiens
  SIMILAR (26)..(247): 791254mologous to Escherichia coli NagD,accession number AF052007,Smith-Waterman Score=287.
atgacctgcagtacgaattcgcggtccgtacccgcggatcgtccgggcagccctaaccctgacgcaaccccatttaatatactcgcagattgccggcgataacctgcgtaccgatattctggccggcttccaggcaggtctggagacgattctggtgctttctggtgtttctaccctcgacgatatcaacagtatgcctttccgccccagctggatttacccgtcagtcgctgaaatcgacgttatctgaatagcaaccacgtctgcggacgtggttggctctgatgacaaacgccaaactgcctgatgcgctacgcttatcaggcctacgcagctcctgcaatatattgaattttcatgcttttgtaggccgcataaggcgttcacgccgcatccggcctgaaccaatcgcactttgtcagcaatttggcccccgtacaatataaacattcaag

SEQ ID NO: 13184 - DNA, 392 bp, Homo sapiens
  SIMILAR (2123)..(2236): 581254mologous to Homo sapiens Human secreted protein encoded by gene 75,accession number Y76198,Smith-Waterman Score=115.
atgtgccccattgaggaaactgcgtcatccttcggcggcaaaccgctgtcgatggtactggttattcagatgtttatgctgctgaccggggcgctgattattatcctgaccaaaaccaatcccgcgtctatctcaaaaaacgaagtcttccgttccggtatgatcgccatcgtggcggtgtacggtatcgcatggatggcagaaaccatgttcgcaccggcttgctacggttattacatcctgccgacttatccgagcgatctggcagcgattcagtttgaccgttccggcaccacccacatcggtcgcttcgtcatcaaccacagctttattctgccggggttgattggtgtgagcgtatcgtgcgtcttcggctggatcttcgccgcgat

SEQ ID NO: 13185 - DNA, 370 bp, Homo sapiens
tttgacgtgctagtgtatcatttcttccgctggcgatcaataacgtcagcgccttctcgaaaacgcagccaggtggggttattacatcctgccgacttatccgagcgatctggcagcgattcagtttgaccgttccggcaccacccacatcggtttttacaggtttcttcaccgtcacgcttaaatcgattgccgtcacatttatggttggcacacgtaccgcaatcgcttcaaagcgatcgttaaattgcggaaaaaatcgtgtgataccggcggccagtttagtatcgaccggaatgatcgactggctggctgcccgggtgcgacgcaggtcaggatggtatgcatcaataacctgttgatcgtgcat

SEQ ID NO: 13186 - DNA, 2186 bp, Homo sapiens
  SIMILAR (16)..(228): 711254mologous to Homo sapiens zinc finger protein,accession number X78932,Smith-Waterman Score=289.
tcaataaaggaagcggggtcgatcatgacgacataatgtgccgttcccatggcgaccatgtaacggataatgcctaaactcgttatgcgatgttaaccagacacgataaccatctttcgaaattttacctggctcggggaaggtatcgggcggactttcatgctccagagacgaacactggggaacgttgttatcgatataagccacttccttattggctcgaatagcgacgcgggaggaataggtatccagctcttcaataaacgatgtttctacctgctgatgggccagccagatgcttaagccgacaggcagcaatactgaaagaatcagtactcccgaaataaggccgaccagatgtcgtgttctcaccagcatatccttattaacacagtgtagggaaagtatatctgactcgtggaaaaaggctggatcaactgcagcatcctcatcatctgaatcttgtagaccaagagctgctttttgtaacttcttcctctcattagccaaagcttgttctgtttcatcaaacttgaatcccttaccagagaacccactactctttttaattattttcccctcgccagcatctttttctttttcatcctccttgtcatctttgtcttttttcttctctttagaactttccccaccatcagttttctctttggacctagatatcgcggcgaagatccagccgaagacgcacgatacgctcacaccaatcaaccccggcagaataaagctgtggttgatgacgaagcgaccgatgtgggtggtgccggaacggtcaaactgaatcgctgccagatcgctcggataagtcggcaggatgtaataaccgtagcaagccggtgctgaagccacgatgtatgccggatcaacgccgatcgccagcgcgaccggaacaatcgccgccagcgccgcagcctgagagtttacaaacttggaaaccagcagcagaacaatggcataggcccacggatactctttcaccatttcacccagtacgccctgaatttcagacatatgcgcaccgaacatggtttctgccatccatgcgataccgtacaccgccacgatggcgatcataccggaacggaagacttcgttttttgagatagacgcgggattggttttggtcaggataataatcagcgccccggtcagcagcataaacatctgaataaccagtaccatcgacagcggtttgccgccgaaggatggacgcaggtacgcatcctggttgcccgcattttctccggcagaggtaatctcgggctggacgtgctggatgtggttaacctgcgcgttatgatgggggatggtcatggcccagcggaaggatcgattgaggccagcctgaccgtgctggcagagatgcaacaacaaggcctggtaaaacatattggcctgagcaacgtcacaccgacgcaggttgcagaggcgcgcaagattgccgaaattgtctgtgtgcaaaacgaatacaacatcgcgcaccgtgctgatgatgcaatgattgatgctttggcccacgatggcattgcctacgtgccgttcttcccgctcgggggctttacaccgctgcaatcgtccacactttccgatgttgctgcgagccaagtatttgcaaacaaaagctctgactccaagagcaagaagagcacatcccaccaatctaaatattcgaaaagagtcaaattcttctgttgtatttccatcctcttgactgggtttttcactaatcagctgtttccttagcttcattgcttcttcgaatctggaaaggtactgctctaggccatggcgggaacccctctggaccgagtccgctgtcaggtcccctctgttccgctgccggagctcaaggttgacatcactactgcactcggccacaccaccctgctggtcagttgttcctgtactgactgaatcacccagcactactcgctttgaaacggaaggaacgctgagggagttcagtttatcactgtcctgctgctttgattttgtttgactttcttcttctttggtgcaccgaatcctcatgactgcctcaaagccaatcttccgagtaaggtatctctgtagttccttctgtaatttctgtacttggactgggttgtgctgatgatggtaagagggatagtaatagacactacctgctgaataccgagaaatacaac

SEQ ID NO: 13187 - DNA, 1620 bp, Homo sapiens
  SIMILAR (11)..(184): 451254mologous to Hordeum vulgare pZE40,accession number X68600,Smith-Waterman Score=102.
catgtcctgactttgcagcgcgtggttgatggtttctggtgtgatggtcaatttgccagtggcatttgccagataagagagcgcttctttcagcaaatcgttacggttattgggcaaactcagattaaacagcgtggtgtcataagagacaattaccggcggcatcgggcgtttagggtcgatcccctgctgccacaatgaacgcgcctgtgctgcgtcaaggccaccgctttgcgttagcgcaatactagggatggcgtgactgtaaccgctctgttgtgtactttcggcgagcgaaccggtattaaccagcaggcgaatttcaacacgatcgctgggacgctggggggtggtcagcacttgccactctttgtacatgtccagcgccgcattctgtgaatagcgcaggttatcttcgatataggtgttatagacgcctttcgacagcgtttcttcatcaccgccgccggtccacacgcgctggccttttttaccgacgatgatcgcggtgccggtatcctggcaggtcggcagcacgcctttggcggcgatttcggagtttcttaagaattgcagcgccacgtacttgtcgttttcgctggcttctggatcgtgaagaatagccgcaacctgtttctggtgtgccgggcggagcataaaagaagcgtcgtgaaaggcttgctgcgccagcaaggtcagggcttctggttccactttcaggatggtttcgccgtcgaagtcggcaacgctaacgtaatcggaagtgagtagatagtattcggtattgtctttccccatcgggaaaggtgcctggtagataaagggtttgtttgacataacttccagcctgtaactctgtatttgttattcgaaaatggcgtgccgcgtagtcacgggcggcacgcaaagtgcatttataagaacccgtacatcgcggcgaagatccagccgaagacgcacgatacgctcacaccaatcaaccccggcagaataaagctgtggttgatgacgaagcgaccgatgtgggtggtgccggaacggtcaaactgaatcgctgccagatcgctcggataagtcggcaggatgtaataaccgtagcaagccggtgctgaagccacgatgtatgccggatcaacgccgatcgccagcgcgaccggaacaatcgccgccagcgccgcagcctgagagtttacaaacttggaaaccagcagcagaacaatggcataggcccacggatactctttcaccatttcacccagtacgccctgaatttcagacatatgcgcaccgaacatggtttctgccatccatgcgataccgtacaccgccacgatggcgatcataccggaacggaagacttcgttttttgagatagacgcgggattggttttggtcaggataataatcagcgccccggtcagcagcataaacatctgaataaccagtaccatcgacagcggtttgccgccgaaggatggacgcaggtccgaatcagcaccaagaagggcgactacagcgattgccccgaggaaaatccacattgccagccagttgctggtcgttatcattattcgctcgttggtcgggtgtcgaatgcgacgctggcgcgtcttatccgac

SEQ ID NO: 13188 - DNA, 1377 bp, Homo sapiens
  SIMILAR (14)..(601): 331254mologous to Homo sapiens spiceosomal protein,accession number L21990,Smith-Waterman Score=145.
gccaccgcctggcgaaatacatcggtgcctacactgcgctgatggatggtcgtctggacgctgttgtattcactggtggtatcggtgaaaatgccgcaatggttcgtgaactgtctctgggcaaactgggcgtgctgggctttgaagttgatcatgaacgcaacctggctgcacgtttcggcaaatcaggcagtcaggcggctcgcgtcttgcgcgataaccagttcttcgttggttgggataaccaccgcaggacgggtaccttctttgttgatgaaaccagatttgccgaaacgtgcagccaggtgctgttttttacattggcaacaagggcaatatcctgtccagcaatggctggacaggcgatgcaaaacagtaatgacagaaacagaattattctcttcatcagcttacgttgagtgggatgcatatatagttcctgaatctgcggcgaaacggaaactgtgccgcactcttacccgcatgaccataaacaaagtgagactggataggacctacagggaggaaatgcagatcggtagccgtggatctctagagtcatctttggatctgatgaatactattattaatatgatcgccgcaggtccatgcttccgccgttattacatcctgccgacttatccgagcgatctggcagcgattcagtttgaccgttccggcaccacccacatcggtcgcttcgtcatcaaccacagctttattctgccggggttgattggtgtgagcgtatcgtgcgtcttcggctggatcttcgccgcgatcgttgccgacttcgacggcgaaaccatcatgaaagtggaaccagaagccctgcgccctgctggcgcagcaagcctttcacgacgcttcttttatgctccgcccggcacaccagaaacaggttgcggctattcttcacgatccagaagccagcgaaaacgacaagtacgtggcgctgcaattcttaagaaactccgaaaatcgcccaaaggcgtgtcccgacctgccagcataccgcacgcgatcatcgtcggccagcgcgtgtggaccggcggcggtgatgaagaaacgctaccgggttgcaccactacagtgactcaccgcttcactaaaaatctgcgtcatcacgtagaaaatgccgatctattgatcgttgccgttggcaagccaggctttattcccggtgactggatcaaagaaggcgcaattgtgattgatgtcggcatcaaccgtctggaaaatgtcgccatgttactcatcctgttgatctcgctcggtaccctggatccgctagagtcctttgattcgctgccgtggtatcagataatcaccgattatctgtggcatatcacgctgccggtgctggcttattggtag

SEQ ID NO: 13189 - DNA, 564 bp, Homo sapiens
  SIMILAR (84)..(335): 411254mologous to Streptomyces coelicolor A3(2) putative integral membrane protein,accession number AL355774,Smith-Waterman Score=116.
atgcgctggcggatgggcgtgcgtaacagtgcacataccctggcgaaactggcgacgccatttgccgaaggtgaggcgctgcgtctttccagcgtttcgcatccggaatacattggacgcgtcgcgaagttctttagcgatatcggcgggcgggcgctactaatgcatggtactgaaggtgaagtgtatgataatccgcagcgctgcccgcagatcaatctcattgaccgtgaagggatgcgggtgctgtatgaaaaacaggacactgctggtagcgagttactgccacaagcaaaagatccggaaaccacggcgcagtggattgagcgttgccttgctggcagcgaaccgattcacgaatcgctgaaaatccagatggcttgctgcctggtggctacgggtgaagcgggcacaataaaaaaacgaggaaacaaactaggagtatcacaaaaagcaacgccggcaccactatcatattcggacccgtttaacagcaaaaacacaacgggtgtaaacatactcccctcgaaaacggcgcccccatatcaggggaagcccaaatga

SEQ ID NO: 13190 - DNA, 744 bp, Homo sapiens
  SIMILAR (88)..(255): 961254mologous to Escherichia coli unidentified reading frame (aa 1-104),accession number X04022,Smith-Waterman Score=286.
atgaacgcccaggttggcatcacctcgccgggctttattggtgcggacgtttcacacacttcacggatcgtttcttcatacacgaccgaggaagccggctttcaccggcaggcgtggtgtcaaatgcccgttattgttagcggaaacgaaaaacaggccattactcacagtataacggtcggcagtcgcataaccgttcaggggttcatttcatgccacaaggcaaagaacggactgagcaaaatggttttgcatgataatggcgaggaaactacccggctgaggcgtgatgaacgacaagcaacaccactacaatacgggctgattcaatctgaatcgggaatcggctttataaccggtgtcgacttggaagttaagaatatttccatggtgaacgaacgagacgcaataatccctgcccattattggcacatgctgaaagctcaccacaagcggcgaacatcgtctcccacggcgcttgggggaaactgctggaatagggtggatctatggctgtatcggttcctgtatgtccgttgtcgagtgttctttgacggggtgtccacgcttgggcgcctggggttacgagaaaggaggaataacttttttcccattcacagtaccaggaccagctcccagcaggcgtttagatacagtcgatcatctacgaagaacatcatacaaacaactacaaagcatcaggggacaaactacagcgacaggacacccacgacaatattataa

SEQ ID NO: 13191 - DNA, 1042 bp, Homo sapiens
  SIMILAR (240)..(851): 271254mologous to Mus musculus plenty-of-prolines-101; POP101; SH3-philo-protein,accession number AF062655,Smith-Waterman Score=110.
cttctctgcctgcattgttcggatccctcggtgccttatacgtgtcactcgagagcattctcaatacatcacttgcataagcattcgcttcacaggcatagcttctaaagaaactgcccattctgccgacatggaagccatcacaaacggcatgatgaacctgaatcgccagcggcatcagcaccttgtcgccttgcgtataatatttgcccatggtgaaaacgtatttattcgcgataagctcatggagcggcgtaaccgtcgcacaggaaggacagagaaagcgcggatctgggaagtgacggacagaacggtcaggacctggattggggaggcggttgccgccgctgctgctgacggtgtgacgttctctgttccggtcacaccacatacgttccgccattcctatgcgatgcacatgctgtatgccggtataccgctgaaagttctgcaaagcctgatgggacataagtccatcagttcaacggaagtctacacgaaggtttttgcgctggatgtggctgcccggcaccggatcagaaaatctgatggcaccctacaggaacatgacggtatctgcgagatccatgttgctaaatatgctgaaatattcggattgacctctgcggaagccagtaaggatatacggcaggcattgaagagtttcgcggggaaggaagtggttttttatcgccctgaagaggatgccggcgatgaaaaaggctatgaatcttttccttggtttatcaaacgtgcgcacagtccatccagagggctttacagtgtacatatcaacccatatctcattcccttctttatcgggttacagaaccggtttacgcagtttcggcttagtgaaacaaaagaaatcaccaatccgtatgccatgcgtgttacgaatccctgtgtcagtatcgtctgtgttaatgagatcaacagcagaactccaatgcgcctctcatacattgagaaaaagaaaggccgccagacgactcatatcgtattttccttccgcgatatcacttccatgacgacaggatag

SEQ ID NO: 13192 - DNA, 1974 bp, Homo sapiens
  SIMILAR (152)..(274): 1001254mologous to Homo sapiens TPRDIII,accession number D84296,Smith-Waterman Score=212.
atggaaattcgaggacgggttgagcaacgtgttggttatacaattgaacaaattaatcatatgcgtgatgtgtttggtacgcgattgcgacgtgctgaagacgtatttccaccggtgatcggggttgctgcccataaaggtggcgtttacaaaacctcagtttctgttcatcttgctcaggatctggctctgaaggggctacgtgttttgctcgtggaaggtaacgacccccagggaacagcctcaatgtatcacggatgggtaccagatcttcatattcatgcagaagacactctcctgcctttctatcttggggaaaaggacgatgtcacttatgcaataaagcccacttgctggccggggcttgacattattccttcctgtctggctctgcaccgtattgaaactgagttaatgggcaaatttgatgaaggtaaactgcccaccgatccacacctgatgctccgactggccattgaaactgttgctcatgactatgatgtcatagttattgacagcgcgcctaacctgggtatcggcacgattaatgtagctttgcagaactttcagcggtataccggcatacagcatgtgcatcgcataggaatggcggaacgtatgtggtgtgaccggaacagagaacgtcacaccgtcagcagcagcggcggcaaccgcctccccaatccaggtcctgaccgttctgatctggctctgaaggggctacgtgttttgctcgtggaaggtaacgacccccagggaacagcctcaatgtatcacggatgggtaccagatcttcatattcatgcagaagacactctcctgcctttctatcttggggaaaaggacgatgtcacttatgcaataaagcccacttgctggccggggcttgacattattccttcctgtctggctctgcaccgtattgaaactgagttaatgggcaaatttgatgaaggtaaactgcccaccgatccacacctgatgctccgactggccattgaaactgttgctcatgactatgatgtcatagttattgacagcgcgcctaacctggtttttcgcatatgcttcgtgatctgggctcaagaacgtatagatattaaagggttcgagcctgatgtacgtattttgcttaccaaatacagcaatagtaatggctctcagtccccgtggatggaggagcaaattcggcacgcctggggaagcatggttctaaaaaatgggtacgtgaaacggatgaagttggtaaagacaccggcgttcggtcgaagagtatctggtgtcatagaaattcccgatgggagtcgccgtcgtaaagctgctgctcttaccgaaagtgattatcgtgttctggttgccgagctgtatgatgagcagatggctgcattatccagattgggtctcgattatcgcccaacaagtgattatgaacgtggtcagcgttatgcaagccgattgcagaatgaatttgctggaaatatttctgcgctggctgatgcgcaaaatatttcaccgcaggtaaatgtgtcaaaatctgatgacacactcaaaatcaacggagtggaagatcacaaaacgatttttgacggagacggaaaaacatatcagaacgttcagcagtttatcgatgaaggcaattatacatccggcgacaaccatacgctgagagaccctcactacgttgaagacaaaggccataaataccttgtattcgaagccaacacgggaacagaaaacggataccaaggcgaagaatctttatttaacaaagcgtactacggcggcggcacgaacttcttccgtaaagaaagccagaagcttcagcagagcgctaaaaaacgcgatgctcagttagcgaacggcgccctcggtatcatagagttaaataatgattacacattgaaaaaagtaatgaagccgctgatcacttcaaacacggaactgatgaatcgagcgcggaatgtttcacaatga

SEQ ID NO: 13193 - DNA, 3216 bp, Homo sapiens
  SIMILAR (75)..(1): 841254mologous to Homo sapiens Human secreted protein, SEQ ID NO: 7217,accession number G03136,Smith-Waterman Score=111.
cgtgtttgaagtgatcagcggcttcattacttttttcaatgtgtaatcattatttaactctatgataccgagggcgccgttcgctaactcagcatcgcgttttttagcgctctgctgaagcttctggctttctttacggaagaagggcgtgccgccgccgtagtacgctttgttaaataaagattcttcgccttggtatccgttttctgttcccgtgttggcttcgaatacaaggtatttatggcctttgtcttcaacgtagtgagggtctctcagcgtatggttgtcgccggatgtataattgccttcatcgataaactgctgaacgttctgcgctgttgtcaggctttgtttgccgtaatgtttaccggaatagtcagtgtagaataaacggaattttccgtcaagatgtaaagggtgcagaaccgggaccattcttggcgtctgatctttcaggatcggatcgttggcggccgaacttatcggttgggccccgccctgtttttcatcgcagtactgttgaaattcattaagcattctgccgacatggaagccatcacaaacggcatgatgaacctgaatcgccagcggcatcagcaccttgtcgccttgcgtataatatttgcccatggtgaaaacgggggcgaagaagttgtccatattggccacgtttaaatcaaaactggtgaaactcacccagggattggctgagacgaaaaacatattctcaataaaccctttagggaaataggccaggttttcaccgtaacacgccacatcttgcgaatatatgtgtagaaactgccggaaatcgtcgtggtattcactccagagcgatgaaaacgtttcagtttgctcatggaaaacggtgtaacaagggtgaacactatcccatatcaccagctcaccgtctttcattgccatacggaattccggatgagcattcatcaggcgggcaagaatgtgaataaaggccggataaaacttgtgcttatttttctttacgggaggcttaacaccacatgaaggctgcctaggcttatggtttgcaccctctggagaagaagcctgaggcatatctggggcccttttagtcacaggatactgacacagggattcgtataaacgcatggcatacggattggtgatttcttttgtttcactaagcctaaactgcgtaaaccggttctgtaacccgaggaagaagggaatgagatatgggttgatatgtacactgtaaagccctctggatggactgtgcgcacgtttgataaaccaaggaaaagattcatagcctttttcatcgccggcatcctcttcagggcgataaaaaaccacttccttccccgcgaaactcttcaatgcctgccgtatatccttactggcttccgcagaggtcaatccgaatatttcagcatatttagcaacatggatctcgcagataccgtcatgttcctgtagggtgccatcagattttctgatctggtcaacgaacagatacagcatacgtttttgatcccgggagagactatatgcccgctcagtgaagtcgtttgactggacgattcgcgggctatttttacgtttcttgtgattgataaccggtggttccgccatgacagatccatgtggaagggggacaagttttttagaatgggcacaccgggttggactcaagacgatagttaccggataaggcgcagcggtcgggctgaaccgggggttcgtgcacacagcccagcttggagcgaacgacctacaccgaactgagatacctacagcgtgagctggattggggaggcggttgccgccgctgctgctgacggtgtgacgttctctgttccggtcacaccacatacgttccgccattcctatgcgatgcacatgctgtatgccggtataccgctgaaagttctgcaaagccaatacccgattttcaaactttcctacaagaaccccgttacacaaacagcatggttcctggttcccaaaccgtatatttggacccgtgccgatcaacgtctcattttcgccaaaagttggcccagggcttcccggtatcatatagggacaccatgatttatttattctgcgaagtgatcttgcgtgagaggtatttattcgcgataagctcatggagcggcgtaaccgtcgcacaggaaggacagagaaagcgcggatagaacggtcaggacctggattggggaggcggttgccgccgctgctgctgacggtgtgacgttctctgttccggtcacaccacatacgttccgccattcctatgcgatgcacatgctgtatgccggtataccggtgaaagttctgcaaagccagtgcatttagcaaatatgggaattgaccattttcaattgttttggcattcatgaggatgttgataaaggtaggggttgggggcagagctgattctttaatgattttgacattaatcgtgccgatacccaggttaggcgcgctgtcaataactatgacatcatagtcatgagcaacagtttcaatggccagtcggagcatcaggtgtggatcggtgggcagtttaccttcatcaaatttgcccattaactcagtttcaatacggggcaaagccagaacaggaaggaataatgtcaagccccggccagcaagtgggtgcccgctttccagtcgggaaacctgtcgtgccagctgcattaatgaatcggccaacgcgcggggagaggcggtttgcgtattgggcgccagggtggtttttcttttcaccagtgagacgggcaacagctgattgcccttcaccgcctggccctgagagagttgcagcaagcggtccacgctggtttgccccagcaggcgaaaatcctgtttgatggtggttccgaaatcggcaaaatccccaaatcccggtggaaatacgtcttcagcacgtcgcagtcgcgtaccaaacacatcacgcatatgattaatttgttcaattgtataaccaacacgttgctcaacccgtcctcgaatttccatatccgggtgcggtagtcgccctgctttctcggcatctctgatggcctgagaagaaaccccaactaaatccgctgcttcacctattctccagcgccgggttattttcctcgcttccgggctgtcatcattaaactgtgcaatggcgatagccttcgtcatttcatgaccagcgtttatgcactggttaagtgtttccatgagtttcat

SEQ ID NO: 13194 - DNA, 813 bp, Homo sapiens
  SIMILAR (723)..(4): 931254mologous to unidentified cloning vector 29kD protein essential for the replication of mini F plasmid,accession number AB015619,Smith-Waterman Score=1167.
ctatcctgtcgtcatggaagtgatatcgcggaaggaaactacgatatgagtcgtctggcggcctttctttttctcaatgtatgagaggcgcattggagttctgctgttgatctcattaacacagacctgcaggaagcggcggcggaagtcaggcatacgctggtaactttgaggcagctggtaacgctctatgatccagtcgattttcagagagacgatgcctgagccatccggcttacgatactgacacagggattcgtataaacgcatggcatacggattggtgatttcttttgtttcactaagccgaaactgcgtaaaccggttctgtaacccgataaagaagggaatgagatatgggttgatatgtacactgtaaagccctctggatggactgtgcgcacgtttgataaaccaaggaaaagattcatagcctttttcatcgccggcatcctcttcagggcgataaaaaaccacttccttccccgcgaaactcttcaatgcctgccgtatatccttactggcttccgcagaggtcaatccgaatatttcagcatatttagcaacatggatctcgcagataccgtcatgttcctgtagggtgccatcagattttctgatctggtcaacgaacagatacagcatacgtttttgatcccgggagagactggttggggaggcggttgccgcgctgctgctgacggtgtgacgttctctgttccggtcacaccacatacgttccgccattcctatgcgatgcacatgctgtatgccggtataccgctgaaagttctgcaaagcctgatgggacat

SEQ ID NO: 13195 - DNA, 1180 bp, Homo sapiens
  SIMILAR (322)..(10383): 991254mologous to Homo sapiens utrophin (dystrophin related protein),accession number X69086,Smith-Waterman Score=17116.
gaaattagacgtggctgcccatgggagtcatctggcactcaagtgccactggggcacttccaaaactcagaaacctccccagcactcccagatttctgatgtaattgatttgggggattttgccgatttcggaaccaccatcaaacaggattttcgcctgctggggcaaaccagcgtggaccgcttgctgcaactctctcagggccaggcggtgaagggcaatcagctgttgcccgtctcactgcagcaaaacgaaaaataccaagtgcctcaattcgatcaatcaacgattaaaaatattgagtctgcaaaaggacttgatgtgtgggacagctggccgctgcaaaacgctgacggaacagtagctgaatacaacggctatcacgttgtgtttgctcttgcgggaagcccgaaagacgctgatgacacatcaatctacatgttttatcaaaaggctggaaaaacgcgggccgtgtctttaaagacagcgcataagttcgacgccaacgatccgatcctgaaagatcagacgcaagaatggtccggttctgcaacctttacatctgacggaaaaatccgtttattctacactgactattccggtaaacattacggcaaacaaagcctgacaacagcgcaggctgccaaacttgaattcctagtgattcacactagctggcccttcacaggcctcagagagcacgggcaggaagaggccacaggctccaggcctcctgatgcccctgcccccagcagccctaagagtggcctggagcaggtgctgggcaagggtctgctcttcgatacaggaaacagctatgaccatgattacgaattcgagctcggtacccccgttgaactgatggacttatgtcccatcaggctttgcaagaactttcagcggtataccggcatacagcatgtgcatcgcataggaatggcggaacgtatgtggtgtgaccggaacagagaacgtcacaccgtcagcagcagcggcggcaaccgcctccccaatccaggatctggctctgaaggggctacgtgttttgctcgtggaagattctgcagtaacccaaacacatccccagtgaaggacgagggccacaacccaggatgccaggtgtcaggcaactgtcccagtatgccttgccgcacagttactggactccttgaatcttaa

SEQ ID NO: 13196 - DNA, 1293 bp, Homo sapiens
  SIMILAR (559)..(750): 891254mologous to Homo sapiens mariner transposase,accession number U52077,Smith-Waterman Score=329.
atgagtgaagtcccattcacaattgcttcaaagagaataaaatacctaggaatccaacttacaagggatgtgaagggccacttcaaggagaactacaaaccactgctcaacgaaataaaagaggacacaaacaaatggaagaacattccatgctcatggataggaagaatcaacatcatgaaaatggccatactgctcaaggtatttattcgcgataagctcatggagcggcgtaaccgtcgcacaggaaggacagagaaagcgcggatctgggaagtgacggacagaacggtcaggacctggattggggaggcggttgccgccgctgctgctgacggtgtgacgttctctgttccggtcacaccacatacgttccgccattcctatgcgatgcacatgctgtatgccggtataccgctgaaagttctgcaaagcctgatgggacataagtccatcagttcaacggaagtctacacgaaggtttttgcgctggatgtggctgcccggcaccggtgtgacaatctaaaaacttgtcacacttcacatggatctgtcatggcggaaacagcggttatcaatcacaagaaacgtaaaaatagcccgcgaatcgtccagtcaaacgacctcactgaggcggcatatagtctctcccgggatcaaaaacgtatgctgtatctgttcgttgaccagatcagaaaatctgatggcaccctacaggaacatgacggtatctgcgagatccatgttgctaaatatgctgaaatattcggattgacctctgcggaagccagcattgaagagtttcgcggggaaggaagtggaaattatcgccctgaagaggatgccggcgatgaaaaaggctatgaatcttttccttggtttatcaaacgtgcgcacagtccatccagagggctttacagtgtacatatcaacccatatctcattcccttctttatcgggttacagaaccggtttacgcagtttcggcttagtgaaacaaaagaaatcaccaatccgtatgccatgcgtttatacgaatccctgtgtcagtatcgtaagccggatggctcaggcatcgtctctctgaaaatcgactggatcatagagcgttaccagctgcctcaaagttaccagcgtatgcctgacttccgccgccgcttcgtgcaggtctgtgttaatgagatcaacagcagaactccaatgcgcctctcatacattgagaaaaagaaaggccgccagacgagtcatatcgtattttccttccgcgatatcacttccatgacgacaggatag

SEQ ID NO: 13197 - DNA, 1080 bp, Homo sapiens; identical to SEQ ID NO: 7137

SEQ ID NO: 13198 - DNA, 672 bp, Homo sapiens
  SIMILAR (345)..(4): 801254mologous to Cloning vector pZC320 SopA,accession number U26464,Smith-Waterman Score=510.
tcagggctcgaactctttaagatcaacgttcttgagcacatcacgaagcatatcgaaaaactgcagtgcggaggtgtagtcaaacaactcagcaggcgtgggaacaatcagcacatcagcagcacatacgacattaatcgtgccgatacccaggttaggcgcgctgtcaataactatgacatcatagtcatgagcaacagtttcttcatcaaatttgcccattaactcagtttcaataccgggcacagccacacaggaaggaataatgtcaagcccccgccagcaagtgggctttattgcataagtgacatcgtcctttttcccaagatagaaaggcacgagagatgtcttctgcatgaatatgaagaaatggtacccatccgcgatacattgaggctgttccctggggggcgttacctgctgacgtgtgacgttctctgttccggtccaccacatacgttccgccattcctatgcgatgcacatgctgtatgccggtataccgctgaaagttctgcaaagccgcctggccctgagagagttgcagcaagcggtccacgctggtttgccccagcaggcgaaaatcctgtttgatgggggttccgaaatcggcaaaatccctcatattgtcctctacaaacccgttcagtgcagtctctgggcctttgttcat

SEQ ID NO: 13199 - DNA, 3288 bp, Homo sapiens
  SIMILAR (998)..(1507): 901254mologous to Homo sapiens putative p150,accession number U93574,Smith-Waterman Score=837.
ttagttgactgccaactgtcctggctccaggatgctgtttttgacaacggatgttttattgcctttgatgttcattaagaagcttggcgcaaatgttgcctttttatcctcgaagaagcctctgtttgtcatgtagcttgtgataaccacattgttgcctttggcttgcggcactgcgaagtgagagtaagtgaatgtcacatcgtttggatcaagacccatttgcagcacaagccctgttttgttcagcggcttgtaagggccggttaaagagtttgatacataaccaagcatgtaaatatcgtttgagttaataccatcgatcgtcatttttgaaccgcgtgaatcagtgaacaagtaccatttgccgttcattttgaaaacattcgcgcgctcgatttcatcagttaccgtgtttgaagtgatcagcggcttcattacttttttcaatgtgtaatcattatttaactctatgataccgagggcgccgttcgctaactcagcatcgcgttttttagcgctctgctgaagcttctggctttctttacggaagaagttcgtgccgccgccgtagtacgctttgttaaataaagattcttcgccttggtatccgttttctgttcccgtgttggcttcgaatacaaggtatttatggcctttgtcttcaacgtagtgagggtctctcagcgtatggttgtcgccggatgtataattgccttcatcgataaactgctgaacgttctgatatgtttttccgtctccgtcaaaaatcgttttgtgatcttccactcggttgattttgagtgtgtcatcagattttgacacatttacctgcgctgttgtcaggctttgtttgccgtaatgtttaccggaatagtcagtgtagaataaacggatttttccgtcagatgtaaaggttgcagaaccggaccattcttgcgtctgatctttcaggatcggatcgttggcgtcgaacttatcgctgtctttaaagacacggcccgcgtttttccagctgtcgattgagttgtcgccgaccttttgataaaacatgtagattgatgtgtcatcagcgtctttcgggcttcccgcaagagcaaacacaacgtgatagccgttgtattcagctactgttccgtcagcgttttgcagcggccagctgtcccacacatcaagtccttttgcagactcaatatttttaatcgttgattgatcgaattgaggcacttggtatttttcgttttgctgctgtttagggatctgcagcatatcatggcgtgtaatatgagagacgccgtacgtttctttgtatgctttttggttattttctttcgcgaaggcttgagtcgctcctcctgccagaagtgcagtcgtaaaagtcagaactgtggcttgttttacaatttttttgatgttcatgttcatgtctccttctgtatgtactgttttttgcgatctgccgtttcgatcctcccgaattgactttcttggcttcaggatgctgggtgccaccttgaaatcaaggttcggtgggagggaaatgaagaccttagccgtgggtagagtcctcaaggccttgcctgtggtcgacagggccttagtgcccaccagcttgctgtgctgtcgtctgaggacctggccctggtgtcggagtacatggggagaaggcagctgggccttggtgtggaggctgtgggtaggggtccccgagtccttgccttccccagagcctcgctgggtcagcagagggactgctgggcggacccccatccgccgatgacacatcgccatgggcttcttgatggtgaagccctctaccaggagccggatgcccacatattgaggcacctccacagcaggctctgagtcagtacctagagtcacagagctccaggaattgctggccacttggttgatgacaggagcaaagtaggtgggcccatagagctgcactgtgcgcaggctctggaaatagctctccagcacaccctcgatgcccgcacagttggggtcctcatcattgttgtttgccttgagggccatggcatagacgctgagctggtagggactcatgtagtgcagggaggtaggctgcagaggattccctccgactttttcactcatccgtgtctcaccattggaagccgtgaagtcaatggctactgtgaagttcagctgtgtcgtgtctttctccttctcagaactctcatactccaggaacacgatgtgccggggatagtggccacagatatccccattcgtgtttggaatcacgctgaaacagtagtctcggccaaacagctccagacatctcttctcaatgcgctcaacccagggattggctgagacgaaaaacatattctcaataaaccctttagggaaataggccaggtttttcacccgtaccacgcccacattcttgcgaatatattgtgtagaaacgtctttcattgccatacggaactccggatgagcattcatcaggcgggcaagaatgtgaataaaggccggataaaacttgtgcttatttttctttacggtctttaaaaaggccgtaatatccagctgaacggtctggttataggtacattgagcaactgactgaaatgcctcaaaatgttctggattggggaggcggttgccgccgctgctgctgacggtgtgacgttctctgttccggtcacaccacatacgttccgccattcctatgcgatgcacatgctgtatgccggtataccgctgaaagttctgcaaagccggtttggagatgttggttttggagtccacgttgtacacatcgaagcgcagattttgcttttcctcaaagaaatagtcgaggacgaatttgcgcacgaagtctgggttcagcgtgttatcaatcacctcggtccgtccgaactcccgccactcatggctggcccggctctgcgtgtaaagcaccaccatggggtcggacttggagaaggtatcaaggtctagcaggttccggcaggacacggtaatttcaatcttggtggccgggacgctgcgctcggaggctccgccgagagacatggctggtcgggcgaccagagccgcaggaggctgcgagaccagggctgctggggctaggggcgacggcagcggcggggccggcccatgtgccgcggtgtcggcggcggcggcggctgcactcgctccagccctgcgtgcgctccagccgctcgcgccctgacagtggccgccggcggcagcggctccagatggcagcacagccccgcccggccctgcgggcggcccccgccccat

SEQ ID NO: 13200 - DNA, 1350 bp, Homo sapiens; identical to SEQ ID NO: 4998
  SIMILAR (1003)..(1347): 1001254mologous to Plasmid F Protein D,accession number M12987,Smith-Waterman Score=584.
  misc_feature (1)...(1350): n = a,t,c or g

SEQ ID NO: 13201 - DNA, 783 bp, Homo sapiens; identical to SEQ ID NO: 4999
  SIMILAR (2292)..(2957): 951254mologous to Homo sapiens putative p150,accession number U93563,Smith-Waterman Score=1046.

SEQ ID NO: 13202 - DNA, 891 bp, Homo sapiens
  SIMILAR (498)..(124): 821254mologous to Cloning vector pBACe3.6 levansucrase,accession number U80929,Smith-Waterman Score=527.
ttagttgactgtcagctgtccttgctccaggatgctgtttttgacaacggatgttttattgcctttgatgttcattaagaagcttggcgcaaatgttgcctttttatcctcgaagaagcctctgtttgtcatgtagcttgtgataaccacattgttgcctttggcttgcggcacatcgatcgtcatttttgaaccgcgtgaatcagtgaacaagtaccatttgccgttcattttgaaaacattcgcgcgctcgatttcatcagttaccgtgtttgaagtgatcagcggcttcattacttttttcaatgtgtaatcattatttaactctatgataccgagggcgccgttcgctaactcagcatcgcgttttttagcgctctgctgaagcttctggctttctttacggaagaagttcgtgccgccgccgtagtacgctttgttaaataaagattcttcgccttggtatccgttttgatactgacacagggattcgtataaacgcatggcatacggattggtgatttcttttgtttcactaagccgaaactgcgtaaaccggttctgtaacccgataaagaaaggaatgagatatgggttgatatgtacactgtaaagccctctggatggactgtgcgcacgtttgataaaccaagggaaagattcatagcctttttcatcgccggcatcctcttcagggcgataaaaaaccactttcttccccgcgaaactcttcaatgcctgccctatatccttacctggattggggaggcggttgccgccgctgctgctgacggtgtgacgttctctgttccggtcacaccacatacgttccgccattcctatgcgatgcacatgctgtatgccggtataccgctgaaagttctgcaaagc

SEQ ID NO: 13203 - DNA, 918 bp, Homo sapiens
  SIMILAR (220)..(483): 981254mologous to Plasmid F Protein D,accession number M12987,Smith-Waterman Score=448.
atgaaagagaaaccttcttcacctcgacagtactcctattcatttctctcatcaatgatcttattgggggggggtgaaagttggaacctcttacgtgccgatcaacgtctcattttcgccaaaagttggcccagggcttcccggtatcaacagggacaccaggatttatttattctgcgaagtgatcttccgtcacaggtatttattcgcgataagctcatggagcggcgtaaccgtcgcacaggaaggacagagaaagcgcggatctgggaagtgacggacagaacggtcaggacctggattggggaggcggttgccgccgctgctgctgacggtgtgacgttctctgttccggtcacaccacatacgttccgccattcctatgcgatgcacatgctgtatgccggtataccgctgaaagttctgcaaagcctgatgggacataagtccatcagttcaacggaagtctacacgaaaggtttttgcgctggatgtggctgccccgcacccggagtccacaccggtacacctaccatcgcgggagaacaaaattcctccacctattatgagaataccgtgtgggctaccgacatcccccatcgaacagaaacaaggaaaaatatctgccacgggaacacagtggaggaggttaaagcaagaaacgcgcctaagctcggtatcggcacgattaatgtcgtatgtgggggtgatgtgctgattgttcccacgcctgctgagttgtttgactacacctccgcactgcagtttttcgatatgcttcgtgatcttctcaagaacgtttatcttaaagggttcgagcctgatgggctggccattgatcaacgctcttcaactggtgcctggagaaatgctctttctatttgggaacctgtctgcatgaaattttcgatcggctga

SEQ ID NO: 13204 - DNA, 540 bp, Homo sapiens
  SIMILAR (145)..(471): 841254mologous to Plasmid F Protein D,accession number M12987,Smith-Waterman Score=445.
gctatgtttggattcttcatccggggctatgggtttttcacaccatttggcaggactctttttccacttggatttggttcaaccccacctttcacctttccgcttttgacaaagaccattggggtatttattctcgataagctcatggagcggcgtaaccgtcgcacaggaaggacagagaaagcgcggatctgggaagtgacggacagaacggtcaggacctggattggggaggcgggtgccgccgctgctgctgacggtgtgacgttctctgtttcggtcacaccacatacgttccgccattcctatgcgatgcacatgctgtatgccggtataccgctgaaagatcttcaaagcctgatgggacataaatccatcagttcaacggaaggctacaccaaagatttttcgctggatgtgggtggcccggcaccgggtgcaattttgcgatgcccggagtctgatgcggttggcgatgttgaaacaattattctgagaataaaaaaccttggccttttttttgtaaaatgtgggaactga

SEQ ID NO: 13205 - DNA, 547 bp, Homo sapiens; identical to SEQ ID NO: 5001
  SIMILAR (167)..(544): 921254mologous to Plasmid F Protein D,accession number M12987,Smith-Waterman Score=586.

SEQ ID NO: 13206 - DNA, 735 bp, Homo sapiens; identical to SEQ ID NO: 5002
  SIMILAR (1)..(471): 911254mologous to Cloning vector pZC320 SopA,accession number U26464,Smith-Waterman Score=725.

SEQ ID NO: 13207 - DNA, 1602 bp, Homo sapiens
  SIMILAR (1)..(1140): 861254mologous to Homo sapiens putative p150,accession number U93569,Smith-Waterman Score=1633.
atggtgctgattgtagcagccacagtggtggtggtggtcgtggtaggactgtgctggatggcgaaaagtgaatgccgctcagccatgcgtttgtcttcccttcaggttcgcatcttcacatacctcattggacgagaggctgcgtttgcagacaatctaaagtggatggcctgtgccaacaaagagtcagcccttcttgatcgtttcatcttcctcattctgcttctatgtaaagagccttgggaatgtcactgtttgccactcttcaaagtagcaatgccatcaaaatgtgatattccagtcatctgtgcccatataaacattggcttcacgttgcgtcagttaaggggttttggaccatgtaacatcggcagctttgaggcaaaagactctaaaaatccccaagtaagggtaatatctcagaaacacaaagcactgcgttgcatatggtttatcacatgcagtatttgtaacccagagttcacagaaggagctctgcaagggaataagcagcgaaagaggcagtgtcttcagtggttcagagcaaaggctttggaatcaaatgaacctggattcgaattcatccaggacaaattactgactcagagtttgtgtttcttcccctacacgttcctctggctaactggtcctcatccttcaggttctagctacactgacccttgctcaagcaaagctgatgtgaccccaagctctacagcagtacaggaacatagcagcgccctggaactaaagaccaaaatagtgtcaccaatcacaagacaacagcatggattttttacccagatctccaccttggctgatgtgcaggagaatgtcatggaataccttcacgtgcttagccggcccaaagtcatcgaccaggagcatgatgtggtgtggaccgaagcttacattgacagcactgtctgccgggtgaagagaaggcagctgctgcttcaacaggtacctctgaccaggaagcagcagtttcttccagctccttatgtggacctggattctgccaggacacgaacaaacaaacaacaacaaaaccccatcatttatacggggtcaaaacagggttcacatgtgatcttatttcattatggtgaaagttggaacctcttacgtgccgatcaacgtctcattttcgccaaaagttggcccagggcttcccggtatcaacagggacaccaggatttatttattctgcgaagtgatcttccgtcacaggtatttattcgcgataagctcatggagcggcgtaaccgtcgcacaggaaggacagagaaagcgcggatctgggaagtgacggacagaacggtcaggacctggattggggaggcggttgccgccgctgctgctgacggtgtgacgttctctgttccggtcacaccacatacgttccgccattcctatgcgatgcacatgctgtatgccggtataccgctgaaagttctgcaaagcctgatgggacataagtccatcagttcaacggaagtctacacgaaggtttttgcgctggatgtggctgcccggcaccgggtgcagtttgcgatgccggagtctgatgcggttgcgatgctgaaacaattatcctga

SEQ ID NO: 13208 - DNA, 1626 bp, Homo sapiens
  SIMILAR (1626)..(712): 971254mologous to Cloning vector pZC320 SopA,accession number U26464,Smith-Waterman Score=1549.
ttacgccccgccctgccactcatcgcagtactgttgtaattcattaagcattctgccgacatggaagccatcacaaacggcatgatgaacctgaatcgccagcggcatcagcaccttgtcgccttgcgtataatatttgcccatggtgaaaacgggggcgaagaagttgtccatattggccacgtttaaatcaaaactggtgaaactcacccagggattggctgagacgaaaaacatattctcaataaaccctttagggaaataggccaggttttcaccgtaacacgccacatcttgcgaatatatgtgtagaaactgccggaaatcgtcgtggtattcactccagagcgatgaaaacgtttcagtttgctcatggaaaacggtgtaacaagggtgaacactatcccatatcaccagctcaccgtctttcattgccatacggaactccggatgagcattcatcaggcgggcaagaatgtgaataaaggccggataaaacttgtgcttatttttctttacggtctttaaaaaggccgtaatatccagctgaacggtctggttataggtacattgagcaactgactgaaatgcctcaaaatgttctggattggggaggcggttgccgccgctgctgctgacggtgtgacgttctctgttccggtcacaccacatacgttccgccattcctatgcgatgcacatgctgtatgccggtataccgctgaaagttctgcaaagcatcaggctcgaaccctttaagatcaacgttcttgagcagatcacgaagcatatcgaaaaactgcagtgcggaggtgtagtcaaacaactcagcaggcgtgggaacaatcagcacatcagcagcacatacgacattaatcgtgccgatacccaggttaggcgcgctgtcaataactatgacatcatagtcatgagcaacagtttcaatggccagtcggagcatcaggtgtggatcggtgggcagtttaccttcatcaaatttgcccattaactcagtttcaatacggtgcagagccagacaggaaggaataatgtcaagccccggccagcaagtgggctttattgcataagtgacatcgtccttttccccaagatagaaaggcaggagagtgtcttctgcatgaatatgaagatctggtacccatccgtgatacattgaggctgttccctgggggtcgttaccttccacgagcaaaacacgtagccccttcagagccagatcctgagcaagatgaacagaaactgaggttttgtaaacgccacctttatgggcagcaaccccgatcaccggtggaaatacgtcttcagcacgtcgcaatcgcgtaccaaacacatcacgcatatgattaatttgttcaattgtataaccaacacgttgctcaacccgtcctcgaatttccatatccgggtgcggtagtcgccctgctttctcggcatctctgatagcctgagaagaaaccccaactaaatccgctgcttcacctattctccagcgccgggttattttcctcgcttccgggctgtcatcattaaactgtgcaatggcgatagccttcgtcatttcatgaccagcgtttatgcactggttaagtgtttccatgagtttcat

SEQ ID NO: 13209 - DNA, 1239 bp, Homo sapiens; identical to SEQ ID NO: 5007
  SIMILAR (160)..(852): 991254mologous to Homo sapiens protein-tyrosine- phosphatase,accession number X93920,Smith-Waterman Score=1193.

SEQ ID NO: 13210 - DNA, 1026 bp, Homo sapiens; identical to SEQ ID NO: 10668
  SIMILAR (388)..(657): 961254mologous to unidentified cloning vector 29kD protein essential for the replication of mini F plasmid,accession number AB015619,Smith-Waterman Score=459.

SEQ ID NO: 13211 - DNA, 936 bp, Homo sapiens
  SIMILAR (1)..(438): 1001254mologous to Cloning vector pSacBII SacB,accession number U09128,Smith-Waterman Score=782.
atgctgcagatccctaaacagcagcaaaacgaaaaataccaagtgcctcaattcgatcaatcaacgattaaaaatattgagtctgcaaaaggacttgatgtgtgggacagctggccgctgcaaaacgctgacggaacagtagctgaatacaacggctatcacgttgtgtttgctcttgcgggaagcccgaaagacgctgatgacacatcaatctacatgttttatcaaaaggtcggcgacaactcaatcgacagctggaaaaacgcgggccgtgtctttaaagacagcgataagttcgacgccaacgatccgatcctgaaagatcagacgcaagaatggtccggttctgcaacctttacatctgacggaaaaatccgtttattctacactgactattccggtaaacattacggcaaacaaagcctgacaacagcgcagacccaacaccaggtcgtgtgggtgacaaagtccggtggagtcaaaggattgagaaaaagacagtttgagagagaaatgtgggcatcagggggccattgcgattgtggaggctgtgaaggccctgagctctgggagtccacgttatttattggtaattcaacaaagaaacatatggcaaggacagagaaagcgcggatctgggaagtgacggacagaacgggcatgacctggattggggaggcgggtgccgccgctgctgctgacggtgtgacgttctctgttccggtcacaccacatacgttccgccattcctatgcgatgcacatgctgtatgccggtataccgctgaaaggtctgcaaagcctgatgggacataactccatcagttcaacggaagtctacacgaaggtttttgcgctggatgtggctgcccggcaccgtgtgcaatttgcgatgcccgagtctgatgctgttgcgatgctgaaacaattatcctga

SEQ ID NO: 13212 - DNA, 1281 bp, Homo sapiens; identical to SEQ ID NO: 5008
  SIMILAR (895)..(1278): 921254mologous to Plasmid F resolvase,accession number AP001918,Smith-Waterman Score=585.

SEQ ID NO: 13213 - DNA, 708 bp, Homo sapiens
  SIMILAR (361)..(705): 981254mologous to Plasmid F Protein D,accession number M12987,Smith-Waterman Score=572.
atgatctgcaaaacctgctgccacatcatgctgtcccaagaggagaagaagcagtttctggactatctaaagaggcccggcctgacctaccttcagaagcgaggactgaaaaagaaaatctctgacaagtgccggaagaaaaacatctgccatcactgtggcgcttttaatgatcatgtttattgttgcacattcaggtttttgaaatacggaaatcgagaaaagatggctcaagagctcaagtatggtgacatcgtagagagacacctcatcgatggagatgtggtgctgttcaatcggcagccctcgctgcacaaattgagcattatggctcatctggtatttattcgcgataagctcatggagcgttgtaaccgtcgcacaggaaggacagagaaagcgcggatctgggaagtgacggacagaacggtcaggacctggattggggaggcggttgccgccgctgctgctgacggtgtgacgttctctgttccggtcacaccacatacgttccgccattcctatgcgattcacatgctgtatgccggtataccgctgaaagttctgcaaagcctgatgggacataagtccatcagttcaacggaagtctacacgaaggtttttgcgctggatgtggctgcccggcaccgggtgcagtttgcgatgccggagtctgatgcggttgcgatgctgaaacaattatcctga

SEQ ID NO: 13214 - DNA, 895 bp, Homo sapiens; identical to SEQ ID NO: 5009
  SIMILAR (548)..(892): 1001254mologous to Plasmid F Protein D,accession number M12987,Smith-Waterman Score=584.

SEQ ID NO: 13215 - DNA, 429 bp, Homo sapiens
  SIMILAR (201)..(1): 881254mologous to Escherichia coli Orf1 5' of phoH,accession number D90739,Smith-Waterman Score=302.
cagcatcattgcggcctgttgtggcgtcaggatccctgcctgatgctcaccatacaacggctgtttctcattgcgagcatccggtgaaagcgtacccggcgcactgtgacgtttttgtgcatgagcgaccggacagtttcccggcagggccagtgcacctatcactttcaggaaacgtcggcgggacgggtcaatcacgccggccgcccatttgcaggtcatccatggaccaacgttggtatatccactgatttttatctccattttagcttccttagctcctggattggggaggcggttgccgccgctgctgctgacggtgtgacgttctctgttccggtcacaccacatacgttccgccattcctatgcgatgcacatgctgtatgccggtataccgctgaaagttctgcaaagcctgatgggacat

SEQ ID NO: 13216 - DNA, 1419 bp, Homo sapiens; identical to SEQ ID NO: 3349
  SIMILAR (715)..(957): 811254mologous to Mus musculus Pro-Pol-dUTPase polyprotein,accession number Y12713,Smith-Waterman Score=375.

SEQ ID NO: 13217 - DNA, 2787 bp, Homo sapiens
  SIMILAR (841)..(1989): 741254mologous to Homo sapiens TRIP protein,accession number AJ223075,Smith-Waterman Score=1408.
atgaacaactccagaggcgccgccttaagagctataacactcactgcgaaggtccgcggcttcattcttgaagtcggctcagcccgcggccacctacgccccgcccctgccggctgcgcccgagcccagtcccgcgagccgctccccggcgggctggctcttggccccggaagcgcgagcgttcacttcgcggcgagtggctccgtctccgcggacagagcgcgcgccccctggcccggcccgcgggggggggctccggcacggtccccgagcgtttcccgccgggtggagcgggccgagcccagcaggttgaccagccccgcggccacgcagagccgggagatctactgtttgagcgcggaagcgcagaggctggcggaggcccggctcgccgcaaaacgggaggcccgcgcggaggctcgtgagatccccatgaaggagctggagcggcagcagaaggaggtagaagagagaccagaaaaatattttactgagaaggggtctcgtaacatgctgggcccgtctgcagccacgctggcctttctgggtgggacttcctctcagagaggcagcggagacacctctatatccatcgacaccgaggcgtccatcagggaaatcaaggactctctagcagaagttgaagagaaatgtaagaaggctatgttttccaatgctcagttagacaatgaaaacacaaacttcatttaccaagttgacaccctgaaagatatgttgctggagattgaagaacagctggctgaatataggcggcaatcctaccaagatgacgaaagaagagttaaatgccctcaagtcgacaggggatgggaccctaggaaagccagtgaggtggaggtgaagaatgaaatcgtggcgaatgtggggaaaagagaaatcttgcacaatactgagaaagaacaacacacagaggacacagtgaaggattgtgtggacatagaggtattcactgctggtgagaataccgaggaccagaaatcctctgaagacactgccccattcctaggaaccttagcaggtgctacctatgaggaacaggttcaaagccaaattcttgagagcgcttctctccctgaaaacacagcacaggttgagtcaaatgaggtcatgggtgcaccagatgacaggaccagaactccccttgagccatccaactgttggagtgacttagatggtgggagccacacagagaatgtgggagaggcagcggtgactcaggttggagagcaggcagacacagtggcctcatgtcctttagggcatagtgatgacacagtttatcatgatgacagatgtatggtagaggtcccccaacagttagagacaagcatagggcatagtttagagaaagaattcaccaaccaggaagcagctgagcccaaggaggttccagtgcagagtacagaagcaggtagggatcacaacgaagaagagggtgaagaaaaaggattaagggatgagaaaccaatcaagacagaagttcctggttctccagcaggaactgagagcaagggtcaggaggcgacaggtccaagtacagtagacactcaaagtgaaccctcagatatgaaagagccagatgaagaaaagaatgaccaacagggagaggcattggactcattgcagaagagaaagaacaagaaaaagaaaaagaagaggaaaaaatccccaaacacagatttaagtgaaattaaggaagaagagcaggtaaagtctactgacagaaagtcagcagtggaagcccaaaacgaggtgactgaaaatccaaaacagaaaattgcagcagaaagcagtgaaaatgttgattgtccagagaatcctaaaatgaagttggatggaaaacttgaccaagaaggcaatgatgtaaaaacagcagctgaggaggtactagctggtagagacacattagattttgaggatgtcacagttcaatcatcaggcccgagggctggtggtgaagaattagatgaaggtgttgcaaaagataatgctaaaatagctgacaccctgccctgcgagaatgtatctcatcctttgctggagcaggtttgcaggcacagtggagagaggagagaagaaatgaagggacacttatgcagaaccatgagtggccagagaggaggagaaggagggacagcctttcctgcctcagggaagaagagagagacagactacagtgatggagacccactagatgtgcacaagaggctgccatccagtgctggagaggaccgagccgtgatgctggggtttgccatgatgggcttctcagtcctaatgttcttcttgctcggaacaaccattctaaagccttttatgctcagttggcccagggcttcccggtatcaacagggacaccaggatttatttattctgcgaagtgatcttccgtcacaggtatttattcgcgataagctcatggagcggcgtaaccgtcgcacaggaaggacagagaaagcgcggatctgggaagtgacggacagaacggtcaggacctggattggggaggcggttgccgccgctgctgctgacggtgtgacgttctctgttccggtcacaccacatacgttccgccattcctatgcgatgcacatgctgtatgccggtataccgctgaaagttctgcaaagcctgatgggacataagtccatcagttcaacggaagtctacacgaaggtttttgcgctggatgtggctgcccggcaccgggtgcagtttgcgatgccggagtctgatgcggttgcgatgctgaaacaattatcctga

SEQ ID NO: 13218 - DNA, 416 bp, Homo sapiens
  SIMILAR (193)..(2): 641254mologous to Cloning vector pZC320 SopA,accession number U26464,Smith-Waterman Score=222.
cttcatcaaatttgcccattaactcagtttcaataccgggcacagccacacaggaaggaataatgtcaagcccccgccagcaagtgggctttattgcataagtgacatcgtcctttttcccaagatagaaaggcacgagagatgtcttctgcatgaatatgaagaaatggtacccatccgcgatacattgaggctgttccctggggggcgttacctgctgacgtgtgacgttctctgttccggtccaccacatacgttccgccattcctatgcgatgcacatgctgtatgccggtataccgctgaaagttctgcaaagccgcctggccctgagagagttgcagcaagcggtccacgctggtttgccccagcaggcgaaaatcctgtttgatgggggttccgaaatcggcaaaatcc

SEQ ID NO: 13219 - DNA, 1434 bp, Homo sapiens; identical to SEQ ID NO: 5015
  SIMILAR (64)..(1065): 981254mologous to Homo sapiens Net,accession number Z36715,Smith-Waterman Score=1668.

SEQ ID NO: 13220 - DNA, 858 bp, Homo sapiens
  SIMILAR (1)..(438): 1001254mologous to Cloning vector pSacBII SacB,accession number U09128,Smith-Waterman Score=782.
atgctgcagatccctaaacagcagcaaaacgaaaaataccaagtgcctcaattcgatcaatcaacgattaaaaatattgagtctgcaaaaggacttgatgtgtgggacagctggccgctgcaaaacgctgacggaacagtagctgaatacaacggctatcacgttgtgtttgctcttgcgggaagcccgaaagacgctgatgacacatcaatctacatgttttatcaaaaggtcggcgacaactcaatcgacagctggaaaaacgcgggccgtgtctttaaagacagcgataagttcgacgccaacgatccgatcctgaaagatcagacgcaagaatggtccggttctgcaacctttacatctgacggaaaaatccgtttattctacactgactattccggtaaacattacggcaaacaaagcctgacaacagcgcaggcattgccccaaacactgaccctcaactgtgtttgcagaaatttgctctttgaaacagaaaagcgaaagctcatggagcggcgtaaccgtcgcacaggaaggacagagaaagcgcggatctgggaagtgacggacagaacggtcaggacctggattggggaggcggttgccgccgctgctgctgacggtgtgacgttctctgttccggtcacaccacatacgttccgccattcctatgcgatgcacatgctgtatgccggtataccgctgaaagttctgcaaagcctgatgggacataagtccatcagttcaacggaagtctacacgaaggtttttgcgctggatgtggctgcccggcaccgggtgcagtttgcgatgccggagtctgatgcggttgcgatgctgaaacaattatcctga

SEQ ID NO: 13221 - DNA, 1098 bp, Homo sapiens
  SIMILAR (568)..(1068): 991254mologous to Cloning vector pBACe3.6 levansucrase,accession number U80929,Smith-Waterman Score=870.
atgctggcatctgctcagcttctggggatgcctcaggaaacctacaatcatgatagaggtgaagggggagcagacacttcacatggtgaaagcaggaggaagacagagagcagggagttgtggcttacagcaggggtcctcaaatccctggctgcagaccagtatcagtccagtgcgtggcctcttagaaacccggcagcacggcaggaggctttgcagaactttcagcggtataccggcatacagcatgtgcatcgcataggaatggcggaacgtatgtggtgtgaccggaacagagaacgtcacaccgtcagcagtctagcgcgcaaccgcctccccaatccaggtcctgaccgttctttcatctgtgaggaagagggccaccatcctccaggtctctgtgaaggtagatccactgacaactttcactctgtgtctggaaaagatgcagacactcaaccccagctcatgagagcagctgtgggggctaaatcctgcaaagccacaagggcagagctttccagggccttgggagctcactccttcacaccagtgtgccctggatacaaaggccataaataccttgtattcgaagccaacacgggaacagaaaacggataccaaggcgaagaatctttatttaacaaagcgtactacggcggcggcacgaacttcttccgtaaagaaagccagaagcttcagcagagcgctaaaaaacgcgatgctgagttagcgaacggcgccctcggtatcatagagttaaataatgattacacattgaaaaaagtaatgaagccgctgatcacttcaaacacggtaactgatgaaatcgagcgcgcgaatgttttcaaaatgaacggcaaatggtacttgttcactgattcacgcggttcaaaaatgacgatcgatggtattaactcaaacgatatttacatgcttggttatgtatcaaactctttaaccggcccttacaagccgctgaacaaaacagggcttgtgctgcaaatgggtcttgatccaaacgatgtgacattcacttactctcacttcgcagtgccgcaaccaaaggcaacaatgtggttatcacaagctacatga

SEQ ID NO: 13222 - DNA, 1050 bp, Homo sapiens
  SIMILAR (874)..(1041): 921254mologous to Mus musculus WW domain binding protein 11,accession number AF071186,Smith-Waterman Score=269.
atgaatcggcaactaagtgactcctatacagaagacaccaaagagccatcagatgtcaccacatctgagagaaccagaagtcctccaggttctgccaaaaccactatgatagacaccttgaaaaaactgcaggatgtactaaaaactgaggactccaaaaatcccacaaagtcagcagcagatttgttggaacaatatgtcaaggctacgggaccaatcatagagatcctccaaaaagcgacaaagactatggaaatgatcatgattgtggaggagaaagccagtgacgaactccaacctgacccggagctccagcagcgatacatccacagtgtccgtgggaagcccgggctggtgaagcagcggacacaggagattgagacccggctccggctggcgggcctcaccgtctcttccccactgaagcgctcacactctcttgccaagctggggagtctcaccttctcaacggaagacctgtccagccgtccccctggacctcccccaggtccacctccaggtctgcatcctggtccccctcctcgtagacccccaccaaagctacctccccctgcacctccaggttgttctgtccattgctgtcattatccgctccacttcgtcgtgtcaccgctcgaaggtttctattgttccttgatgcgtattcaaatcgttttcgttaccgctttcgtgcatcatgacagtgcactgcttcctcttgacgcttcactggctcctgaggctttgcagaactttcagcggtataccggcatacagcatgtgcatcgcataggaatggcggaacgtatgtggtgtgaccggaacagagaacgtcacaccgtcagcagcagcggcggcaaccgcctccccaatccagctcccttgccaaaccctggggttttaagtgccccacccaacttgattcagcgacccaaggcggatgatacaagtgcagccaccattgagaagaaagccacagcaaccatcagtgccaagccacagatcactaatcccaaggcagagattactcgattttgcccactgcactga

SEQ ID NO: 13223 - DNA, 1185 bp, Homo sapiens
  SIMILAR (1)..(561): 961254mologous to Cloning vector pZC320 SopA,accession number U26464,Smith-Waterman Score=947.
atggaaattcgaggacgggttgagcaacgtgttggttatacaattgaacaaattaatcatatgcgtgatgtgtttggtacgcgattgcgacgtgctgaagacgtatttccaccggtgatcggggttgctgcccataaaggtggcgtttacaaaacctcagtttctgttcatcttgctcaggatctggctctgaaggggctacgtgttttgctcgtggaaggtaacgacccccagggaacagcctcaatgtatcacggatgggtaccagatcttcatattcatgcagaagacactctcctgcctttctatcttggggaaaaggacgatgtcacttatgcaataaagcccacttgctggccggggcttgacattattccttcctgtctggctctgcaccgtattgaaactgagttaatgggcaaatttgatgaaggtaaactgcccaccgatccacacctgatgctccgactggccattgaaactgttgctcatgactatgatgtcatagttattgacagcgcgcctaacacgcgcacaggcacgaaaaaagcccaatgtgctacccaaagagcggataagaaccacacccgccgaaggaacaagactacaccgcccggccggacagttagaacccatggcaaagaagttaaaaacctcgaaggaaaattagacgactggctaataaaaataaccaattcagagaagtccttaaaggacctaatggagctgaaaaccaaggcacgagaactatgtgatgaatgtacaagcctcagtagccaattcgatcaactggaagaaaggcccagcctaggggagctggacaaggtatttattcgcgataagctcatggagcggcgtaaccgtcgcacaggaaggacagagaaagcgcggatctgggaagtgacggacagaacggtcaggacctggattggggaggcggttgccgccgctgctgctgacggtgtgacgttctctgttccggtcacaccacatacgttccgccattcctatgcgatgcacatgcttgatgccggtataccgctgaaagttctgcaaagcctgatgggacataagtccatcagttcaacggaagtctaccacaaggtttttgccttggaatgtggctgcccagcaccgggtgccaatttgccattgccggaatccgaattccgatgccaagcctaa

SEQ ID NO: 13224 - DNA, 1653 bp, Homo sapiens
  SIMILAR (603)..(4): 991254mologous to synthetic construct chloramphenicol acetyltransferase,accession number A02739,Smith-Waterman Score= 1099.
ttacgccccgccctgccactcatcgcagtactgttgtaattcattaagcattctgccgacatggaagccatcacaaacggcatgatgaacctgaatcgccagcggcatcagcaccttgtcgccttgcgtataatatttgcccatggtgaaaacgggggcgaagaagttgtccatattggccacgtttaaatcaaaactggtgaaactcacccagggattggctgagacgaaaaacatattctcaataaaccctttagggaaataggccaggttttcaccgtaacacgccacatcttgcgaatatatgtgtagaaactgccggaaatcgtcgtggtattcactccagagcgatgaaaacgtttcagtttgctcatggaaaacggtgtaacaagggtgaacactatcccatatcaccagctcaccgtctttcattgccatacggaactccggatgagcattcatcaggcgggcaagaatgtgaataaaggccggataaaacttgtgcttatttttctttacggtctttaaaaaggccgtaatatccagctgaacggtctggttataggtacattgagcaactgtctgaaatgcctcaaaatgttctggattggggaggcggttgccgccgctgctgctgacggtgtgacgttctctgttccggtcacaccacatacgttccgccattcctatgcgatgcacatgctgtatgccggtataccgctgaaagttctgcaaagctctgatggtagtttctttggctgtgcagaagctctttagtttaattagatcccatttgtcaattttggcttttgttgccattgcttttggtgttttggacatgaagtccttgcccacgcctatgtcctgaatggtaatgcctaggttttcttctagggtttttatggttttaggtctaacgtttaaatctttaatccatcttgaattgatttttgtataaggtgtaaggaagggatccagtttcagctttctacatatggctagccagttttcccagcaccatttattaaatagggaatcctttccccattgcttgtttttctcaggtttgtcaaagatcagatagttgtagatatgcggcattatttctgagggctctgttctgttccattgatctatatctctgttttggtaccagtaccatgctgttttggttactgtagccttgtagtatagtttgaagtcaggtagtgtgatgcctccagctttgttcttttggcttaggattgacttggcgatgcaggctcttttttggttccatatgaactttaaagtagttttttcccattcctcggcaccaggctccctcctccagtaggccacaaggaactcaaactggggccccaggtcctccagctcaataaccaggtggaagccatctttggtgatctccatcccaggtcgggtaaggatggctgttggcaagacaacaggagagtcaaagccagccccagacagggttgatttcccccgtgagggggcatattttgggcccacacccaccccttccaaggagaaaattttcctgggactgatgtagttcaccaaatttacatcccctccagcaatgtacaaatgtttgcttttctctgcatcctcatcaacctttttattgttctttttgataaaagccat

SEQ ID NO: 13225 - DNA, 1089 bp, Homo sapiens
  SIMILAR (316)..(654): 901254mologous to Cloning vector pSacBII SacB,accession number U09128,Smith-Waterman Score=532.
atgcttcaaagcaaccgaaccgccgccagccattcaccatccatccagccagccatccagccagccatccagccagccaaccaactatccatccacaatttgtggacacaattccggcattcaaccaaaattccagttgaatgggtgaatggtgaatggctgaatggacgaatgccaggggatcatcatgaatggcaatgcaactatcaggctttgcagaactttcagcggtataccggcatacagcatgtgcatcgcataggaatggcggaacgtatgtggtgtgaccggaacagagaacgtcacaccgtcagcagcagcggcggcaaccgcctccccaatccagacaaaggccataaatacctggtattcgaagccaacacgggaacagaaaacggataccaaggcgaagaatctttatttaacaaagcgtactacggcggcggcacgaacttcttccgtaaagaaagccagaagcttcagcagagcgctaaaaaacgcgatgctgagttagcgaacggcgccctcggtatcatagagttaaataatgattacacattgaaaaaagtaatgaagccgctgatcacttcaaacacggtaactgatgaaatcgagcgcgcgaatgttttcaaaatgaacggcaaatggtctctcatgaaaatctacagctttttcatcaagaatgaaggctcagcagtgttgagacatgtggacccacaccagttagtaatcgccgtgggagagaaagttcctggctgccgggtcagcgtggtccattcaaggagtacggtagagacctccatgtctccacagccctccctcttcagaagaaggactggtgtcttgtggcctagagcctcatcttggatggtgggtataagtgcggagccgcatcctcagtgcgtccccacggtgatcagtagggatgtcgggtctgggggatatgatcgagatttcgacagcgtctgtgttaatgagatcaacagcagaactccaatgcgcctctcatacattgagaaaaagaaaggccgccagacgactcatatcgtattttccttccgcgatatcacttccatgacgacaggatag

SEQ ID NO: 13226 - DNA, 1695 bp, Homo sapiens
  SIMILAR (309)..(55): 981254mologous to Cloning vector pZC320 SopA,accession number U26464,Smith-Waterman Score=436.
tcacattgtgaagttggacaaataaaacatcttttcagtttttgttccctttattacaacattttttagaaccatgcttccccaggcatcccgaatttgctcctccatccacggggactgagagccattactattgctgtatttggtaagcaaaatacgtacatcaggctcgaaccctttaagatcaacgttcttgagcagatcacgaagcatatcgaaaaactgcagtgcggaggtgtagtcaaacaactcagcaggcgtgggaacaatcagcacatcagcagcacatacgacattaatcgtgcccaatacccaggttaggcgcgctgcaggaccaacaccatgtggaagctgccaaggcttggagcttgcatcctctgaagcaatggcccaagctgtcccttggccccttttagtcatagctggagtggctggggtgtagggcaccaagtcctccatgcaagggggccccaatgtatacatctccacgccttcattggctggggctctagttttatttctaggaccgcctttggtggatgttacccttcttgtgctatctggcgattttggactgagatttatggtagaagtaatcgttggctgtttcttttccaaagtgcatgaagcgttttcttttggcagtgggggctcagaaatatttaccactcgtttcttctggtggcccaggtcgtaagagacggctcttgaggggtagagagtaatttggtggttgtggttgcgctctgccacaggcttatttatttggtttgggggacaagaacggtcaggacctggattggggaggcggttgccgccgctgctgctgacggtgtgacgttctctgttgcggtcacaccacatacgttccgccattcctatgcgatgcacatgctgtatgccggtataccgctgaaagttctgcaaagcgagggtggttgcgctggatgtggctgcccggcaccgggtgcagtttgcgatgccggagtctgatgcggttgcgatgctgaaacaattatcctgagaataaatgccttggcctttatatggaaatgtggaactgagtggatatgctgtttttgtagggcattgaaagcgtagggtctggttgcttcttgggttgcctctgaccccagtagcttccagggcaggatggcttgatctgcctgaactctgctgtggctctggctgtgaggcccatatgctctgcattttgttgttcaaacccaggactttcctagttgatggtcctcggagccccttatctggagggtcaggattctcagctactgtcctgtgcatctctggggtatgaaggactttctggagtttctttcccaaaacatctctcctctctgcttgtggctgttgagttacattctttcctggttcctctctcctcccagcttctttagcagttttggctaaggatttttcttcctcctctaggctcacagatgtctcttccatgcccttccttgatggagcgttacaaaaatctttgaccatttctggcaaaatagacaaaacatctctcctctctgcttctggctgttgagttacattctttcctggttcctctctcctcccagcttctttagcagttttggctaaggatttttcttcctcctctaggctcacagatgtctcttccatgcccttccttgatggagcgttacaaaaatctttgaccat

SEQ ID NO: 13227 - DNA, 1172 bp, Homo sapiens
  SIMILAR (615)..(4): 951254mologous to unidentified cloning vector chloramphenicol acetyltransferase,accession number U13846,Smith-Waterman Score= 1044.
ttactgttgtaattcattaagcattctgccgacatggaagccatcacaaacggcatgatgaacctgaatcgccagcggcatcagcaccttgtcgccttgcgtataatatttgcccatggtgaaaacgggggcgaagaagttgtccatattggccacgtttaaatcaaaactggtgaaactcacccagggattggctgagacgaaaaacatattctcaataaaccctttagggaaataggccaggttttcaccgtaacacgccacatcttgcgaatatatgtgtagaaactgccggaaatcgtcgtggtattcactccagagcgatgaaaacgtttcagtttgctcatggaaaacggtgtaacaagggtgaacactatcccatatcaccagctcaccgtctttcattgccatacggaactccggatgagcattcatcaggcgggcaagaatgtgaataaaggccggataaaacttgtgcttatttttctttacggtctttaaaaaggccgtaatatccagctgaacggtctggttataggtacattgagcaactgactgaaatgcctcaaaatgttctggattggggaggcggttgccgccgctgctgctgacggtgtgacgttctctgttccggtcacaccacatacgttccgccattcctatgcgatgcacatgctgtatgccggtataccgctgaaagttctgcaaagccttgctgaagaccacatgcttgccatccaaccactcagtcttggcagcacagatgaaaaactgggaactgtttgcgttgggtccagcatttgccatggacaagatgccagaaactgtatgcttccggatgaagttcttgtcatcaaatttctccctgtagatggacttgccaccagtgccatcatggcatgtgaagtctcccaccctaattcctgttggtgtagatgcttcataggggaacatttccttaagaatatccctttctactcttctttcctctgttttttctcccacctcatgaataacttgattaatggggtaggtgattaaaatttcaatagaatcaactgagacaaaaattttaaactgactcatttgaatttcaactttacagtcattgaccataaagcccactacaaatgtaacgttattcttcacatcatctcgaataaaaatcctta

SEQ ID NO: 13228 - DNA, 987 bp, Homo sapiens
  SIMILAR (658)..(984): 991254mologous to unidentified cloning vector 29kD protein essential for the replication of mini F plasmid,accession number AB015619,Smith-Waterman Score=568.
atggtggccttttacctctctactcacatcaggagggcccagatccacgcaaccacgtgtatgcctactacattcctgcaccaaaccatccagggagttcccagaggcttttcatacctggcagtgctgaccgtggccatccagacctgtttagagatgcagctttctccagcatccacccgctgctcctggtttggctgctggaggccatcaagaacaaatctaatcccttctgacagtcgtattgagagacaagacacctacccattccccagtcattctcttcagcccatgctcaacgccttcagattcttcagagtctctgaaaatgtgataatgaggctactggtatttattcgcgataagctcatggagcggcgtaaccgtcgcacaggaaggacagagaaagcgcggatctgggaagtgacggacagaacggtcaggacctggattggggaggcggttgccgccgctgctgctgacggtgtgacgttctctgttccggtcacaccacatacgttccgccattcctatgcgatgcacatgctgtatgccggtataccgctgaaagttctgcaaagcctgatgggacataagtccatcagttcaacggaagtctacacgaaggtttttgcgctggatgtggctgcccggcaccggaaccggtttacgcagtttcggcttagtgaaacaaaagaaatcaccaatccgtatgccatgcgtttatacgaatccctgtgtcagtatcgtaagccggatggctcaggcatcgtctctctgaaaatcgactggatcatagagcgttaccagctgcctcaaagttaccagcgtatgcctgacttccgccgccgcttcctgcaggtctgtgttaatgagatcaacagcagaactccaatgcgcctctcatacattgagaaaaagaaaggccgccagacgactcatatcgtattttccttccgcgatatcacttccatgacgacaggatag

SEQ ID NO: 13229 - DNA, 580 bp, Homo sapiens
  SIMILAR (280)..(2): 971254mologous to unidentified cloning vector 29kD protein essential for the replication of mini F plasmid,accession number AB015619,Smith-Waterman Score=487.
gatactgacacagggattcgtataaacgcatggcatacggattggtgatttcttttgtttcactaagccgaaactgcgtaaaccggttctgtaacccgataaagaaaggaatgagatatgggttgatatgtacactgtaaagccctctggatggactgtgcgcacgtttgataaaccaagggaaagattcatagcctttttcatcgccggcatcctcttcagggcgataaaaaaccactttcttccccgcgaaactcttcaatgcctgccctatatccttacctggattggggaggcggttgccgccgctgctgctgacggtgtgacgttctctgttccggtcacaccacatacggtccgccattcctatgcgatgcacatgctgtatgccggtataccgctgaaagttctgcaaagcctcttcttttaagttctctaataatgggcagactttggaagccttaaccaatacccgaacttgggtaagggtaaataaaactttcccaagagtgcttcccttgttgctggggctgtcttccttggccgggcctgggttccttgtggttcggggaagaaccat

SEQ ID NO: 13230 - DNA, 426 bp, Homo sapiens
  SIMILAR (261)..(199): 1001254mologous to Plasmid F Protein D,accession number M12987,Smith-Waterman Score=110.
atggcgtccgagcggggtcgacatttcttgcggaaggaagcatctaatgggaccacgccgaagtatctttcgattcccaagaatatatgccggaaagatgatgtcagcgagagccaatgtaatggcgcggacgtcgcggctagtccaggagtcgtccgctttgattttttctccggctttgagccgctcccatcgttcgctttgcagaactttcagcggtataccggcatacagcatgtgcatcgcataggaatggcggaacggttatctccatggcgccatgccacctttttgtctcccgtgggcgggtttcacacggcggaccggtccttcatccgccgcggtgttgaaggcggtaataaaaacccccataagcggatccgtaggaccccggacccgaaaggaaccaggacgccagatcactaa

SEQ ID NO: 13231 - DNA, 1749 bp, Homo sapiens; identical to SEQ ID NO: 10646
  SIMILAR (157)..(633): 421254mologous to Homo sapiens ribosomal protein L9,accession number U09953,Smith-Waterman Score=147.

SEQ ID NO: 13232 - DNA, 1923 bp, Homo sapiens
  SIMILAR (1)..(384): 881254mologous to Homo sapiens nucleophosmin,accession number M23613,Smith-Waterman Score=571.
  misc_feature (1)...(1923): n = a,t,c or g
atgaaactcatggaaacacttaaccagtgcataaacgctggtcatgaaatgacgaaggctatcgccattgcacagtttaatgatgacagcccggaagcgaggaaaataacccggcgctggagaataggtgaagcagcggatttagttggggtttcttctcaggctatcagagatgccgagaaagcagggcgactaccgcacccggatatggaaattcgaggacgggttgagcaacgtgttggttatacaattgaacaaattaatcatatgcgtgatgtgtttggtacgcgattgcgacgtgctgaagacgtatttccaccggtgatcggggttgctgcccataaaggtggcgtttacaaaacctcagtttctgttcatcttgctcaggatctggctctgaaggggctacgtgttttgctcgtggaaggtaacgacccccagggaacagcctcaatgtatcacggatgggtaccagatcttcatattcatgcagaagacactctcctgcctttctatcttggggaaaaggacgatgtcacttatgcaataaagcccacttgctggccggggcttgacattattccttcctgtctggctctgcaccgtattgaaactgagttaatgggcaaatttgatgaaggtaaactgcccaccgatccacacctgatgctccgactggccattgaaactgttgctcatgactatgatgtcatagttattgacagcgcgcctaacctgggtatcggcacgattaatgtcgtatgtgctgctgatgtgctgattgttcccacgcctgctgagttgtttgactacacctccgcactgcagtttttcgatatgcttcgtgatctgctcaagaacgttgatcttaaagggttcgagcctgatctctccagcttcgctaagcaggccctgtcccaggcccagaagtctattgacagggttctggacatccaggaagaggagccgagcatctgggccgagaccattccgtatggagagccgggtatttattcgcgatttttcatggagcggcgtaaccgtcgcacaggaaggacagagaaagcgcggatctgggaagtgacggacagaacggtcaggacctggattggggaggcggttgccgccgctgctgctgacggtgtgacgttctctgttccggtcacaccacatacgttccgccattcctatgcgatgcacatgctgtatgccggtataccgctgaaagttctgcaaagcctgatgggacataagtccatcagttcaacggaagtctacacgaaggtttttgcgctggatgtggctgcccggcaccggtgtgacaatctaaaaacttgtcacacttcacatggatctgtcatggcggaaacagcggttatcaatcacaaaaaaagtaaaaatagcccgcgaatcgtccagtcaaacgacctcactgaggcggcatatagtctctcccgggatcaaaaacgtatgctgtatctgttcgttgaccagatcagaaaatctgatggcaccctacaggaacatgacggtatctgcgagatccatgttgctaaatatgctgaaatattcggattgacctctgcggaagccanaatatgccaagagggagccctgagcagtgctccagaacagggatcggcatgggcagaagctcagaggggtgagcgaacaggagtcagtggggtgggggctttgcagaactttcagcggtgtaccggcatacagcatgtgcatcgcataggaatggcggaacgtatgtggtgtgaccggaacagagaacgtcacaccgtcagcagcagcggcggcaaccgcctccccaatgggtaccgagctcgaattcgtaatcatggtcatagctgtttcctgtgtgaaattgttatccgctcacaattccacacaacatacgagccggaagcataa

SEQ ID NO: 13233 - DNA, 2536 bp, Homo sapiens
  SIMILAR (241)..(741): 881254mologous to Homo sapiens nucleophosmin,accession number M23613,Smith-Waterman Score=715.
atggggatgacagtacctgctctacttctcgggattgtcatgaggttcaaactaagcgacagagcctatgtgactgtgctggctgttaagctattgtttctcagcactaatccacctctgctctgggatgctggagctgggactctgcaaaccacgctccccctgccagctgctccttgttacgattgccaaaagcggggaatggtcacagggcacgtcccaggacaagcagaggcaagcaagcagggcacctgggacgcagcacgtcaggaggcactgactctctgtgtggaccctgcagttgcccaaccacatggaaatgctaaactctgtccttttaccatctccaatttacggacacagaccctgattagtgatgaaggcttgatgaggttaactgccttgcccaaggttacacatgatgaagcacaggttatcattagtgttagtgtattttatgtgtggcccaagacaattcttcttccaatgtggctcagggaagccaaaagattgaacaccgctgccctaggctttcacattcactcaccactcactgactcacccagagcaacttccagtcctgcaagctccattcatggctgccccagccacctgaaaagcatgccaggacctgaaatagcagccatactcgttggtctgcaaaatgcttttttctgccagtttgatatttttgtcactgtggatcctcatgttctgtatttaaaatatgaagacacttattcaggtataatcaatgcaccaagcaggctatgttctccaggtgggggccctggacagcagcagcagcatcctccggaacttattagaaatgttcctgctcccgccaatcccagacctattgaatccaaaactctaagggtggggcccagccatctgctttttaacaaggcctccaggtgtacagccaaatttgagaaccactgtgccactacacagggcattggaccagatgtcaaatgcagttggcccagggcttcccggtatcaacagggacaccaggatttatttattctgcgaagtgatcttccgtcacaggtatttattcgcgataagctcatggagcggcgtaaccgtcgcacaggaaggacagagaaagcgcggatctgggaagtgacggacagaacggtcaggacctggattggggaggcggttgccgccgctgctgctgacggtgtgacgttctctgttccggtcacaccacatacgttccgccattcctatgcgatgcacatgctgtatgccggtataccgctgaaagttctgcaaagcctgatgggacataagtccatcagttcaacggaagtctacacgaaggtttttgcgctggatgtggctgcccggcaccgggtgcagtttgcgatgccggagtctgatgcggttgcgatgctgaaacaattggcggagagcatcccgggggacagctcttcaatgcccatgtgcactaggcagagagcatcctgggcgcagctcttcaatgcacgtgtgcaccaggatcacctggagagtggagcaaagctcaagctcccggaccaccttagaactcgcatgggatggagtgccccatgggaacgactccctgtatgggaacggctcctgcatggaatggacccccccgccatggttcagggcctccctgaagcagcactctgccttctcctctggcagcatcctggctcctacacggagcaggtatttattcgcgataagctcatggagcggcgtaaccgtcgcacaggaaggacagagaaagcgcgggtgtgggaagtgacggacagaacggtcaggacctggattggggaggcggttgccgccgctgctgctgacggtgtgacgttctctgttccggtcacaccacatacgttccgccattcctatgcgatgcacatgctgtatgccggtataccgctgaaagttctgcaaagcctgatgggacataagtccatcagttcaacggaagtctacacgaaggtttttgcgctggatgtggctgcccggcaccgggagcacgccaagatgtcccttgtgactgtccccttctaccagaagagacataggcacttcgaccagtcctaccgtaatattcaaacacggtacctgctggacgaatatgcgtcaaaaaagagggcaggcgagacggtcactctcaagtgcaccatgctggtgacgccggacctgaagcgggtgcagccgcgcgccgagtggtaccgcgatggggccgggaatgcacagattcatcttgtcaatggacagcctcccgtgatcctggtgcacacgtgcattgaagagctgcgcccaggatgctctctggctaatgcacatggggtaccgagcctcgaatcccgaatcatgggcataggctggttccctggggggaaaaatggtatccgggtggacggcttgacggaaggctcactctacgagttcaaaatcgccgccgtcaacctggccggcatcggggagccctcagatcccagtgagcacttcaagtgtgaggcctggaccatgccggagcccg

SEQ ID NO: 13234 - DNA, 1310 bp, Homo sapiens
  SIMILAR (1)..(357): 891254mologous to Homo sapiens pot. ORF I,accession number X03145,Smith-Waterman Score=563.
atgggggactttaacaccccactgtcaacattagacagattaatgagacagaaagttaacaaggatatccaggaattgaactcagctctgcaccaagcagatctaacagacatctacagaactcttcaccccaaatcaacagaatatacattcttctcagcaacacaccgcacttattccaaaactgaccacatagttggaagtaaagcactcctcagcaaatgtaaaagaacagaaattatgacaaactgtatctcagaccacagtgcaatcaaactagaactcaggattaagaaactcactcaaaaccgctcaactacatggaaactgaacaacctgctcctgaatgactactggggttcacacccaaagtccccccccacgggaccctgttccaaaaggcccgaaaaaaaagggcggggacgaaagcaaggtaagcaaaatctgaaagcgggctacccgggaaagcgtcagttccaaaccaggaaccccccccagaacggacagaagaacaaacacattaacccgattttaaaaattaaaaatccaaaagcatgtttccccaggattcaacctacagcagacagaaattttttttcctctgaactttttactggcatcctgctccacaaagggtaccctgctcctgctgacttaatgtctcagaactttgatgtcgttggtctcagacaccactttaccattcactatctggcaggtggtggtcttttggattgtttgcatggagttgctgctgtccagggcatcaccaagattgaagtcctcgccatcttccagtgggcagcggtagctggtgatctcagcctccagcttgagcttgatgttcagcagggcctcttactcctgggcctgacgctgtctctgaaggccagagaaagcgcgttctggggagtgacggacagaacggtcaggacttggattgggagggcggttgccgccgctgctgctgacggtgtgacgttctctgttccggtcccaccacatacgttccgccattcctatgcgatgcacatgctgtatgccggtataccgctgaaagttctgcaaagcctgatgggacataagtccatcagttcaacggaagtctacacgaaggtttttgcgctggatgtggctgcccggcaccgggtgcagtttgcgatgccggagtctgatgcggttgcgatgctgaaacaattatcctgagaataaatgccttggcctttatatggaaatgtggaactgagtggatatgctgtttttgtctgttaaacagagaagctggctgttatccactgagaagcgaacag

SEQ ID NO: 13235 - DNA, 873 bp, Homo sapiens
  SIMILAR (319)..(888): 721254mologous to Homo sapiens dJ408N23.1 (suppression of tumorigenicity 13 (colon carcinoma) (Hsp70-interacting protein) (Progesterone receptor associated P48 protein)),accession number Z98048,Smith-Waterman Score=708.
ttagttgactgtcagctgtccttgctccaggatgctgtttttgacaacggatgttttattgcctttgatgttcattaagaagcttggcgcaaatgttgcctttttatcctcgaagaagcctctgtttgtcatgtagcttgtgataaccacattgttgcctttggcttgcggcactggattggggaggcggttgccgccgctgctgctgacggtgtgacgttctctgttccggtcacaccacatacgttccgccattcctatgcgatgcacatgctgtatgccggtataccgctgaaagttctgcaaagcatgttcacccagagacaccataaatattggttggtgcttgtgtaagtccgttttcacactgctataaagaacttcccggtgcagcacaccagcatggcacatgtatacatatgtaactaacctgcacattgtgcacatgtaccccagccgtctgctctcaataccacactcatctggtgcgcttccaaagtgaaacgccttgacgttggtcagcctgtgaccggctccttgctgccgacgctgggttacataaggtcctgggagacccgagcggcgccccggacgcgtctgggaggagccgccacgccacagctccgtggggctccgcactctaccctggccacagacaaaaagaacttctgctgcatcaccccgtggcgccaggatcacttccctcttgagagacagtgtgtgcacatcgtagacgctagagccagcccctgcaggaactccgtttgaaaattcttcaaggagaaataaccgaaactctgagattcctcttgccgcagacagacagacagacagccacacacgaacgcacacacgctttctcctcgctcccat

SEQ ID NO: 13236 - DNA, 2431 bp, Homo sapiens
  SIMILAR (1)..(1017): 1001254mologous to Leishmania major probable levansucrase precursor,accession number AL160371,Smith-Waterman Score=1789.
atgaacatgaacatcaaaaaaattgtaaaacaagccacagttctgacttttacgactgcacttctggcaggaggagcgactcaagccttcgcgaaagaaaataaccaaaaagcatacaaagaaacgtacggcgtctctcatattacacgccatgatatgctgcagatccctaaacagcagcaaaacgaaaaataccaagtgcctcaattcgatcaatcaacgattaaaaatattgagtctgcaaaaggacttgatgtgtgggacagctggccgctgcaaaacgctgacggaacagtagctgaatacaacggctatcacgttgtgtttgctcttgcgggaagcccgaaagacgctgatgacacatcaatctacatgttttatcaaaaggtcggcgacaactcaatcgacagctggaaaaacgcgggccgtgtctttaaagacagcgataagttcgacgccaacgatccgatcctgaaagatcagacgcaagaatggtccggttctgcaacctttacatctgacggaaaaatccgtttattctacactgactattccggtaaacattacggcaaacaaagcctgacaacagcgcaggtaaatgtgtcaaaatctgatgacacactcaaaatcaacggagtggaagatcacaaaacgatttttgacggagacggaaaaacatatcagaacgttcagcagtttatcgatgaaggcaattatacatccggcgacaaccatacgctgagagaccctcactacgttgaagacaaaggccataaataccttgtattcgaagccaacacgggaacagaaaacggataccaaggcgaagaatctttatttaacaaagcgtactacggcggcggcacgaacttcttccgtaaagaaagccagaagcttcagcagagcgctaaaaaacgcgatgctgagttagcgaacggcgccctcggtatcatagagttaaataatgattacacattgaaaaaagtaatgaagccgctgatcacttcaaacacggtatttattcgcgataagctcatggagcggcgtaaccgtcgcacaggaaggacagagaaagcgcggatctgggaagtgacggacagaacggtcaggacctggattggggaggcggttgccgccgctgctgctgacggtgtgacgttctctgttccggtcacaccacatacgttccgccattcctatgcgatgcacatgctgtatgccggtataccgctgaaagttctgcaaagcctgatgggacataagtccatcagttcaacggaagtctacacgaaggtttttgcgctggatgtggctgcccggcaccggtgtgacaatctaaaaacttgtcacacttcacatggatctgtcatggcggaaacagcggttatcaatcacaagaaacgtaaaaatagcccgcgaatcgtccagtcaaacgacctcactgaggcggcatatagtctctcccgggatcaaaaacgtatgctgtatctgttcgttgaccagatcagaaaatctgatggcaccctacaggaacatgacggtatctgcgagatccatgttgctaaatatgctgaaatattcggattgacctctgcggaagccaatcgtaagccggatggctcaagcatcgtctctctgaaaatgactgatcataaacgttccagctgcctaagataccagcgttgccgacttccggcgccgttctgcagaagagacgctcccaggatttggtttccagtgggagaaggaaggcgccgcaaataccatcggctgcgaggcgactgtggtggtcgaaggaacgtgatcctttgtcagctcagcggagccgaagtgatcgccgagttggctgagcagcgccgagggagtttagaatccgctgcagaaaacctaccagcttcttcgcggacacagcagctgaagccctccggatcgacacaacacaacttccgggatcgacgcaacacaacttcccgccagccccttcccttcagcgggctggacacagcccatggcggtgagaagatatcgagtgtcagcaacctggtctggacctggattggggaggcggttgccgccgctgctgctgacggtgtgacgttctctgttccggtcacaccacatacgttccgccattcctatgcgatgcacatgctgtatgccggtataccgctgaaagttctgcaaagcctgatgggacataagtccatcagttcaacggaagtctacacgaaggtttttgcgctggatgtggctgcccggcaccgggtgcagtttgcgatgccggagtctgatgcggttgcgatgctgaaacaattatcctgagaataaatgccttggcctttatatggaaatgtggaactgagtggatatgctggttttgtctgttaacaaagaaactggctggtattcactgagaaacgaacgaaacagg

SEQ ID NO: 13237 - DNA, 1281 bp, Homo sapiens
  SIMILAR (95)..(1201): 1001254mologous to Homo sapiens dJ408N23.1 (suppression of tumorigenicity 13 (colon carcinoma) (Hsp70-interacting protein) (Progesterone receptor associated P48 protein)),accession number Z98048,Smith-Waterman Score=1914.
ttatctaatctcccagcgtggtttaatcagacgatcgaaaatttcattgcagacaggttcccaaatagaaagagcatttctccaggcaccagttgaagagcgttgatcaatggcctgttcaaaaacagttctcatccggatctgacctttaccaacttcatccgtttcacgtacaacattttttagaaccatgcttccccaggcatcccgaatttgctcctccatccacggggactgagagccattactattgctgtatttggtaagcaaaatacgtacatcaggctcgaaccctttaagatcaacgttcttgagcagatcacgaagcatatcgaaaaactgcagtgcggaggtgtagtcaaacaactcagcaggcgtgggaacaatcagcacatcagcagcacatacgacattaatcgtgccgatacccaggttaggcgcgctgtcaataactatgacatcatagtcatgagcaacagtttcaatggccagtcggagcatcaggtgtggatcggggggcagtttacctggattggggaggcggttgccgccgctgctgctgacggtgtgacgttctctgttccggtcacaccacatacgttccgccattcctatgcgatgcacatgctgtatgccggtataccgctgaaagttctgcaaagcctgagcttcttcttgttgctttttcaactgttcgagcatctgctgaaattcagcttccttctgttcagcctcttccaatgtggcctgattctgttcctcataggccatggccaccacagccaagatcaaatttattagatagaatgagcccaagaaaatgaccagcacaaaaaatatcatgtacgttttcccagcagcacgtagtgtctcctcttgtttgcgtttcaacgtggtcgtaatgggctcataagagactttggaggggtttgatgccatgaatcgctcttccatctgtattcgaagggcatccatctctccactctcacccaaaacacgctttgtaaaagcaaataagatgtcaagacagtggatccggtcaccactcaccatgggcagatccatggcaatgagctggactttgttgggttttgctatgagaagaggaggatccagggcatctgcaaaatcagaaagtttggcaaactctataaactgggtcgcatcgggatcaaacttctcccaaacctcatagaacatctcaaagtcatcctcactcagaggctctgcactttcttcagtagcaacactgaagttctccaggatgaccgcgatgtacat

SEQ ID NO: 13238 - DNA, 3756 bp, Homo sapiens
  SIMILAR (30)..(194): 441254mologous to Pinctada fucata insoluble protein,accession number D86074,Smith-Waterman Score=86.
  misc_feature (1)...(3756): n = a,t,c or g
atgctggatggcccactgttctccgaggggcctgacagcccccgggagctccaggatgaggagtctggcagctgcctctgggtgcagaagtccaagctattggtgatagaagtgaagactatttcctgtcattatagtcgccgcgccccttctcgacagcccatggacttccaggccagccactgggctcgcgggttccagaaccgcacgtgtgggccgcgcccgggatccccacagccgccgccccgccggccctgggcctccagggtgctgcaggaggcgaccaactggcgggcggggcccctggccgaggtccgagctcgggagcaagagaaaaggaaagcggcgtcgcaggagcgggaggccaaggagaccgagcgaaaaaggcgcaaggctggtggggcccgacggagccccccgggtcgaccccgcccggagccccgcaacgcccctcgggtggcccagctggcagggctccctgctcccttgcggccggagcgcctggcgcctgtggggcgagcgccccgtccatccgcgcagccgcagagcgacccagggtcggcgtgggcggggccctggggaggtcggcggcccgggcccccaagctacgaggctcacctgctgctgagaggttctgccgggaccgccccacgacgccgctgggaccggccgccaccctacgtggctccaccttcttacgaaggcccccataggaccttggggactaagagaggccccgggaactctcaggtgcccacttcatcagccccagctgcgactccagccaggacagacggagggcgcacaaagaagaggctggatcctcggatctaccgggacgtcctcggggcttggggtctccgacaggggcaaggtctcttggggggatccccaggctgtggagcggccagagcaaggccagagcccggcaagggggtcgtggagaaaagcctggggctggctgctgctgacctgaacagtggtagcgacagccatccccaagccaaagctacagggagcgcaggcaccgagatagctcctgcggggtctgcaactgcggctccctgtgccccgcatcccgctcccagatccaggcaccacctcaagggctcgagggaagggaaagaaggagaacagatctggtttcccaaatgctggattccctcccctaaaaagcagccgccccgccatagccagacactccccagaccctgggctcccggaggcaccggatggagagaatctctgggtcttggagagggggcaggaccggagaccctggagggttggaaggcgacccgccgtgcccacaccttgccccgcagttcccagggcctgtcccgtggggaaggcgtctttgtcattgacgccacgtgcgtagtgatacgatcccaatatgttccaaccccccgaacccagcaggtgcagcttttgccctctggggtgacacgcgtggtgggggattcccccagccaatcgaagcccggcaaggaggagggtgaaggggccacggtctttccttccccttgtcaaaagcggctgtcgagcagtcgccttttacaccagcccggcgggggccgcgggggcgaagctgagggcgggaggccgggggactccacactggaggagcgcactttccgcatcttggggctcccggcccccgaagtaaacctgcgggacgcccccacgcagccaggtagcccagagcaccaagccttaggcccagcagcttcgggagcccagggcagagccgaggggtcggaagtggcggtggtccagcggcgcgccggccggggctgggcgcggaccccagggccctacgccggggccctgcgagaagccgtgtcccgtatccgccgccacacagcccctgactcggacacggacgaagctgaggagctcagcgtccatagcggctcctctgatggaagcgacacagaagccccgggcgcctcctggcggaatgagaggaccctgcccgaggttggaaacagttcgccagaggaagatgggaagacagcggaactgagcgacagtgtcggggagatcctagatgtcataagccaaaccgaggaggtcctcttcggngtatttattcgcgataagctcatggagcggcgtaaccgtcgcacaggaaggacagagaaagcgcggatctgggaagtgacggacagaacggtcaggacctggattggggaggcggttgccgccgctgctgctgacggtgtgacgttctctgttccggtcacaccacatacgttccgccattcctatgcgatgcacatgctgtatgccggtataccgctgaaagttctgcaaagcctgatgggacataagtccatcagttcaacggaagtctacacgaaggtttttgcgctggatgtggctgcccggcaccgggtgcagtttgcgatgccggaggattttgccgatttcggaaccaccatcaaacaggattttcgcctgctggggcaaaccagcgtggaccgcttgctgcaactctctcagggccaggcgattaaggccaatccacctgttgcccgtctccgtggtcaaaacaaaaagcaccttggcgcccgatacgcagaccgcctctccacgagagttgcttgattcattcatgcagctggcacgacaggtttccagactggaaagcgggcagaggccggatgtcgtgcgtcgaattgtgacaacgcgaaatgagattcgcgcggagtccattgcgatagtgtggacgtagaatgtcgacgggccaggcggtccgccgaggcttacccaaataggcaaggggggcaggaaggaagaacggcgagtatgggcaaaagaacaggctggtaaagggttggaagcctcattttcttgtttttgcatcctcccatccccaggacccagtaccttcaagcgttggctgtacggattaccagctcctgaattgcaggcctcttttccataaccagaaagacttgtaagtgcttctgtttccttccccataaactccccaggacccagtaccttcaagcgttggctgtacggattaccagctcctgaattgcaggcctcttttccataaccagaaagacttgtaagtgcttctgtttccttccccataaactcccggtgccgggcagccacatccagcgcaaaaaccttcgtgtagacttcggttgaactgatggacttatgtcccatcaggctttgcagaactttcagcggtataccggcatacagcatgtgcatcgcataggaatggcggaacgtatgtggtgtgaccggaacagagaacgtcacaccgtcagcagcagcggcggcaaccgcctccccaatccaggtcctgaccgttctgtccgtcacttcccagatccgcgctttctctgtccttcctgtgcgacggttacgccgctccatgagcttatcgcgaataaatacctttgaaattacccatgaaatccgcacgctgacaccatcagtggtaccagcagtaaggtgttttctctttctttttcctgcagttccacaaaacctctcgaatctagattcatttgtgctgatggagaatatatccagcccagaagcaatcacagggccacgcttcaagaaaccggctcggtcgcggggctcgccggacaggccaatgaaccgtgggtacaaggtggagtttgtcttgggcagtaggaggacagcccgggcacccaggggcccaattccaggggaaagccatctcccttctggaattgcccaactccgggggaaaaccat

SEQ ID NO: 13239 - DNA, 1410 bp, Homo sapiens
  SIMILAR (134)..(54): 511254mologous to Homo sapiens immunoglobulin lambda light chain variable region,accession number AF063725,Smith-Waterman Score=61.
atggcccgatatcggttaatgcacctgcgcccaacaggcttgcccgactggaaaggggcgtcgaggatctccggggcgcggggcgcgggctggggcccagtgaggcttggcaggctgtgcgcggaccgcgccctggacggcgaaagcaggcccggagggggcggccagtccggcgtcccagcgtccgaggcgagccagaaggcggcccacggccgtcgcctcccgccctcgctcgctctcggtgcctccttggccttggcgcccactctggccgcacttgagcgcttcaacccgccgctgcactgtgggagcccctttctgggctggccaaggccggagccggctccctcagcttgcggggaggtgtggagggagaggcgcgtgcgggaactggggctgcgcacaggcttgcgggccagcgcgagttctggttggcccagggctttccggtatcaacagggacaccaggatttatttattctgcgaagtgatcttccgtcacaggtatttattcgcgataagctcatggagcggcgtaaccgtcgcacaggaaggacagagaaagcgcggatctgggaagtgacggacagaacggtcaggacctggattggggaggcggttgccgccgctgctgctgacggtgtgacgttctctgttccggtcacaccacatacgttccgccattcctatgcgatgcacatgctgtatgccggtataccgctgaaagttctgcaaagcctgatgggacataagtccatcagttcaacggaagtctacacgaaggtttttgcgctggatgtggctgcccggcaccgggaacatgacggtatctgcgagatccatgttgctaaatatgctgaaatattcggattgacctctgcggaagccagtaaggatatacggcaggcattgaagagtttcgcggggaaggaagtggttttttatcgccctgaagaggatgccggcgatgaaaaaggctatgaatcttttccttggtttatcaaacgtgcgcacagtccatccagagggctttacagtgtacatatcaacccatatctcattcccttctttatcgggttacagaaccggtttacgcagtttcggcttagtgaaacaaaagaaatcaccaatccgtatgccatgcgtttatacgaatccctgtgtcagtatcgtaagccggatggctcaggcatcgtctctctgaaaatcgactggatcatagagcgttaccagctgcctcaaagttaccagcgtatgcctgacttccgccgccgcttcctgcaggtctgtgttaatgagatcaacagcagaactccaatgcgcctctcatacattgagaaaaagaaaggccgccagacgactcatatcgtattttccttccgcgatatcacttccatgacgacaggatag

SEQ ID NO: 13240 - DNA, 3682 bp, Homo sapiens
  SIMILAR (1021)..(2604): 911254mologous to Homo sapiens putative p150,accession number U93574,Smith-Waterman Score=2495.
  misc_feature (1)...(3682): n = a,t,c or g
ccatggatatccgcgcctgttccggtggacgtggtggagggtgcaatggactctgtgacggttcttagctttggtggtttaatgctctatttttgtgctggttggcctcctgccaggaggtggtgctttccagaaagcatcagctgtggtagtatggagagggaccagtggtgggggctccaagtagcgaagcgagcaggactggccggcggccaaagcggtcggacagtgctccgagaacgggtgcgcatagaaattgcatcaacgcatatagcgctagcagcacgccatagtgactggcgatgctgtcggaatggacgatatcccgcaagaggcccggcagctttgcagaactttcagcggtataccggcatacagcatgtgcatcgcataggaatggcggaacgtatgtggtgtgaccggaacagagaacgtcacaccgtcagcagcagcggcggcaaccgcctccccaatccaggtcctgaccgttcttgtgacaatctaaaaacttgtcacacttcacatggatctgtcatggcggaaacagcggttatcaatcacaagaaacgtaaaaatagcccgcgaatcgtccagtcaaacgacctcactgaggcggcatatagtctctcccgggatcaaaaacgtatgctgtatctgttcgttgaccagatcagaaaatctgatggcaccctacaggaacatgacggtatctgcgagatccatgttgctaaatatgctgaaatattcggattgacctctgcggaagccagtaaggatatacggcaggcattgaagagtttcgcggggaaggaagtggttttttatcgccctgaagaggatgccggcgatgaaaaaggctatgaatcttttccttggtttatcaaacgtgcgcacagtccatccagagggctttacagtgtacatatcaacccatatctcattcccttctttatcgggttacagaaccggtttacgcagtttcggcttagtgaaacaaaagaaatcaccgatccgtatgccatgcgtttatacaaataccctgtgtcagtatcgtaagccggatggctcaggcatcgtctctctgaaaatcgactggatcatagagcgttaccagctgcctcaaagttaccagcgtatgcctgacttccgccgccgcttcctgcagtgcataaacgctggtcatgaaatgacgaaggctatcgccattgcacagtttaatgatgacagcccggaagcgaggaaaataacccggcgctggagaataggtgaagcagcggatttagttggggtttcttctcaggctatcagagatgccgagaaagcagggcgactaccgcacccggatatggaaattcgaggacgggttgagcaacgtgttggttatacaattgaacaaattaatcatatgcgtgatgtgtttggtacgcgattgcgacgtgctgaagacgtatttccaccggtgatcggggttgctgcccataaaggtggcgtttacaaaacctcagtttctgttcatcttgctcaggatctggctctgaaggggctacgtgttttgctcgtggaaggtaacgacccccagggaacagcctcaatgtatcacggatgggtaccagatcttcatattcatgcagaagacactctcctgcctttctatcttggggaaaaggacgatgtcacttatgcaataaagcccacttgctggccggggcttgacattattccttcctgtctggctctgcaccgtattgaaactgagttaatgggcaaatttgatgaaggtaaactgcccaccgatccacacctgatgctccgactggccattgaaactgttgctcatgactatgatgtcatagttattgacagcgcgcctaacctgggtatcggcacgattaatgtcgtatgtgctgctgatgtgctgattgttcccacgcctgctgagttgtttgactacacctccgcactgcagtttttcgatatgcttcgtgatctgctcaagaacgttgatcttaaagggttcgagcctgatgtacgggctgcagcagttcatcactatttacatttatctaaaccccaattaaaaacccttatggtcttagagatgttgatcattgtgctgaaggcatggaaggaaatggaacctgctcctgccaaacgtatctatgtgatagaatatgctggcgaccaccattccactttctgtgtctatgaatttgactatttgaggtactgcatgaagggtttggtggaacagcctgtgaaacctgtgctgacgacaacttatttggacccagctgttcatcaggacaatcaaataaagcttaaactccatggaggcaaaaagaaggtaaaaattatacaaggggacatcattgcttccaatgggcttctgcacatccttgacagagccatggacaagttagaacccacatttgagagcaacaatgaggaaaccaatttgggacatgccttagatgaggatggagttggtggaccatacaccatttttgttccaaataatgaagcattgaataacatgaaggacggcactctcgattacctcctttctccagaggtatttattcgcgataagctcatggagcggcgtaaccgtcgcacaggaaggacagagaaagcgcggatctgggaagtgacggacagaacggtcaggacctggattggggaggcggttgccgccgctgctgctgacggtgtgacgttctctgttccggtcacaccacatacgttccgccattcctatgcgatgcacatgctgtatgccggtataccgctgaaagttctgcaaagcctgatgggacataagtccatcagttcaacggaagtctacacgaaggtttttgcgctggatgtggctgcccggcaccggtgtgacaatctaaaaacttgtcacacttcacatggatctgtcatggcggaaacagcggttatcaatcacaagaaacgtaaaaatagcccgcgaatcgtccagtcaaacgacctcactgaggcggcatatagtctctcccgggatcaaaaacgtatgctgtatctgttcgttgaccagatcagaaaatctgatggcaccctacaggaacatgacggtatctgcgagatccatgttgctaaatatgctgaaatattcggattgacctctgcggaagccagtaaggatatacggcaggcattgaagagtttcgcggngaaggaagtggttttttatcgccctgaagaggatgccggcgatgaaaaaggctatgaatcttttccttggtttatcaaacgtgcgcacagtccatccagagggctttacagtgtacatatcaacccatatctcattcccttctttatcgngttacagaaccggggtacgcagtttcggcttagagacacaaaagaaatcaccaatccgtatgccatgcgtttatacgaatccctgtgtcagtatcgtaagccggatggctcaggcatcgtctctctgaaaatcgactggatcatagagcgttaccagctgcctcaaagttaccagcgtatgcctgacttccgccgccgcttcctgcaggtctgtgttaatgagatcaacagcagaactccaatgcgcctctcatacattgagaaaaagaaaggccgccagacgactcatatcgtattttccttccgcgatatcacttccatgacgacaggatag

SEQ ID NO: 13241 - DNA, 1209 bp, Homo sapiens
  SIMILAR (52)..(249): 411254mologous to Homo sapiens dJ1061C18.1.1 (discs protein, large Drosophila homolog 1 (presynaptic protein SAP97)),accession number AL121981,Smith-Waterman Score=132.
gtcggcgtcaactcaatcgacagctggaaaaacacgggccgtgtctttaaagacagcgataagttcgacgccaacgatccgatcctgaaagatcagacgcaagaatggtccggttctgcaacctttacatctgacggaaaaatccgtttattctacactgactattccggtaaacattacggcaaacaaagcctgacaacagcgcaggctttgcagaactttcagcggtataccggcatacagcatgtgcatcgcataggaatggcggaacgtatgtggtgtgaccggaacagagaacgtcacaccgtcagcagcagcggcggcaaccgcctccccaatccaggtcctgaccgttctgatctggctctgaaggggctacgtgttttgctcgtggaaggtaacgacccccagggaacagcctcaatgtatcacggatgggtaccagatcttcatattcatgcagaagacactctcctgcctttctatcttggggaaaaggacgatgtcacttatgcaataaagcccacttgctggccggggcttgacattattccttcctgtctggctctgcaccgtattgaaactgagttaatgggcaaatttgatgaaggtaaactgcccaccgatccacacctgatgctccgactggccattgaaactgttgctcatgactatgatgtcatagtctatgttgaagtcgaggagcttatcggggaaataggagaagtacggacgccacacgtatttattcgcgataagctcatggagcggcgtaaccgtcgcacaggaaggacagagaaagcgcggatctgggaagtgacggacagaacggtcaggacctggattggggaggcggttgccgccgctgctgctgacggtgtgacgttctctgttccggtcacaccacatacgttccgccattcctatgcgatgcacatgctgtatgccggtataccgctgaaagttctgcaaagcctgatgggacataagtccattcagtcaacggaagtctacacgaaaggttttgcgctggatgtggctgccccgcaccgggtgcagtttgcgatgccggaggtcttccacgcggtcttccagcccgtgggtaataggttttcttggagctttttatctgtgcctgttgggggttctggattggaggcttctgcagcaccctggctgggatacatgggaggctacaaggaaacctga

SEQ ID NO: 13242 - DNA, 2334 bp, Homo sapiens
  SIMILAR (694)..(1590): 751254mologous to multiple sclerosis associated retrovirus polyprotein,accession number AF009668,Smith-Waterman Score=1186.
tcacaggtatttattcgcgataagctcatggagcggcgtaaccgtcgcacaggaaggacagagaaagcgcggatctgggaagtgacggacagaacggtcaggacctggattggggaggcggttgccgccgctgctgctgacggtgtgacgttctctgttccggtcacaccacatacgttccgccattcctatgcgatgcacatgctgtatgccggtataccgctgaaagttctgcaaagccccgccgtccggctctaggagataaccatcgataaactgctgaacgttctgatatgtttttccgtctccgtcaaaaatcgttttgtgatcttccactccgttgattttgagtgtgtcatcagattttgacacatttacctgcgctgttgtcaggctttgtttgccgtaatgtttaccggaatagtcagtgtagaataaacggatttttccgtcagatgtaaaggttgcagaaccggaccattcttgcgtctgatctttcaggatcggatcgttggcgtcgaacttatcgctgtctttaaagacacggcccgcgtttttccagctgtcgattgagttgtcgccgaccttttgataaaacatgtagattgatgtgtcatcagcgtctttcgggcttcccgcaagagcaaacacaacgtgatagccgttgtattcagctactgttccgtcagcgttttgcagcggccagctgtcccacacatcaagtccttttgcagactcaatatttttaatcgttgattgatcgaattgaggcacttggtatttttcgttttgctgctgtttagggatctgcagcatatcatggcgtgtaatatgagagacgccgtacgtttctttgtatgcctttttggttattttctttcgcgaaggcttgagtcgctcctccgacgatacgagtgggaccgtggttccggggtgataatcagaccgacgatacgagtgggaccatggtccccagactaataatcagaccgacgatacgagtgggaccgtggtcccagtctgattatcagacccacgataccagtgggaccgctttgcagaactttcagcggtataccggcatacagcatgtgcatcgcataggaatggcggaacgtatgtggtgtgaccggaacagagaacgtcacaccgtcagcagcagcggcggcaaccgcctccccaattccagtcctgaccgttctgtccgtcacttcccagaccgcgctttctctggccttcctgtgcgaccgacccccacagtagctgaatacatctgctatcacgttgtgtttgctcttgcgggaagcccgaaagacgctgatgacacatcaatctacatgttttatcaaaaggtcggcgacaactcaatcgacagctggaaaaacgcgggccgtgtctttaaagacagcgataagttcgacgccaacgatccgatcctgaaagatcagacgcgagagtggtccggttctgcaacctttacatctgacggaaaaatccgtttattctacactgactattccggtaaacattacggcaaacaaagcctgacaacagcgcaggtaaatgtgtcaaaatctgatgacacactcaaaatcaacggagtggaagatcacaaaacgatttttgacggagacggaaaaacatatcagaacgttcagcagtttatcgatgaaggcaattatacatccggcgacaaccatacgctgagagaccctcactacgttgaagacaaaggccataaataccttgtattcgaagccaacacgggaacagaaaacggataccaagggcgaagaatcttcacctccacaaagcgctttgcagaactttcagcggtataccggcacacagcatgtgcatcgcataggaatggcggaacgtatgtggtgtgaccggaacagagaacgtcacaccgtcagcagcagcggcggcaaccgcctccccaatccaggtcctgaccgttctatccgcgctttctctgtccttcctgtgcgacggttacgccgctcccatgagctgatgaactacgctggcaccaatccccagcccgatattgtctccggcccgaaaaaggtggcccaaattaccgggcccttcgaaagaaagtgtgtccaattccgcaaaggagaggccccccttctcccgaagggcaatacgggattctccaatttggccgaaacccggggggcaaaaccgattgtggtcaaccaaccaagggggtgccgcccttatatagatgccttttcccaccctgtttcttcaattgggtttcttgtggttccacgaaggaagtaccgcccgatccaagcccatgggagtcggatcgagttgtaa

SEQ ID NO: 13243 - DNA, 3226 bp, Homo sapiens
  SIMILAR (3220)..(2147): 991254mologous to Cloning vector pSacBII SacB,accession number U09128,Smith-Waterman Score=1883.
  misc_feature (1)...(3226): n = a,t,c or g
tcattgtttggttcgcttctccagggaataccagccagcttctctgtttaccagacaaaacnagcatatccactcagttccacatttcaaataaagggccaaggcatttatctcaggataatgtttcagcatcgcaaccgcatcagactccggcatcgcaaactgcacccggtgccgggcagccacatccagcgcaaaaaccttcgtgtagacttccgttgaactgatggacttatgtcccatcaggctttgcagaactttcagcggtataccggcatacagcatgtgcatcgcataggaatggcggaacgtatgtggtgtgaccggaacagagaacgtcacaccgtcagcagcagcggcggcaaccgcctccccaatccaggtcctgaccgttctgtccgtcacttcccagatccgcgctttctctgtccttcctgtgcgacggttacgccgctccatgagcttatcgcgaataaatacctgtgacggaagatcacttcgcagaataaataaatcctggtgtccctgttgataccgggaagccctgggccaacttttggcgaaaatgagacgttgatcggcacgtaagaggttccaactttcaccataatgaaataagatcacttcagggcatggtaaccgattagattttggagatgaaggagagacactaccaaaggactctctcagatgacaagtatggataacggggtcatgagctaagattgtgtcaacaggaggtaaaacttttttaatggagaagatgataaatttcattctaaacgtgaagttctgggtgcctttgggacagccagcatgagccagaaaatgctgcaggaagcggcggcggaagtcaggcatacgctggtaactttgaggcagctggtaacgctctatgatccagtcgattttcagagagacgatgcctgagccatccggcttacgatactgacacagggattcgtataaacgcatggcatacggattggtgatttcttttgtttcactaagccgaaactgcgtaaaccggttctgtaacccgataaagaagggaatgagatatgggttgatatgtacactgtaaagccctctggatggactgtgcgcacgtttgataaaccaaggaaaagattcatagcctttttcatcgccggcatcctcttcagggcgataaaaaaccacttccttccccgcgaaactcttcaatgcctgccgtatatccttactggcttccgcagaggtcaatccgaatatttcagcatatttagcaacatggatctcgcagataccgtcatgttcctgtagggtgccatcagattttctgatctggtcaacgaacagatacagcatacgtttttgatcccgggagagactatatgccgcctcagtgaggtcgtttgactggacgattcgcgggctatttttacgtttcttgtgattgataaccgctgtttccgccatgacagatccatgtgaagtgtgacaagtttttagattgtcacacttattggccagaattggtcccatgatcactgctagctctaaggaagaccagggattggctgagacgaaaaacatattctcaataaaccctttagggaaataggccaggttttcaccgtaacacgccacatcttgcgaatatatgtgtagaaactgccggaaatcgtcgtggtattcactccagagcgatgaaaacgtttcagtttgctcatggaaaacggtgtaacaagggtgaacactatcccatatcaccagctcaccgtctttcattgccatacggaactccggatgagcattcatcaggcgggcaagaatgtgaataaaggccggataaaacttgtgcttatttttctttacggtctttaaaaaggccgtaatatccagctgaacggtctggttataggtacattgagcaactgactgaaatgcctcaaaatgttcagaacgggcaggacctggattggggaggcgggtgccgccgctgctgctgacggtgtgacgttctctgttccggtcacaccacatacgttccgccattcctatgcgatgcacatgctgtatgccggtataccgttgaaagttctgcaaagcctcagaacacgtaggctggcatccatcgatcgtcatttttgaaccgcgtgaaatcagtgaacaagtaccatttgccgttcattttgaaaacattcgcgcgctcgatttcatcagttaccgtgtttgaagtgatcagcggcttcattacttttttcaatgtgtaatcattatttaactctatgataccgagggcgccgttcgctaactcagcatcgcgttttttagcgctctgctgaagcttctggctttctttacggaagaagttcgtgccgccgccgtagtacgctttgttaaataaagattcttcgccttggtatccgttttctgttcccgtgttggcttcgaatacaaggtatttatggcctttgtcttcaacgtagtgagggtctctcagcgtatggttgtcgccggatgtataattgccttcatcgataaactgctgaacgttctgatatgtttttccgtctccgtcaaaaatcgttttgtgatcttccactccgttgattttgagtgtgtcatcagattttgacacatttacctgcgctgttgtcaggctttgtttgccgtaatgtttaccggaatagtcagtgtagaataaacggatttttccgtcagatgtaaagggtgcagaaccggaccattcgtgcgtctgatctttcaggatcggatcgttggcgtcgaacttatcgctgtctttaaagacacggcccgcgtttttccagctgtcgattgagttgtcgccgaccttttgataaaacatgtagattgatgtgtcatcagcgtctttcgggcttcccgcaagagcaaacacaacgtgatagccgttgtattcagctactgttccgtcagcgttttgcagcggccagctgtcccacacatcaagtccttttgcagactcaatatttttaatcgttgattgatcgaattgaggcacttggtatttttcgttttgctgctgtttagggatctgcagcatatcatggcgtgtaatatgagagacgccgtacgtttctttgtatgctttttggttattttctttcgcgaaggcttgagtcgctcctcctgccagaagtgcagtcgtaaaagtcagaactgtggcttgttttacaatttttttgatgttcatgttcat

SEQ ID NO: 13244 - DNA, 1953 bp, Homo sapiens
  SIMILAR (649)..(1188): 901254mologous to Cloning vector pZC320 SopB,accession number U26464,Smith-Waterman Score=802.
atgtcccatcaggctttgcagaactttcagcggtataccggcatacagcatgtgcatcgcataggaatggcggaacgtatgtggtgtgaccggaacagagaacgtcacaccgtcagcagcagcggcggcaaccgcctccccaatccagaacatcgtaaagaacattttgaggcatttcagtcagttgctcaatgtacctataaccagaccgttcagctggatattacggcctttttaaagaccgtaaagaaaaataagcacaagttttatccggcctttattcacattcttgcccgcctgatgaatgctcatccggagttccgtatggcaatgaaagacgggtttattgagaatatgtttttcgtctcagccaatccctgggtgagtttcaccagttttgatttaaacgtggccaatatggacaacttcttcgcccccgttttcaccatgggcaaatattatacgcaaggcgacaaggtgctgatgccgctggcgattcagctgcatgctcagttgaagatgatgaccattcctgatcgagaaggacttaggttaagggctttgcagaactttcagcggtataccggcatacagcatgtgcatcgcataggaatggcggaacgtatgtggtgtgaccggaacagagaacgtcacaccgtcagcagcagcggcggcaaccgcctccccaatccagctgccccgatggtggattcgttaattgcgcgcgtaggagtaatggctcgcggtaatgccattactttgcctgtatgtggtcgggatgtgaagtttactcttgaagtgctccggggtgatagtgttgagaagacctctcgggtatggtcaggtaatgaacgtgaccaggagctgcttactgaggacgcactggatgatctcatcccttcttttctactgactggtcaacagacaccggcgttcggtcgaagagtatctggtgtcatagaaattgccgatgggagtcgccgtcgtaaagctgctgcacttaccgaaagtgattatcgtgttctggttggcgagctggatgatgagcagatggctgcattatccagattgggtaacgattgtcgcccaacaagtgcttatgaacgtggtcagcgttatgcaagccgattgcagaaagaatttgctggaaatatttctgcgctggctgatgcggaaaaatatttacgtatcagtgataaacttgggaataatacagaaacatcaatgagccaaaagccttgcaaaatgaaaaggataattctagagaagagttggcagtttgaaaaatggatcatcatagtgatcttatttcattatggtgaaagttggaacctcttacgtgccgatcaacgtctcattttcgccaaaagttggcccagggcttcccggtatcaacagggacaccaggatttatttattctgcgaagtgatcttccgtcacaggtatttattcgcgataagctcatggagcggcgtaaccgtcgcacaggaaggacagagaaagcgcggatctgggaagtgacggacagaacggtcaggacctggattggggaggcggttgccgccgctgctgctgacggtgtgacgttctctgttccggtcacaccacatacgttccgccattcctatgcgatgcacatgctgtatgccggtataccgctgaaagttctgcaaagcctgaagctccgactggccattgaaactgatgctcatgactatgatgtcatagttattgacagcgcgcctaacctgggtatcggcaacgataatgtcgtatgtgctgctgatgtggtgaatgttcccacggcctgctgagttggtttggctacagcaccgcactggcagtattcgatatgcatcgtgatctccaatggcatcaagcgaggcccacagcattgctgcaatgtttgcctgggtcacaccactctgagaatgtgacaggtggctggtcat

SEQ ID NO: 13245 - DNA, 1776 bp, Homo sapiens
  SIMILAR (1)..(3096): 971254mologous to Homo sapiens unknown,accession number AF149422,Smith-Waterman Score=5241.
atgaaactcatggaaacacttaaccagtgcataaacgctggtcatgaaatgacgaaggctatcgccattgcacagtttaatgatgacagcccggaagcgaggaaaataacccggcgctggagaataggtgaagcagcggatttagttggggtttcttctcaggctatcagagatgccgagaaagcagggcgactaccgcacccggatatggaaattcgaggacgggttgagcaacgtgttggttatacaattgaacaaattaatcatatgcgtgatgtgtttggtacgcgattgcgacgtgctgaagacgtatttccaccggtgatcggggttgctgcccataaaggtggcgtttacaaaacctcagtttctgttcatcttgctcaggatctggctctgaaggggctacgtgttttgctcgtggaaggtaacgacccccagggaacagcctcaatgtatcacggatgggtaccagatcttcatattcatgcagaagacactctcctgcctttctatcttggggaaaaggacgatgtcacttatgcaataaagcccacttgctggccggggcttgacattattccttcctgtctggctctgcaccgtattgaaactgagttaatgggcaaatttgatgaaggtaaactgcccaccgatccacacctgatgctccgactggccattgaaactgttgctcatgactatgatgtcatagttattgacagcgcgcctaacctgggtatcggcacgattaatgtcgtatgtgctgctgatgtgctgattgttcccacgcctgctgagttgtttgactacacctccgcactgcagtttttcgatatgcttcgtgatctgctcaagaacgttgatcttaaagggttcgagcctgatagaagcctgatagatgtggtcggagtgattaatagcaacctgtctccagagataaaagagtggcgagtgagacgcattgccctgactccacttctaattctgtgttgttatatgcggctgtttggccaagcggaggcaccacacccacagcaccgtatctggctgcaagccctggatttcctgggtcaccaagataagattctttcagtggaaaagaaaatgatctggggcagtggtatttacccagagcagggttgtaagctggagaaggcacaggaaaggcgtgttggtgcaggtttcacccctgttcctgcaatgccattatctggtgctctcccagtgagaaattcatcagtaggacaggatgcccaggaattgatcttatttcattatggtgaaagttggaacctcttacgtgccgatcaacgtctcattttcgccaaaagttggcccagggcttcccggtatcaacagggacaccaggatttatttattctgcgaagtgatcttccgtcacaggtatttattcgcgataagctcatggagcggcgtaaccgtcgcacaggaaggacagagaaagcgcggatctgggaagtgacggacagaacggtcaggacctggattggggaggcggttgccgccgctgctgctgacggtgtgacgttctctgttccggtcacaccacatacgttccgccattcctatgcgatgcacatgctgtatgccggtataccgctgaaagttctgcaaagcctgatgggacataagtccatcagttcaacggaagtctacacgaaggtttttgcgctggatgtggctgcccggcaccgggtgcagtttgcgatgccggagtctgatgcggttgcgatgctgaaacaattatcctga

SEQ ID NO: 13246 - DNA, 961 bp, Homo sapiens
  SIMILAR (1459)..(2091): 691254mologous to multiple sclerosis associated retrovirus polyprotein,accession number AF009668,Smith-Waterman Score=748.
ttacgccccgccctgccactcatcgcagtactgttgtaattcattaagcattctgccgacatggaagccatcacaaacggcatgatgaacctgaatcgccagcggcatcagcaccttgtcgccttgcgtataatatttgcccatggtgaaaacgggggcgaagaagttgtccatattggccacgtttaaatcaaaactggtgaaactcacccagggattggctgagacgaaaaacatattctcaataaaccctttagggaaataggccaggttttcaccgtaacacgccacatcttgcgaatatatgtgtagaaactgccggaaatcgtcgtggtattcactccagagcgatgaaaacgtttcagtttgctcatggaaaacggtgtaacaagggtgaacactatcccatatcaccagctcaccgtctttcattgccatacggaactccggatgagcattcatcaggcgggcaagaatgtgaataaaggccggataaaacttgtgcttatttttctttacggtctttaaaaaggccgtaatatccagctgaacggtctggttataggtacattgagcaactgactgaaatgcctcaaaatgttctggattggggaggcggttgccgccgctgctgctgacggtgtgacgttctctgttccggtcacaccacatacgttccgccattcctatgcgatgcacatgctgtatgccggtataccgctgaaagtttctgcaaagctggatttggagtaatcgtaaacctgctacccctctgctcatgcttctcaaataaatctcgtaaatccccagcgatagctgagtttttaagagtgtcatcatttgtgataataatcactgaaagatacacagaggctcttccatattgtttatggcagtgggccttcggcaagatcactcctgatagctctgtatcaggctgcctgtcacttctacgtcgcat

SEQ ID NO: 13247 - DNA, 2097 bp, Homo sapiens
  SIMILAR (262)..(414): 491254mologous to Homo sapiens BC85722_1,accession number AC006486,Smith-Waterman Score=111.
  misc_feature (1)...(2097): n = a,t,c or g
atgacaaaggactctcagaacaaatgggaagtgaatcagaggaaaattaggagttcggtgatagaaaagcccagggaagtaagtgttttgagaaggaagtggttgactgtgtgggctgatgctgatcatcaggtcaaaatagatgagaacaaagaatgggccttcagtctgacacacagagctgcatggagtcttggcagaacagccactcaggcatgcatggaggcccaggacactcaggcatgcatggaggcccaggagctttacctactgtggcactgggctttccggcaaaatgactgccactctgtaagggttcagaaccggggtgaggctgagatggctgaaatgacagaagtagaattcagaatgtggataaacacaatcttcactgatcttaaggagcacattgtaacccaatgcaggaaagctaaaaatcataaaatattgcaggaagtgacagacaaaatagccagtatagagaagaatgtaatgaacctgatggagctgaaaaacacaatacaagaatttcataatgcaatcacaagtattaatagcagaaaagaccaagtggaggaaagaatctcagagtttgaggactgtgtttctgaaataaggcagacagacaagaatagagaaaaaagaatgaaaaggaacgaacaaaacctccaagaaatatgggattgtgtaaagagactggatctacaactaattggtgtgcctgaaagagatgttggcccagggcttctggatcaacagggacaccaggatttatttattctgcgaagtgatcttgcgtgagaggtatttattcgcgataagctcatggagcggcgtaaccgtcgcacaggaaggacagagaaagcgcggatctgggaagtgacggacagaacggtcaggacctggattggggaggcggttgccgccgctgctgctgacggtgtgacgttctctgttccggtcacaccacatacgttccgccattcctatgcgatgcacatgctgtatgccggtataccgctgaaagttctgcaaagcctgatgggacataagtccatcagttcaacggaagtctacacgaaagtttttgcgctggatgtggctgcccggcaccggnatcacaaaacgatttttgacggtgacggaaaaacatatcagaacgttcagcagtttatcgatgaaggcaattatacatccggcgacaaccatacgctgagagaccctcactacgttgaagacaaaggccataaataccttgtattcgaagccaacacgggaacagaaaacggataccaaggcgaagaatctttatttaacaaagcgtactacggcggcggcacgaacttcttccgtaaagaaagccagaagcttcagcagagcgctaaaaaacgcgatgctgagttagcgaacggcgccctcggtatcatagagttaaataatgattacacattgaaaaaagtaatgaagccgctgatcacttcaaacacggtaactgatgaaatcgagcgcgcgaatgttttcaaaatgaacggcaaatggtacttgttcactgattcacgcggttcaaaaatgacgatcgatggtattaactcaaacgatatttacatggcttgggaccaccctgtgtattgtggaatgtttagcagcatccatggtctctacctgctagctaccagtagcatccgtttccctgctgacagccgaaaatggctacggacattaccaaatgtgctgcggggtgatactgagacaggtgtctgtgaggtgagccctggaactcgctcctatgagcagaggaaaaatctaagctatagaaaccacaactacagcatggcactggtgtacctcagctgtggaggctgtaagctgcaaactacccaggaagagcttggcttctgctcaaacgctgaggtggggtttgatgatgctgcagctggtgactgggagctgctgccctcctggtggtggaatggcaagatcttcctggaagggagatctatacccctgcccaacactgagcacccaaccaggaacttggcgctaagcaaacagacacccagccgaccatgtcctgaccctgtcgatgctttcagctag

SEQ ID NO: 13248 - DNA, 4165 bp, Homo sapiens
  SIMILAR (234)..(890): 971254mologous to Homo sapiens GTP-binding protein,accession number AF081353,Smith-Waterman Score=1113.
  misc_feature (1)...(4165): n = a,t,c or g
atgatcaaattactccaagctacggaggacattcaaaccaaaggcaaagaagttgaaaactttgaaaaaaatttagaagaatgtataactagaataaccaatacagagaagtgcttaaaggagctgatggagctgaaaaccaaggctcgagaactacgtgaagaatgcagaagcctcaggagccgatgtgatcaactggaagaaagggtatcagcgatggaagatgaaatgaatgaaatgaattggcccagggcttcccggtatcaacagggacaccaggatttatttattctgcgaagtgatcttccgtcacaggtatttattcgcgataagctcatggagcggcgtaaccgtcgcacaggaaggacagagaaagcgcggatctgggaagtgacggacagaacggtcaggacctggattggggaggcggttgccgccgctgctgctgacggtgtgacgttctctgttccggtcacaccacatacgttccgccattcctatgcgatgcacatgctgtatgccggtataccgctgaaagttctgcaaagcctgatgggacataagtccatcagttcaacggaagtctacacgaaggtttttgcgctggatgtggctgccccggcccggatccctaaacagcagcaaaacgaaaaataccaagtgcctcaattcgatcaatcaacgattaaaaatattgagtctgcaaaaggacttgatgtgtgggacagctggccgctgcaaaacgctgacggaacagtagctgaatacaacggctatcacgttgtgtttgctcttgcgggaagcccgaaagacgctgatgacacatcaatctacatgttttatcaaaaggtcggcgacaactcaatcgacagctggaaaaacgcgggccgtgtctttaaagacagcgataagttcgacgccaacgatccgatcctgaaagatcagacgcaagaatggtccggttctgcaacctttacatctgacggaaaaatccgtttattctacactgactattccggtaaacattacggcaaacaaagcctgacaacagcgcaggtaaatgtgtcaaaatctgatgacacactcaaaatcaacggagtggaagatcacaaaacgatttttgacggagacggaaaaacatatcagaacgttcagcagtttatcgatgaaaggcattatacatccggcgacaaccatacgctgagagaccctcactacgttgaagacggagggcataaataccttgtattcgaagccaacacgggaacagaaaacggataccaaggcgaagaatctttatttaacaaagcgtactacggcggcggcacgaacttcttccgtaaagaaagccagaagcttcagcagagcgctaaaaaacgcgatgctgagttagcgaacggcgccctcggtgtcatagagttaaataatgattacgcattgaaaaaagtaatgaagccgctgatcacttcaaacacggtaactgatgaaatcgagcgcgcgattgttttcaaaatgaacgggaaatggtacttgttcactgattcacgcggttcaaaaatgacgatcggatggtgtaaactcaaacgatatttacatgcctgggtatttattcgcgataagctcatggagcggcgtaaccgtcgcacaggaaggacagagaaagcgcggatctgggaagtgacggacagaacggtcaggacctggattggggaggcggttgccgccgctgctgctgacggtgtgacgttctctgttccggtcacaccacatacgttccgccattcctatgcgatgcacatgctgtatgnccgtataccgctgaaagttctgcaaagcctgatgggacataagtccatcagttcaacggaagtctacacgaaggtttttgcgctggatgtggctgccccgcaccgggtgcagtttgcgatgccggagtctgatgccgcgtactacgggggcggcacgaacttcttccgtaaagaaagccagaagcttcagcagagcgctaaaaaacgcgatgctgagttagcgaacggcgccctcggtatcatagagttaaataatgattacacattgaaaaaagtaatgaagccgctgatcacttcaaacacggtaggtggtgaaatcgagcgcgcgaatgttttcaaaatgaacggcaaatgggacttgttcactgattcacgcggttcaaaaatgacgatcgatggtattaactcaaacgatatttacatgcttggttatgtatcaaactctttaaccggcccttacaagccgctgaacaaaacagggcttgtgctgcaaatgggtcttgatccaaacgatgtgacattcacttactctcacttcgcagtgccgcaagccaaaggcaacaatgtggttatcacaagctacatgacaaacagaggcttcttcgaggataaaaaggcaacatttgcgccaagcttcttaatgaacatcaaaggcaataaaacatccgttgtcaaaaacagcatcctggagcaaggacagctgacatggctccaagtagcgaagcgagcaggactgggcggcggccaaagcggtcggacagtgctccgagaacgggtgcgcatagaaattgcatcaacgcatatagcgctagcagcacgccatagtgactggcgatgctgtcggaatggacgatatcccgcaagaggcccggcagtatttattcgcgataagctcatggagcggcgtaaccgtcgcacaggaaggacagagaaagcgcggatctgggaagtgacggacagaacggtcaggacctggattggggaggcggttgccgccgctgctgctgacggtgtgacgttctctgttccggtcacaccacatacgttccgccattcctatgcgatgcacatgctgtatgccggtataccgctgaaagttctgcaaagcctgatgggacataagtccctcagggatcttctggacccaccttacgtgcagcagctccgggaggtggcaggatatgagctgactatgaaaggggctgccaaagggcgctcccgaagaatggagaaactagcatcccagtgtcccagagtccaaggcaagcatcaagaagacatgatgtatacccacctgaaatccataagggagtgcatgtttgggcctgaagacagcaggtcactagagcccgaaagacgctgatgacacatcaatctacatgttttatcaaaaggtcggcgacaactcaatcgacagctggaaaaacgcgggccgtgtctttaaagacagcgataagttcgacgccaacgatccgatcctgaaagatcagacgcaagaatggtccggttctgcaacctttacatctgacggaaaaatccgtttattctacactgactattccggtaaacattacggcaaacaaagcctgacaacagcgcaggtaaatgtgtcaaaatctgatgacacactcaaaatcaacggagtggaagatcacaaaacgatttttgacggagacggaaaaacatatcagaacgttcagcagtttatcgatgaaggcaattatacatccggcgacaaccatacgctgagagaccctcactacgttgaagacaaaggccataaataccttgtattcgaagccaacacgggaacagaaaacggataccaaggcgaagaatctttatttaacaaagcgtactacggcggcggcacgaacttcttccgtaaagaaagccagaagcttcagcagagcgctanaaaacgcgatgctgagttagcgaacggcgccctcggtatcatagagttaaatatgattaccattgaaaaagtatttattcgcgataagctcatggagcggcgtaaccgtcgcacaggaaggacagagaaagcgcggatctgggaagtgacggacagaacggtcaggacctggattggggaggcggttgccgccgctgctgctgacggtgtgacgttctctgttccggtcacaccacatacgttccgccattcctatgcgatgcacatgctgtatgccggtataccgctgaaagttctgcaaagcctgatgggacataagtccatcagttcaacggaagtctacacgaaggtttttgcgctggatgtggctgcccggcaccgggtgcagtttgcgatgccggagtctgatgcggttgcgatgctgaaacaattatcctga

SEQ ID NO: 13249 - DNA, 2941 bp, Homo sapiens
  SIMILAR (199)..(420): 771254mologous to Gallus gallus transcription factor LEF- 1,accession number AF064462,Smith-Waterman Score=288.
atggagtatctgcgaatgacttgctggatttggctctcccgggacttcctctggcttccaggagtgatgtatacccgggttttctaccggtttggggagcatttattaatggtgctctgctgcttgttcgaggcagttatcaatgggacgggcactcggcttggtgatccgatcgaggcgcaggcgctgatcgccacctacggccgtgatcgtgatcctggccggccgttgtggttggggtcggtcaagtcgaacatcggtcatacgcaagcggcggcgggtgtggctggtgtgatcaagatggtgatggcgatgcggcacgggcagctgccacgcacgttgcacgtggaatcgccgtcgccggaggtggattggtcggcggggacggttcaactccttacggagaacacgccctggcccaggagtggtcgtgttcgtcgggtgggggtgtcgtcgttcgggatcagtggtactaacgcgcacgtcatcctcgaacagcccccgggagtgccgagtcagtctgcggggccgggttcgggttctgtcgtggatgttccggtggtgccgtggatggtgtcgggcaaaacacccgaagcgctatccgcgcaggcaacggcgttgatgacctatctggacgagcgacctgatgtctcctcgctggatgttgggtactcgctggcgttgacacggtcggcgctggatgagcgagcggtggtgctgtggtcggaccgtgaaacgttgttgtgcggcaaggacacaagaagatggctgtctacaagccaggaaaagattctgcaccaggaactggatcaactggcaccttgatcttggacttcccagcctccagaactatgagatgagaaataagtgtctattgtttaagcctcccagtctatggtattttgttatagcaacccaagatgacaaagacaacaagcctaaaatgaaaaatggcaaagtaaccaagatgtccttcaagagagaacaggaagctaaggtgtttatctacctgcttccgcctcccaccagtggagctttgccccccgggactgtccatgtccctgcacttctggggctgcacaggtggaacaagcgctacaaaaagccaaagccctggggcacaaggcagaaagttgaggtgacaccgctctcgttaatatatggaggaagatctcagatgctccactttcccgagttccagggagctgacctgtatgctcttgagcaggggcagggtgtttgtgatctccgcaacctaactacttacagagttgttcataaagtgagccttggaagtctggtttacatgacatcaaacactggcagaaccatgatgcctggggatgtggccggggacggcggtgggttgggggaagctgtgtttctcagcttccgttacagccagggctgccatgacaaggtaccacaatgggagtggataaaaacacagttctggaatgtgaaagtccaagatcaagatgtcatgctccttttgaaggtcttgcttcaagtgacatactcacaagttccacccagtatggagtacagagagctgaaaggaggagaattgggggttgtaccagaaccagagaaagagaggtgtgtggcaactctccaggagacagtgtccctccaagaagagggcttcgtggagaaaagtagtgactttgagtccaaggacacaaccagaccaaggagtgatgccaggcaagccatttcattttacctctgcattcagggacatcgtgttggtagcttgaagacagccatgctgggaatagttacaccatgggaactgccaaacagtacacaacagagaaatgcctccagcatggaaatttccacacaaggactgagctgtagccaggtaggttcttttcaaatgggcaatagatgtccagttgtcaatcttctgaagaggaaaaagggccctagaattgtggaagcagctgggatgaaaaagccacattctgaaactgttcctgactggacagaccctgggaagaacaccactatcaccattatcaccccaatcatcatatataatcgtcatcattcccatcatcaccattttcaccaacattatcatgccatcatcaccatcaacatcaccatcatcctcatcatcaactccattaccatcatccatattctagagaagaattggaaaacaggatttgggatccgtgaatctggtttcaaaatctggctgttttttcttggttggattcccaaatctttgaaaacaacatctctagcatcttcgaagacagaaggcagtgaatatcggtgctgtttaaaggcccatgtgattatgctgctgccaattcgccaatgctgcaaagatcaaatgggcaaatttagggaacatcagctgcacaactacttggcatctgcacttagcattgctttgatacctgatgaccaactctctgaaaagaaggtatttattcgcgataagctcatggagcggcgtaaccgtcgcacaggaaggacagagaaagcgcggatctgggaagtgacggacagaacggtcaggacctggattggggaggcggttgccgccgctgctgctgacggtgtgacgttctctgttccggtcacaccacatacgttccgccattcctatgcgatgcacatgctgtatgccggtataccgctgaaagttctgcaaagcctgatgggacataagtccatcagttcaacggaagtctacacgaaggtttttgcgctggatgtggctgcccggcaccgggacactgaatcttcgtcggtgtacgttaagtggaccggattagtccacatggacagacacctaatgaacacagaccaagatgtggctgtcctttacaccagtaatctcgcgcagttgaccacagggcaacttcgattgaccgaggagcacagggacagccctatatatatgctacaagattcctga

SEQ ID NO: 13250 - DNA, 2070 bp, Homo sapiens
  SIMILAR (3)..(401): 1001254mologous to Escherichia coli Initiation factor IF2- alpha,accession number AJ002539,Smith-Waterman Score=669.
atgtggaagcgactttggagctgggtaacaggcagaggttggaacagtttggaggactcagaagaagacaagaaaatgtgggaaagtttggaacctcctagagacttgttgaatggctttgacaaaaatgctgatagtgatatgaacaataaggtccaggctgaagtagtctcagatgtaggtgaggaacttgttgggaactggagcaaagggactcctgaggattacccacgatttttccatatgcatcctaggacagcagaacttagtctcctggagccagtaaacagagactttcaccagaaatttgatttggttattaaggctgaacaagacaatggtcatcctcttcctgcctttgccggtctacacattgaaatactggatgaaaacaatcaaagtccatattttacaatgcccagttatcaaggctatatcctggaatctgccccagtgggagcaaccatttcggacagtctcaatttgacttcacctttaagaatagtagctctggacaaggacatagaagatacaaaagacccagagcttcacctttttctgaatgactacacctcagtcttcaccgtcacacagactggtattactcgctacctcaccttacttcaaccagtggacagggaagaacagcaaacttacaccttttcgataacagcatttgatggtgtacaagaaagtgagccagtcatcgtcaatattcaagtgatggatgcaaatgataacacgccaaccttccctgaaatatcctatgatgtgtatgtttatacagacatgagacctggggacagtgtcatacagctgctgatggcaacaaaagacactggggactactatggagggagagagggagaagagacaattgaaaaattaactattgtgtactatactcagtatctgggtgacagaatcaatcataccccaaacctcaacatcatgcaatatacccagggggcttccgaggcgatcaagcagtgtcagtcttcagccgctaagccgagaagatctgggaaggagtcagtcagccttgggccagagttccaggggctctgggagtggctgccagtgatcttatttcattatggtgaaagttggaacctcttacgtgccgatcaacgtctcattttcgccaaaagttggcccaggggcttcccggtatcaacagggacaccaggatttatttattctgcgaagtgatcttccgtcacaggtatttattcgcgataagctcatggagcggcgtaaccgtcgcacaggaaggtatttataaagcgcggatttggggaagtggacggacagaacggtcaggaacctggatatgtcgaggcgggttgcccgccgctgctgctgacggtgtgacgttcatctgatcccggtccaccacaatacgttccgccattcatatgcgatgcacatgctgtatgcccggtaataccgctgaaagttcttgcaaagcctgatgggacataagtcccatcctatcaacgggaaggctaccccaaaggtttttgggcctggaatggggcttgcccgggcacccggggggcaggttggcaatggccgaagtctgatgcggttgggaatgcctaaacaattatccttgagaataaatgcccttggcctttatatggaaactgggaaaccggaggggataatgctgttttttggctgttaaaccagagaaagctgggctgttatcccactgagaagcgaacgaaacaggccgggaaaatctccccttattggggaagatccggattatttaatctaaggaccctggggtaccggttataggaaagaatggttctgtcatgatgcctgcatgcggtaacgaaaacgatttgaatatgccttcaggaacaatacaaatctttctgcgggggtaccttgaattggagcggattatgttagcaatgggccgaacaacctaatgaacacaaaaccatgatggggcctgtccttttacagccagtagtgctcgccgcagtccagcgacagggcgaagccctcgagtgagcgagggagcacccaggaacagcacttatatattctggg

SEQ ID NO: 13251 - DNA, 580 bp, Homo sapiens
  SIMILAR (3)..(368): 521254mologous to Expression vector pGST-parallel1 lac repressor,accession number AF097411,Smith-Waterman Score=201.
tggttgccaacgatccagaggcgctgggcgcaatgcgccgccattaccgaagtccgggctgcgcgttggtgccggatatcttcggtagtgggataccgacgatacccgaagacagcttcatgttatatccccgcgctttaaccacccatcaaacaggattttcggcctgctggggcaaaccagcgtggaccgcttgcttgcaactctctcagggccaggcggtgaagggcaatcagctgttgcccgtctcactggtgaaaagaaaaaccacccttggcgcccaatacgcaaaccgcctctccccgcgcgttggcccgattcattaatgcagctggcaccgacaggtttcccgactggaaagcgggcagtgagcgccaacgcaattaatgtgagttagctcactcattaggcaccccaggctttacactttatgcttccggctcagtatgttgtgtggaattgtgagcggataacaatttcacacaggaaacagctatgaccatgattacgccaagctctaatacgactcactatagggaaagctggtacgcctgcaggtaccggtccggaattcccggcc

SEQ ID NO: 13252 - DNA, 509 bp, Homo sapiens
  SIMILAR (970)..(1533): 691254mologous to Homo sapiens p40,accession number U93566,Smith-Waterman Score=598.
ccgataagctcatggagcggcgtaaccgtcgcacaggaaggacagagaaagcgcggatctgggaagtgacggacagaacggtcaggacctggattggggaggcggttgccgccgctgctgctgacggtgtgacgttctctgttccggtcacaccacatacgttccgccattcctatgcgatgcacatgctgtatgccggtataccgctgaaagttctgcaaagcctgatgggacataagtgcatcaggtcaacgggaaggctaccccaaaggtttttgggcctggaatggggcttgcccgggcacccggggggcaggttggcaatggccgaagtctgatgcggttgggaatgcctaaaacaataaccttgggataaatggccttggcctttatatggaaactgggaaaccggaggggatatgctgtatttgtctgttaaacagagaagctggctgttatcctctgagaagcgaacgaaacagtccccaaaagctcccattattcgaaaa

SEQ ID NO: 13253 - DNA, 413 bp, Homo sapiens
  SIMILAR (240)..(1): 951254mologous to Homo sapiens reverse transcriptase,accession number L27428,Smith-Waterman Score=416.
cagtaatgggatggctgggtcaaatggtatttctagttctagattcctgaggaatcaccacactgacttccacaatggttgaactagtttacagtccaaccaacagtgtaaaagtgttcctatttctccacatcctctccagcacctgttgtttcctgactttttaatgattgccattctaactggtgtgagatggtatctcattgtggttttgatttgcatttctctgatggccaaggagaactacaaaccagtgctcaaggaaataaaagaggatacaaacaaatggaagaacatttcatgctcgtgggtaggaagaatcaatatcgtgaaaatggccatactgcccaaggtaatttatagattaaatgccatccccatcaagctaccaatgactttcttcaaagaattgc

SEQ ID NO: 13254 - DNA, 1256 bp, Homo sapiens
  SIMILAR (882)..(7): 961254mologous to Homo sapiens putative p150,accession number U93568,Smith-Waterman Score=1460.
atgattgtatatctagaaaaccccatcgtctcagcccaaaatctcctcaaactgataggcagcttcagcaaagtctcaggatacaaaatcaatgtacaaaaatcacaggcattcttatacaccaataacagacaaacagagagccaaatcatgagtgaactcccattcacaattgcttcaaagagaataaaatacctaggaatccaacttacaagggatgtgaaggacctcttcaaggagaactacaaaccactgctcaacgaaataaaagaggatacaaagaaatggaagaacattccatgctcatgggtaggaagaatcaatatcgtgaaaatggccatactgcccaaggtaatttatagattcaatgccgtccccatcaagctaccaatgactttcttcacagaattgaaaaaaactactttaaagttcatatggaaccaaaaaagagcccgcatcgccaagtcaatcctaagccaaaagaacaaagctggaggcatcacgctacctgacttcaaactatactacaaggctacagtcaccaaaacagcatgggactggtaccaaaacagagatatagatcaatgcaacagaacagagccctcagaaataacacctcatatctacaactatctgatctgtgacaaacctgagaaaaacaagcaatggggaaaggtttccctatttaataaatggtgctgggaaaactggctagccatatgtagaaagctgaaactggatcccttccttacaccttatacaaaaattaattcaagatggattaaagacttaaatgttagacctaaagccataaaaaccctagaagaaaacctgggcaataccattcaggacataggcatggacaaggacttcatgtctaaaacaccaaaagcaatggcaacaaaagccaaaattgacaaatgggatctaattaaactaaagagcttctgcacagcaaaagaaactaccatcagagtgaacaggcaacctacacaatgggagaaaatttttgcaacctactcatctgacaaagggctaatatccagaatctacaatgcactcagacaaatttacaagaaaaaaacaaacaaccccatcaaaaaggacatggatgaaaccggaaaccaccattctcagcatactatcgcaaggacaaaaaaccaaacaccgcatgttctcactcatggatgggaactgaacaatgagaacacatggacacaggaaggggaacatcacactctggggactgttgtgtg

SEQ ID NO: 13255 - DNA, 1078 bp, Homo sapiens
  SIMILAR (496)..(83): 861254mologous to Homo sapiens p40,accession number U93570,Smith-Waterman Score=588.
atggataaattcctcgacacatacaccctcccaagactaaaccaggaagaagttgaatctctgaatagaccaataacaggctctgaaattgtggcaataatcaatagcttaccaaccaaaaaagatccaggaccagatggattcacagccgaattctaccagagaataaaatacctgggaatccaacttacaagggatgtgaaggacctcttcaaggagaactacaaaccactgctcaaggaaataaaagaggatacaaacaaatggaagaacattccatgctcatgggtaggaagaatcaatatcatgaaaatggccatactgcccaaggtaatttatagattcaatgccatccccatcaagctaccaatgactttcttcacagaattggaaaaaactactttaaagttcatatggaaccaaaaaagagcccgcatcaccaagtcaatcctaagccaaaagaacaaagccggaggcatcacactacctgacttcaaactatactacaaggctacagtaaccaaaacagcatggtactgttaccaaaacagagatatagatcaatggaacagagcagagccctcagaaataatgctgcctatctacaactatctgatctttgacaaacctgacaaaaacaagcaatggggaaaggattccctatttaataaatggtgctgggaaaactggctagccatatgtagaaagctgaaactggatcccttccttacaccttatacaaaaattaattcaagatggattaaagacttacatgttagacctaaaaccataaaaaccctagaagaaaacctgggcaataccattcaggacataggcatgggcaaggactttatgtctaaaacaccaaaagcaatggcaacaaaagccaaaattgacaaatgggatctaattaaactaaagagcttctgcacagcaaaagaaactaccatcagagtgaacaggcaacctacaaaatgggagaaaattttcacaacctactcatctgacaaagggctaatatccagaatctacaatgaactcaaacaaatttacaagaaaaaaacaaccccatcaaaaa

SEQ ID NO: 13256 - DNA, 977 bp, Homo sapiens
  SIMILAR (435)..(953): 861254mologous to Homo sapiens unknown protein,accession number M22334,Smith-Waterman Score=800.
atacttcgttatcgacaccagctgccccgatggtggattcgttaattgcgcgcgtaggagtaatggctcgcggtaatgccattactttgcctgtatgtggtcgggatgtgaagtttactcttgaagtgctccggggtgatagtgttgagaagacctctcgggtatggtcaggtaatgaacgtgaccaggagctgcttactgaggacgcactggatgatctcatcccttcttttctactgactggtcaacagacaccggcgttcggtcgaagagtatctggtgtcatagaaattgccgatgggagtcgccgtcgtaaagctgctgcacttaccgaaagtgattatcgtgttctggttggcgagctggatgatgagcagatggctgcattattcagattgggtaacgattatcgcccaacaagtgcttatgaacgtgttgcttcaaagagaataaaatacctaggaatccaacttacaagggacatgaaggacctcttcaaggagaactacaaactactgctcaatgaaataaaagaggatacaaacaaatggaagaccattccatgctcatgggtaggaagaatcaatatcgtgaaaatggccatactgcccaaggtaatttatagattcagtgccatccccctcaagctaccaatgactttcttcacagaattggaaaaaactactttaacgttcatatggaaccaaaaaagagcccgtattgccaagtcaatcctaagccaaaagaacaaagctggaggcatcaggctacctgacttcaaactatactacaagactacagtaaccaaaacagcatggtactggtaccacagcagagatagaggccaatggaacagaacagagccttcagaaataatgctgcgtatctacaaccatctgatctttgacaaacctgacaaaacaagcaattggggaaggattcccctgtttaataatgatgctgggaaaactgactag

SEQ ID NO: 13257 - DNA, 1004 bp, Homo sapiens
  SIMILAR (355)..(1002): 981254mologous to Homo sapiens putative p150,accession number U93574,Smith-Waterman Score=1071.
atggggaaaaaacagaacagaaaaactggaaactctaaaaagcagagcgcctctcctcctccaaaggaacgcagttcctcaccagcaaaggaacaaagctggatggagaatgactttgaagagctcagagaagaaggcttcagactatcaaattactctgagctacgggaggacattcaaaccaaaggcaaagaagttgaaaactttgaaaaaaatttagcagtatgtataactagaataaccaatacagagaactgcctaaaggagctaatggagctgaaaaccaaggctcgagaactacgtgaagaatgcagaagcctcaggagccgatgcgatcaactggaagaaaggtggttggaagttctggccagggcaattaggcaggagaaggaaataaagggtattcaattaggaaaagaggaagtcaaattgtccctgtttgcagacgacatgattgtatatctagaaaaccccattgtctcagcccaaaatctccttaagctgataagcaacttcagcaaagtctcaggatacaaaatcaatgtacaaaaatcacaagcattcttatacaccaacaacagacaaacagagagccaaatcatgagtgaactcccattcacaattgcttcaaagagaataaaatacctaggaatccaacttacaagggatgtgaaggatctcttcaaggagaactacaaaccactgctcaaggaaataaaagaggatacaaacaaatggaagaacattccatgctcatgggtaggaagaatcaatatcgtgaaaatggccatactgcccaaggtaatttacagattcaatgccatccccatcaagctaccaatgactttcgtcacagaattggaaaaaactactttaaagttcatatggaaccaaaaaagagcccgcattgccaagtcaatcctaagccaaaagaacaaagctggaggcatcacactacctgacttcaaagtatactacaaggcttcagtaaccaaaacagcatg

SEQ ID NO: 13258 - DNA, 291 bp, Homo sapiens
  SIMILAR (124)..(291): 961254mologous to Homo sapiens putative p150,accession number U93574,Smith-Waterman Score=286.
atggaggaagatctacgaagcaaatggaaagaaaagaaagcagaggttgcaatcctagtctctgatgaaacagactttaaaccaacaaagatcaaaagagacaaagaaggccagtgcataatgagaataaaatacctaggaatccaacttacaagggacgtgaaggacctcttcaaggagaactacaaaccactgctcaatgaaataaaagaggatacaaacaaatggaagaacattccatgctcatgggtaggaagaatcaatatcgtgaaaatggccataccgcccaag

SEQ ID NO: 13259 - DNA, 2025 bp, Homo sapiens; identical to SEQ ID NO: 5416
  SIMILAR (367)..(1308): 931254mologous to Homo sapiens antiquitin=26g turgor protein homolog,accession number S74728,Smith-Waterman Score=1503.

SEQ ID NO: 13260 - DNA, 2265 bp, Homo sapiens; identical to SEQ ID NO: 2285
  SIMILAR (528)..(4): 981254mologous to unidentified cloning vector 29kD protein essential for the replication of mini F plasmid,accession number AB015619,Smith-Waterman Score=916.

SEQ ID NO: 13261 - DNA, 528 bp, Homo sapiens; identical to SEQ ID NO: 5102
  SIMILAR (3)..(443): 721254mologous to Escherichia coli fecD,accession number M26397,Smith-Waterman Score=501.

SEQ ID NO: 13262 - DNA, 1248 bp, Homo sapiens
  SIMILAR (789)..(4): 941254mologous to Homo sapiens p40,accession number U93564,Smith-Waterman Score=1267.
atggataaattcctcgacacgtacactctcccaagactaaaccaggaagaagttgaatctctgaatagaccaataacaggagctgaaattgtggcaataatcaatagcttaccaaccaaaaagagtccaggaccagatggattcacagccgaattctaccagaggtacaaggaggaactggtaccattccttctgaaactattccaaccaatagaaaaagagggaatcctccctaactcattttatgagaccagcatcatcctgataccaaagccgggcagagacacaaccaaaaaagagaattttagaccaatatccttgatgaacattgatgcaaaaatcctcaataaaatactagcaaaccgaatccagcagcacatcaaaaagcttatccaccatgatcaaagaataaaatacctaggaatccaacttaaaagggacgtgaaggacctcttcaaggagaactacaaaccactgctcaatgaaataaaagaggatacaaacaaatggaagaacattccatgctcatggctaggaagaatcaatatcatgaaaatggccatactgcccaaggtaatttatagattcaatgccatccccatcaagctaccaatgactttcttcacagaattggaaaaaactactttaaagttcatatggaaccaaaaaagagcccacatcgccaagtcaatcctaagccaaaagaacaaagctggaggcatcacactacctgacttcagactatactccaaggctacagtaaccaaaacagcatggtactggtaccaaaacagagatatagatcaatggaacagaacagagccctcagaaataacgccacatatctacaactatctgatctttgacaaacctgagaaaaacaagcaatggggaaaggattccctatttaataaatggtgctgggaaaactggctagccatatgtagaaagctgaaactggatcccttccttacaccttatacaaaaattaattcaagatggattaaagacttaaacgttatacctaaaaccataaaaaccctagaagaaaacctaggcattaccattcaggacataggcatgggcaaggacttcatgtctaaaacaccaaaagcaatggaaacaaaagccaaaattgacaaatgggatctaattaaactaaagagcttctgcatagcaaaagaaactaccatcagagaacaggcaacccataaaatgggagaaaattttcgcaacctactcatctga

SEQ ID NO: 13263 - DNA, 1206 bp, Homo sapiens
  SIMILAR (1)..(741): 881254mologous to Homo sapiens p40,accession number U93570,Smith-Waterman Score=1121.
atggggaaaaaacagagtagaaaaactggaaactctaaaaagcagagcacctctcctcctccaaaggaacgcagttcctcaccagcaatggaacaaagctggatggagaatgactttgatgagttgagagaagaaggcttcagaagatcaaactactccgagctacaggaggaaattcaaaccaaaggcaaagaagatgaaaactttgaaaaaaatttagatgaatgtataactagaataaccaatacagagaattgcttaaaggaactgatggagctgaaagccaagactcgagaaatacatgaagaatgcagaagcctcaggaggcgatgcgatcaactggaagaaagggtatcagtgatggaagatgaaatgaatgaaatgaagatcaacaaaattgatagaccactagcaagactagtaaagaagaaaagagagaagaatcaaatagatgcaataaaaaatgataaaggggatatcaccaccgatcccacagaaatacaaactaccatcagaaaatactacaaacacctctatgcaaataaactagaaaatctagaagaaatggataaattcctcgacacatacaccctcccaagactaaaccaggaagaagttgactctctgaatagaccaataacaggctctgaaattgtggcaatagtcaatagcttaccaaccaaaaagagtccaggaccagatggattcacagccaaattctaccagaggtacaaggaggaactgctgataagcaacttcagcaaagtctcaggatacaaaatcaatgtacaaaaatcacaagcattcttatacactgataatagacaaacagagagccaaatcatgagtgaactcacattcacaattgcttcaaagagaataaaatacctaggaatccaacttacaagggacgtgaaggacctcttcaaggagaactacaaactgctgctcaatgaaataaaagaggatacaaacaaatggaagaacattccatgctcatgggtaggaagaatcaatatcatgaaaatggccatactgcccaaggtaatttatagattcaatgccatccccatcaagctaccaatgactttcttcatagaattggaaaaaaactactttaaagttcatatggaaccaaaaaagagcccgcatagccaagtcaatcctaagccaaaagaacaaagctggaggcatcacactacctga

SEQ ID NO: 13264 - DNA, 690 bp, Homo sapiens; identical to SEQ ID NO: 5406
  SIMILAR (163)..(612): 881254mologous to Homo sapiens putative p150,accession number U93572,Smith-Waterman Score=729.

SEQ ID NO: 13265 - DNA, 1371 bp, Homo sapiens; identical to SEQ ID NO: 5103
  SIMILAR (723)..(1727): 981254mologous to Homo sapiens putative p150,accession number U93569,Smith-Waterman Score=1705.

SEQ ID NO: 13266 - DNA, 2244 bp, Homo sapiens; identical to SEQ ID NO: 5419
  SIMILAR (4152)..(2752): 1001254mologous to Homo sapiens IDN3,accession number AB019494,Smith-Waterman Score=2401.

SEQ ID NO: 13267 - DNA, 1530 bp, Homo sapiens
  SIMILAR (259)..(522): 871254mologous to Homo sapiens NAG13,accession number AF194537,Smith-Waterman Score=375.
cttaagaaatgtataaaaactccagaaatcccttctaaacatgttaggaactgggtccccaaagtcttggaacagcgacgacaaggcttggaaacatacttacaggtagccagcattaccctgataccaaaggcagacgaagacacccccaaaaagaaaactacagacaaaaattcctggacaggcactgatgcaaaagtcttcaataaaatactggaaatcaaattcagcagcatattaaaaagactatattggccagtgttggaagttctggccagggcaatgaggcaggagaaggaaataaagggtattcaattaggaaaagaggaagtcaaattgtcccggtttgcagatgacatgattgtatatctagaaaaccccattgtctcagcccaaaatctccttaagctcataagcaacttcagcaaagtctcaggatacaaaatcaatgtacaaaaatcacaagcattcttatacaccaataacagacaaaaccgagagccaaatcagaataaaatacctaggaatccaacttacaagggacgtgaaggacctcttcaaggagaactacaaaccactgctcaaggaaataaaagaggatacaaacaaatggaagaacattccatgctcatgggtaggaagaatcaatatcgtgaaaatggccatactgcccaagagataccctttctgccagttgtgtcaccaatcagcgatctcaaccacaaaaggcgttttcacgtctatcttgccactgttgatgatcgagcagctggtgagtggacggtcatgcccatcagttgcttggagctctatggagtgcaccactgtctgaagacagatggattttggagaatgacagtgtattcgcataagcttagccaagtggtaactccaactgcagctgctgtaccagatgtggtttcattgcctgagcaaattaacacatttcctggtacctgcgtacaacaactctcgattttgtgtcataatcttgttcacagagattttgatccattttcccttccacaaggtatcacactggtccataacactgataacattatgctgactggatcctataagcaagcagtagcaagcacactggacttattgagatacccgtttcgagccaacacgggaacagaaaacggataccaaggcgaagaatctttatttaacaaagcgtactacggcggcggcacgaacttcttccgtaaagaaagccagaagcttcagcagagcgctaaaaaacgcgatgctgagttagcgaacggcgccctcggtatcatagagttaaataatgattacacattgaaaaaagtaatgaagccgctgatcacttcaaacacggctggtcacctcggactaccgacccgggacaagaagtccaagcagactgcggcggagggggaagttgcagccccggcgctctcggtcaccttggccgtcaccgaagggcctcgcttgcggaagccctcggcccccgaagaaacacaagtgcgccgagccccacgcaagcacgaaaagtag

SEQ ID NO: 13268 - DNA, 1317 bp, Homo sapiens
  SIMILAR (799)..(1314): 871254mologous to Homo sapiens putative p150,accession number U93563,Smith-Waterman Score=770.
atggatcaattcctcgacacatacactctcccaagactaaaccaggaagaagttgaatctctgaatagaccaatagcaggatctgaaattgtggaaataatgaatagcttaccaaccaaaaagagtccaggaccagatgggctcacagccgaattctaccagaggtacaaggaggaactggtaccattccttctgaaactcttccaatcaatagaaaaagagggaatcctccctaactcattttatgagaccagcatcatcctgataccaaagcctggcagagacataacaaaaaaagagaattttagaccaatatccttgatgaacattgatgcaaaaatcctcaataaaatactggcaaaccgaatccagcagcacatcaaaaagcttatccaccatgaccaactgataagcaacttcagcaaagtctcaggatacaaaatcaatgtacaaaaatcacaagcattcttatacaccaataacagacaaacagagagccaaatcatgagtgaactcccattcacaattgcttcaaagagaataaaatacctaggaatccaacttacaagggaagtgaaggacctcttcaaggagaactacaaaccactgctcaatgaaataaaagaggatacaaagaaatggaagaatattccatgctcatgggtaggaagaatcaagatcatgaaaatggccatactggccaaggcctgccttacaagagctcctgaaggacgcactaaacatgaaaaggaacaaccagttccagccactgcaaaaacatgccaaattgtaaagaccattgatgctaggaagaaactgcatgagctattgagcaaaataactgcaccacatcacacttattccaaaattgaccgcatagttggaagtaaagcactcctcagcaaatgtaaaagaacagaaattataacaaactgtctctcagaccacagtgcaatcaaactagaactcaggattaagaaactcactcaaaaccactcaactacatggaaactgaacaacctgctcttgaatgactactggttacataaggaaatgaaggcagaaataaagatgttctttgaaaccaatgagaacaaagacacaacataccagaatctctgggatgcatttaaagcagtgtgtagagggaaatttatagcactaaatgcccacaagagaaagcagaaaagatctaaaattgacaccctaacatcacaattaaaagaactagagaagcaagagcaaacacattcaaaagctagcagaaggcaagaaataactaagatcagagcagaactgaaggagatagagacatga

SEQ ID NO: 13269 - DNA, 846 bp, Homo sapiens; identical to SEQ ID NO: 13028
  SIMILAR (10)..(1833): 941254mologous to Homo sapiens putative p150,accession number U93574,Smith-Waterman Score=2942.

SEQ ID NO: 13270 - DNA, 1011 bp, Homo sapiens
  SIMILAR (181)..(384): 731254mologous to Homo sapiens c-myc binding protein,accession number D50692,Smith-Waterman Score=223.
atgagtgaactcccattcacaattgcttcaaagagaataaaatacctaggaatccaccttacaagggacgtgaaggacctcttcaaggagaactacaaaccactgctcaaggaaataaaagaggataaaaacaaatggaagaacattccatgctcatgggtaggaagaatcaatatcatgaaaatggccatactgtccaaggtaatttatagattcaatgccatccccatcaagctaccaatgactttcttcacagaattggaaaaaactactttaaagttcatatggaaccaaaaaagagcccgcatcgccaagtcaatcctaagccaaaagaacaaagctggaggcatcatgctacctgacttcaaactatgctacaaggctacagtaaccaaaacagcatggtactggtaccaaaacagagatatagatcaatggaacagaacagagccctcagaaataacgccgcatatctacaactatctgatctttgacaaacctgacaaaaacaagcaatggggaaaggattccctatttaataaatggtgctgggaaaactggctagccatatgtagaaagctgaaactggatcccttccttacaccttatacaaaaatcaattcaagatggattaaagacttaaacgttaaacctaaaaccataaaaaccctaaaagaaaacctaggcattaccattcaggacataggcacgggcaaggacttcatgtctaaaacaccaaaagcaatggcaacaaaagccaaaattgacaaatgggatctaattaaactaaagagcttctgcacagcaaaagaaactaccatcagagtgaacaggcaacccacaaaatgggagaaagtttttgcaacatactcatctgacaaaggactaatatccagaatctgcaatgaactcaaacaaatttacaagaaaaaaacaaacaaccccatcaaaaagtgggtgaaggacatgaacagacacaggaacacttttacactgttggtgggactgtaa

SEQ ID NO: 13271 - DNA, 419 bp, Homo sapiens
  SIMILAR (859)..(791): 911254mologous to Homo sapiens Human normal ovarian tissue derived protein 21,accession number Y59744,Smith-Waterman Score= 104.
agaataaaatacctaggaatccaacttacaagggatgtgaaggacctcttcaaggagaactacaaaccactgctcaaggaaataaaagaggatacaaacaaatggaagaacattccatgctcatgggtaggaagaatcaatatcgtgaaaatggccatactgcccaaggagtgaagctgcagacattcgtggtgagtgttacagctcataaagacagtgtggacccaaagagtgagcagcagcaagatttattgcaaaaagtgaaagaaaaatgcttccacagtgtggaaggggacatgagtgggttgcagctgctggctctggcagcctgcctttattccctcatctggcctcacgcacatcctgctgattggtccattttacagagagctgattggtccattttgacagggtgctga

SEQ ID NO: 13272 - DNA, 323 bp, Homo sapiens
  SIMILAR (1)..(168): 1001254mologous to Homo sapiens Human secreted protein, SEQ ID NO: 7284,accession number G03203,Smith-Waterman Score=298.
agaataaaatacctaggaatccaacttacaagggacgtgaaggacctcttcaaggagaactacaaaccactgctcaaggaaataaaagaggatacaaacaaatggaagaacattccatgctcatgggtaggaagaatcaatatcgtgaaaatggccatactgcccaagagataccctttctgccagttgtgtcaccaatcagcgatctcaaccacaaaaggcgttttcacgtctatcttgccactgttgatgatcgagcagctggtgagtggacggtcatgcccatcagttgcttggagctctatggagtgcaccactgtctg

SEQ ID NO: 13273 - DNA, 2021 bp, Homo sapiens
  SIMILAR (55)..(354): 941254mologous to Homo sapiens PTD009,accession number AF078862,Smith-Waterman Score=472.
taagcttgtcccttgggctggcctcagtagaacacactgaatgcccctccgcatttgatctgcgtgactccctgttcattgggctgttttggaaactttatggtgatgttccttttatagaagaaagacacagacatcggttcgaggtaaaccctaacctgatcaaacaatttgagcagaatgacttaagttttgtaggtcaggatgttgatggagacaggatggaaatcattgaactggcaaagttgtttttaagagcaaacagaacagaaataaaggcatcagaattgaggaagaacaccgaagttgttgttagtaaccaggctggaacaccctgcactgactttcaaactgtgctctcggagctggagtctgggctgctgcgggagcaggccatgggggctctgggctccttcctgcttcagctgagcagctccactttatctggctcatgtgccatggttctgcaagagagatttcatctgaagaagagcttcctgtgttctgagactgcacagcttatgccactgattggacatcctaatgtggtcccatgtcagatgtgggctgtgaccctttgcagccgttttacaattcccgttattttagattctcacactgaaaggaaggataaaatgcacacaaatccatatggaacagcttgcagttccctgaactccccagagggttttgcctgttgtgtcttgatacacattcctgacctgcttagtgagaggggaatagggatctatatcctattagaatggttgttcacggactcgttaggtgaacaaggtgaatcggaggtgacaaggtggcgaatcggaggtgaattattaggtgaattgcagcttttgaatgtgtttgctcttgcttttctagttcttttaattgtgatgttagggtgtcagttttggatctttcctgctttctcagcccaaaatctccttaagctgataagcaacttcagcaaagtctcaggatacaaaatcaatgtacaaaaatcacaagcattcttatacaccaataacagacaaacagagagccaaatcatgagtgaactcccattcacaattgcttcaaagagaataaaatacctaggaatccaccttacaagggacgtgaaggacctcttcaaggagaactacaaaccactgctcaatgaaataaaagaggatacaaacaaatggaagaacattccatgctcatgggtaggaagaatcaatatcgtgaaaatggccatactgcccaaggtaatttatagattcaatgccatcccaatcaagctaccaatgactttcttcacagaattggaaaaaactactttaaagttcatatggaaccaaaaaagagccctcattgccaagtcaatcctaagccaaaagaacaaagctggaggcatcacactacctgacttcaaactatactgcaaggctacagtaaccaaaacaacatggtactggtaccaaaacagagatatagatcaatggaacagaacagagccctcagaaataacaccgcatatctgcaactatctgatctttgacaaacctgagaaaaacaaggaatggggaaaggattccctatttaataaatggtgctgggaaaactggctagccatatgtaaaaggctgaaactggatcccttccttacaccttataccaaaatcaattcaagatggattaaagacttaaacgttagacctaaaaccataaaaaccctagaagaaaacctaggcattaccattcaggacataggcatgggcaaggacttcatgtgtaaaacaccgaaagcaatggcaacaaaagccaaaattgacaaatgggatctaattaaactaaagagcttctgcacagcaaaagaaactaccattagagtgaacaggcaacccacaaaatgggagaaaattttcgcaacctactcatctgacaaagggctaatatccagaatctacaatgaactcaaacaaatttacaagaaaaaacaaacaaccccatcaaaaagtgggcgaaggacatga

SEQ ID NO: 13274 - DNA, 1476 bp, Homo sapiens
  SIMILAR (31)..(387): 851254mologous to Homo sapiens 150 kDa oxygen-regulated protein ORP150,accession number U65785,Smith-Waterman Score=497.
atgcatgtattgattcaacaatattctctgggtgactgctataggcctgcaaactgttgtaggcactggaaactaaaagggcaagcttatggccttacagaagctgacattctagtggaaagtggaacaagattgtacctggttgagagcgtcttgctcctgtgggaaagagaaggtagcagggcagggacagttcggctgacagtttttctatcagctgacctaagtgagtcaattcctatttttatgatactgttgtctgactggctgagcaaagaagattgtttttgtgaggatggagaggtgatctgcatgaggggcaactttaaacttcaagaatgtatcagtcaggacacagataagaaagggaatccatcccaggtggttcagacgaaggggtctcaatgcaagggttacctgcagagtccaatgggactggttcttgttggcagtcttcttccacatgctccatcagggacccaggcttttgttccactctcctctgtccgcagagaactatctattcaactggcatgtgaggagaaagagaaagctaagatcagtcaggggaattttctggaccattccaagaagtcaatgttggaagttctggccagggcaatcaggcaggagaaggaaataaagggcattcaattaggaaaagaggaagtcaaattgtccctgtttgcagatgacatgattgtatatctagaaaaccccattgtctcagcccaaaatctccttaagctgataagcaacttctgcaaagtctcaggatacaaaatcaatgtacaaaaatcacaagcattcttatacaccaataacagacaaacagagagccaaatcctgagtgaactcccattcacaattgattcaaagagaataaaatacctaggaatccaacttacaagggacgtgaaggacctcttcaaggagaactacaaaccactgctcaatgaaataaaagaggatacaaacaaatggaagaacattctatgctcatgggtaggaagaatcaatatcgtgaaaatggccatactgcccaaggtaatttatagattcaatgccatcctcatcaagctaccaatgactttcttcacagaattggaaaaaactactttaaagttcatatggaatgaaaaaagagcccacattgctaagtcaatcctaagccaaaagaacaaagctggaggcgtcatgctacctgacttcaaactatactacaaggctacagtaacccaaacagcatgctactggtaccaaaacagacatatagaccaatggaacagaacagagccctcagaaataatgccgcatatctacaactatctgatcttcgacaaacctgacaaaaacaagcaatggggaaaggattccctatttaataaatggtgctgggaaaactggctagccatatgtagaaagctgaaactggatcccttccttacaccttatacaaaaattaattcaagatag

SEQ ID NO: 13275 - DNA, 831 bp, Homo sapiens
  SIMILAR (198)..(692): 621254mologous to Homo sapiens PTD009,accession number AF078862,Smith-Waterman Score=438.
atgattatctcagtagatgcagaaaaggccttcgacaaaattcaacagcccttcatgctaaaacctctcaataaactaggtattgatggaacatattgcaaaataataagagctatttatgacaaacccacagccaatatcatactgaatgggcaaaaactggaagcattccctttgaaaactggcacaagacagggatgtcctctctcaccactcctattcaacatagtgttggaagttctggccagggcaatcaggaaagagaaagaaataaagtgtattcaattaggaaaagaggaagtgaaattgtccctgtttgcagatgacatgattgtatatttagaaaaccacatcgtctcagcccaaaatctcctaaacctgataagcaacttcagcaaagtctcaggataccaaatcaatgtgcaaaaatcacaagcattcctaaacaccaatagcagacaaacaaagagccaaatcatgagtgaactcccattcacagttgctacaaagagaataaaatacctaggaatccaacttacaagggatgtgaaggacctcttcaaggagaactacaaaccactgctcaaggaaataaaagaggatacaaacaaatggaagaacattccatgctcatgggtaggaagaatcaatatcatgaaaatggccatactgctcaaggggatacgttgtaagatccccagtggatgcctgaaaccaaggatagtactgaaactgactgccgtcaatcagaacacatttctgtttatgtctcccatccacaaattcaatgccttttccatcttaacaaagcacttactatgggctgtggct

SEQ ID NO: 13276 - DNA, 480 bp, Homo sapiens
  SIMILAR (1)..(204): 921254mologous to Homo sapiens Human secreted protein, SEQ ID NO: 7284,accession number G03203,Smith-Waterman Score=326.
atgagtgaattctctttcataattgcttcaaagagaataaaatacctaggaatccaacttacaagggatgtgaaggacctcttcaaggagaactacaaaccactgctcaatgaaataaaagaggatacaaagaaatggaagaacattccatgctcatgggtaggaagaatcaatatcgtgaaaatggccatactgcccaaggtaagttcaggccctggggaagctggtgccaaagctggggccttcattggccacatagggactgcagctgtcagcacagagagagagagggaaagagagagaaatagagtttggaaattgttcagcaagagctgggaaatgcagtcacacagaagaatgactggtccatcatcaaatcctaatgaaattacctccaaatatctcggtgcctttcagcttctgttagtggagctggacaaatctgatttgagacaagtaattttaagcgtgttcttaaag

SEQ ID NO: 13277 - DNA, 619 bp, Homo sapiens
  SIMILAR (1)..(357): 991254mologous to Homo sapiens putative p150,accession number U93565,Smith-Waterman Score=604.
atgattgtttatctagaaaaccccatcgtctcagcccaaaatctccttaagctgataagcaacttcagcaaagtctcaggatacaaaatcaatgtacaaaaatcacaagcattcttatacaccaacaacagacaaacagagagccaaatcatgggtgaactcccattcacaattgcttcaaagagaataaaatacctaggaatccaacttacaagggatgtgaaggacctcttcaaggagaactacaaaccactgctcaaggaaataaaagaggacacaaacaaatggaagaacattccatgctcatgggtaggaagaatcaatatcgtgaaaatggccatactgcccaaggtcttaaagatggtgtgtccggagtttgttctttctgatgttcggatgtgttcagagtttcttccttctggtgggttcgtggtcttgctggcttcaggagtgaaggtgcagaccttcgtggtgagtgttacagctcttaagctggcatgtttggagttgttcgttcttccagtccggagttgtccattcttcctgtccggagttgttcattcttcccggtgggctcctggtctcgctggcctcaggagtgaacctgcagacctttgcg

SEQ ID NO: 13278 - DNA, 1296 bp, Homo sapiens; identical to SEQ ID NO: 5429
  SIMILAR (2)..(994): 721254mologous to multiple sclerosis associated retrovirus polyprotein,accession number AF009668,Smith-Waterman Score=1188.

SEQ ID NO: 13279 - DNA, 1041 bp, Homo sapiens; identical to SEQ ID NO: 5430
  SIMILAR (466)..(1038): 941254mologous to Homo sapiens putative p150,accession number U93574,Smith-Waterman Score=948.

SEQ ID NO: 13280 - DNA, 718 bp, Homo sapiens; identical to SEQ ID NO: 13035
  SIMILAR (256)..(552): 421254mologous to Homo sapiens p40,accession number U93571,Smith-Waterman Score=197.

SEQ ID NO: 13281 - DNA, 1227 bp, Homo sapiens; identical to SEQ ID NO: 10398
  SIMILAR (151)..(783): 791254mologous to Cloning vector pZC320 SopA,accession number U26464,Smith-Waterman Score=871.
  misc_feature (1)...(1227): n = a,t,c or g

SEQ ID NO: 13282 - DNA, 992 bp, Homo sapiens; identical to SEQ ID NO: 10072
  SIMILAR (1)..(861): 961254mologous to Homo sapiens putative p150,accession number U93572,Smith-Waterman Score=1418.

SEQ ID NO: 13283 - DNA, 1239 bp, Homo sapiens
  SIMILAR (622)..(1017): 961254mologous to Homo sapiens MRP-1 (motility related protein),accession number X60111,Smith-Waterman Score=663.
atggataaattcctcgacacatacactctcccaagactaaaccaggaagaagttgaatctctgactagaccaataacaggatctgaaattgtggcaataatcaatagcttaccaaccaaaaagagtccaggaccagatggattcacagccgatttctaccagagatgcagaaaaggccttgacaaaattcaacaaccctttatgctaaaaactctcaataaattaggtattgatgggatgtatttcaaaataataagagctatctatgacaaacccacagccaatatcatactgaatgggcaaaaactggaagcattccctttgaaaactggcacaagacagggatgccctctctcaccactcctatttaacatagtgttggaagttctggccagggcaatcaggcaggagaaggaaataaagggtattcaattaggaaaagaggaagtcaaattgtccctgtttgcagacgacatgattgtatatctagaaaaccccattgtctcagcccaaaatctccttaagctgataagcaacttcagcaaagtctcaggatacaaaatcaatgtacaaaaatcacaagcattcttatacaccaacagacaaacagagagccaaatcatgagtgaactcccattcacaattgcttcaaagagaataaaatacttaggaatccaacttacaagggatgtgaaggacctcttcaaggagaactacaaaccactgctcaatgaaataaaagaggatacaaacaaatggaagaacattccatgttcatgggtaggaagaatcaatatcatgaaaatgtccatactgcccaaggtaatttatagattcaatgccatccccatcaagctaccaatgactttcttcacagaattggaaaaaactactttaaagttcatatggaaccaaaaaagagcccgcatcgccaagtcaatcctaagccaaaagaagaaagctggaggcgtcacgctacctgacttcaaactatactacaaggctacagtaaccaaaacagcatggagctatttgttcaggggaaaaaatggaaagtggaaagatgaagtcagttttctcgtgatgttttcaaggatgaatacttgtgaaggacaagcacgcaatctcttcttagaaaaagtcaatccagagaacctagaaggtccttcggagtggcaaatagaagatcgcaacttgaaggaaaacaaaagtaagaaaatcggaagactcaacccctga

SEQ ID NO: 13284 - DNA, 1074 bp, Homo sapiens; identical to SEQ ID NO: 5437
  SIMILAR (229)..(594): 321254mologous to Caenorhabditis elegans ZK1128.2,accession number Z47357,Smith-Waterman Score=105.

SEQ ID NO: 13285 - DNA, 1397 bp, Homo sapiens
atgtggttggcaaaatcagtacctgttatgggagtatctgttgcattaggaacaatcgaggaagtttgttcttttttccatcgatcaccacaactgcttttagaacttgacaacaaaacggcggcggaaggagaaaggctccccgcaatccaatcactcggcagcacgtggccgggagtgaagtttattctgcaagtgttccggggtgatagtgttgagaagacctttcgggtatggtcaggtaatgaacgtgaccagcagctgctcactgaggacgcactggatgatctcatcccttcttttctactgactggtcaacagacaccggcgttcggtcgaagagtatctggtgtcatagaaattgccgatgggagtcgccgtcgtaaagctgctgcacttaccgaaagtgattatcgtgttctggttggcgagctggatgatgagcagatggctgcattatccagattgggtaacgattatcgcccaacaagtgcttatgaacgtggtcagcgttatgcaagccgattgcagaatgaatttgctggaaatatttctgcgctggctgatgcggaaaatatttcacgtaagattattacccgctgtatcaacaccgccaaattgcctaaatcagttgttgctcttttttctcaccccggtgaactatctgcccggtcaggtgatgcacttcaaaaagcctttacagataaagaggaattacttaagcagcaggcatctaaccttcatgagcagaaaaaagctgggcaaagtctcaggatcacaaaatccatgtgcaaaaatcgccaagcatttttatccgccaatagcggacagacagagagccaaatcatgagtgaactcccattcacaatggcttcaaagagaataaaatacctaggaatccaacttacaagggacgtgaaggacctcttcaaggagaagtacaaatcactgctcaatgaaataaaagaggatacaaacaaatggaagaacaatccatgctcatgggtaggaagaatcaatatcatgaaaatggccatactgcccaaggtaatttatagattcaatgccatccccatcaagctaccaatgactttcttcacagaattggaaaaaactacttttaagttcatatggaaccaaaaaagagcccacatcgccaagtcaaacctaagccaaaagaacaaagctggaggcatcacactacctgacttcaaactatactacaaggctacagtaaccaaaacaacatgatactggtaccaaaacagagatatagaccaatggaacagaacagaggcctcagaaataatgccacacatctacaacaatctgatctttgacaaacctgagaaaaacaagcaatggggaaaggattccctatttaataaatggtgctg

SEQ ID NO: 13286 - DNA, 2134 bp, Homo sapiens
  SIMILAR (1)..(600): 991254mologous to Homo sapiens CGI-27 protein,accession number AF132961,Smith-Waterman Score=1064.
ttatttaattagatcccatttgtcaattttggcttttgttgccattgcttttggtgttttagacatgaagtccttgcccatgcctatgtcctgaatggtattgcctaggttttcttctagggtttttatggttttaggtctaacatgtaagtctttaatccatcttgaattaatttttgtataaggtgtaaggaagggatccagtttcagctttctacatatggctagacagttttcccagcaccagttattaaatagggaatcatttccccatttcttgtttttgtcaggtttgcaaaagatcagattcttgtagatatggggcattatttctgagggctctgttctgttccgttggtctatatctctgttttggtaccagtaccatgctgttttggttactgtagcactgtaggatagtttgaagtcaggtagtgtgatgcctccagctttgttctttttgcttaggattgacttggcaatgcaggctcttttttgattccatatgaactttaaagtaattttttccaattctgtgaagaaagtcattggtagcttgatggggatggcattgaatctataaattaccttgggcagcatggccattttcatgatattgattcttcctacccatgagcatggaatgttcttccatttgtttgtatcctcttttatttcattgagcagtggtttgtagttctccttgaagaggtccttcacgtcccttgtaagttggattcctaggtattttattctctttgaagcaattgtgaatgggagttcactcatgatttggctctctgtttgtctgttatttgtgtataagaatacttgtgatttttgcacattgattttgtatcctgagactttgctgaagttgcccaacatgaacgctacgtcttgtgcactctcccagttgtagtcacaggcagagggccccccggggtctttctccccaaaagccccccaaattttccggggggccagcccaaaacaaaacccgttttccggggggggcggggggcaaagctttttccccgagcataaaattttggggatggccgggtactcctctgagacaaaacttccagaggaacgatcaggcagcagcatttgtggttcaccaatatccactgttgtgcagccaccgctgctgacacccagccaaacagggtctggagtggacctccagtaaactccaacagacctgcatctgagggtcctgactgttagaaggaaaactaacaaacagaaaggacatccacaccaaaaccccatctgtacatcaccatcatcaaagaccaaagtgttggaagttctggccagggcaatcaggcaagagaaggaaataaagggtattcaagtaggaaaagaggaagtcaaattgtccctgtttgcagatgacatgattgtatatctagaaaaccccatcgtctcagcccaaaatctccttaagctgataagcaacttcagcaaagtgtcaggatacaaaatcaatgtgcaaaaatcacaagcattcttatacaccaataacagacaaacagagagccaaatcacgagtgaactcccattcacaattgcttcaaagagaataaaatacctaggaatccaacttacaaggggcgtgaaggacctcttcaaggagaactacaaaccactgctcaatgaaataaaagaggatacaaacaaatggaagaacattccatgctcatgggtaggaataatcaatatcgtgaaaatggccatactgcccaaggtaatttatagattcaatgccatccccatcaagctaccaatgactttcttcacagaattggaaacaactactttaaagttcatatggaaccaaaagagagcccgcattgccaagtcaatcctaagccaaaagaacaaagctggaggcatcacgctacctgacttcaaactatactacaaggctacagtaaccaaaacagcatggtactggtaccaaaacagagatatagaccaatggaacagaatagagccctcagaaataatgccgcatatctacaaaaaagtccaaatagccaaagcaactctaaacaaaatgaacaaacctggaggcatcacattacctgactttaaaatatattacaaggatatagtaacctaa

SEQ ID NO: 13287 - DNA, 2271 bp, Homo sapiens
  SIMILAR (286)..(678): 881254mologous to Homo sapiens IFN-gamma receptor beta- subunit,accession number R75783,Smith-Waterman Score=613.
gtactgctgtcctttggcacacctctagtgctgaccactgaccttctccaggctctctcctctttgcctttcatggaatcagggctttttcaaggtgaaggagatgaaatacaaattaccagcatagaatactataaacacctctacgcaaataaactagaaaatctagaagaaatggataaactcctcgacacatacaccctcccaagactaaaccaggaaggagttgaatctctgaatagaccaataacaggatctgaaattgaggcaataattaatagcttaccaaccaaaaaaggtccaggaccagatggattcacagccaaattctgccagaggtacaaggaggagctgcacatcaaaaagcttatccaccatgatcaagtgggcttcatccctgggatgcaaggctggttcaacatacgcaaatcaataaacgtaatcgagcatataaacagaaccaaggacaaaaaccacatgattatcttaatagatgcagaaaaggcctttgacaaaattcaacaacccttcatgctaaaaactctcaataaattaggtattgatgggacgtatctcaaaataataagagctatctatggcaaacccacagtcaatatcatactgaataggcaaaaactggaagcattccctttgaaaactggcacaagacagggatgccctctctcaccactcctattcaacatagtgttggaagttctggccaaggcaattaggcaggagaaggaaataaagggtattcaattaggaaaagaggaagtcaaattgtccctgtttgcggacgacatgattgtatatctagaaaaccccatcatctcagcccaaaatctccttaagctgacaggcaacttcagcaaagtctcaggatacaaaatcaatgtgcaaaaatcacaagcattcttatacaccaataacagacaaacagagagccaaatcatgagtgaactcccattcacaattgcttcaaagagaataaaatacctaggaatccaacttacaagggatgtgaaggacctcgtaaaggagaactacaaaccactgctcaaggaaataaaagaggatacaaacaaatggaagaacattccatgctcatgggtaggaagaatcaatatcctgaaaatggccatactgcccaaggtaatttatagattcaatgccatccccatcaagctaccaatgactttcttcacagaattggaaaaaactactttaaagttcatatggaaccaaaaaagagcctgcattgccaagtcaatcctaagccaaaagaacaaagctggaggcatcacgctacctgacttcaagcgatgctacaaggctacagtaaccaaaacagcatggtactggtaccagaacagaggtatagatcaagggaacagaacagagccctcagaaataatgccacatatctacaaccatgtgatctttgacaaacctgacaaaaacaagcaatggggaaacgattccctagttaataaatggtgctgggaaaactggctagccatgtgtagaaagctgaaactggatcccttccttacaccttatacaaaaattaattcaagatggattaaagacttacatgttagacctaaaaccataaaaaccctagaagaaaacctaggcaatatcattcaggacataggcatgggcaaggacttcatatctaaagcaccaaaagcaacagcaacaaaagccaatattgacaaatgggatctaattaaactaaagagcttctgcacagcaaaagcaactaccatcagagtgaacaggcaacctacagaatgggagaaaatttttgcaatctactcatctgacaaagggctaatatccagaatctacaatgaactcaaacaaatttacaagaaaaaaacaaacaaccccatcaaaaagtgggcaaaggatatgaacagacacttctcaaaagaagatatttatgcagccaaaagacacatgaaaaaatgctcatcatcactggccatcagagaaatgcaaattgaaaccacaatgagataccatctcacaccagttagaatggcgatcattaaaaagtcaggaaacaacaggaatatccagactgtgctcctactcaggatcccattccagggcctggttccttcccccagcgggcagacacatccagtaggcgaccagccagcagcgcatgtagacagcatcgacgccgataccaggctcagaggacagaaccatattccagaggagctggggagaggcgttgtctccaatccagttgag

SEQ ID NO: 13288 - DNA, 3417 bp, Homo sapiens
  SIMILAR (1041)..(460): 921254mologous to Escherichia coli K12 putative lipase (EC 3.1.1.-),accession number AE000153,Smith-Waterman Score=923.
cagggcaatcaggcaggagaaggaaataaaaggcattcaattaggaaaagaggaagtcaaattgtccccgtttgcagatgacatgattgtatatctagaaaaccccatcgtctcagcccaaaatctccttaagctgataagcaacttcagcaaagtctcaggatacaaaatcaatgtgcaaaaatcacaagcattcttatacagcaataaaagacaaacagagaaccaaatcatgagtgaactcccattcacaattgcttcaaagagaataaaatacctaggaatccaacttacaagggatgtgaaggacctcttcaaggagaactacaaaccactgctcaatgaaataaaagaggataaaaacaaatggaagaacattccatgctcacgggtaggaagaatcaatatcgtgaaaatggccatactgcccaaggtaatttatagattcaagtttccattgacaacagatcaagaaaatgtggtcagattaacgagacagaaagttaacaagggtatccaggaattgaactcagctctgccccgagtggacctaatagacatctacagaactctccagcccaaatcaacagaatatacattcttttcagtaccacaccacaactattccaaaattgaccacatagttggaagtaaagcactcctcagcaaatgtaaaagaacagaaattataacaaactgtctctcagaccacagtgcaatcaaactagaactcaggattaagaagcacactcaaaaccgctcaactacatggaaactgaacaacctgctcctgaatgactactgggtacataacaaaatgaaggcagaaataaagatgttctttgaaaccaatgagaacaaagacacaacataccaaaatctctgggacacattcaaagcagtatgtagagggaaatttatagcactaaatgcccacaagagaaagcaggaaagatctaaaattgacaccctaacatcacaattaaaagaactagaaaagcaagagcaaacacattcaaaagctagcagaaggcaacaaataactaagatcagagcagaactgaaggaaatagagacacaaaaaaacccttcaaaaaatcaatgaatccaggagctggttttttgaaaggatcaacaaaattgatagaccactagcaagactaataaagaaaaaaagagagaagaatcaaatagacacaataaaaaatgataaaggggatatcaccactgatcccacagaaatacaaactaccatcagagaatactacaaacacctctacgcaaataaactagaaaatctagacgaaatggataaattcctccacacatacactctcccaagactaaaccaggaagaagttgaatctctgaatggaccaataacaggagctgaaattgtggcaataatcgatagtttaccaaccaaaaagagtccaggaccagatggattcacagctgaattctaccagaggtacaaggaggaactggtaccattccttctgaaactattccaatcaatagaaaaagagggaatcctccctaactcattttatgaggccagcatcattctgataccaaagctgggcagagacacaaccaaaaaagagaattttagaccactatccttgatgaacattgatgcaaaaatcctcaataaaatactggcaaaacgaatccagcagcacatcaaaaagcttatccaccatgatcaagtgggcttcatccctgggatgcaaggctggttcaatatacgcaaatcaataaatgtaatccagcatataaacagaggcaaagacaaaaaccacatgattatctcaatagatgcagaaaaagcctttgacaaaattcaacaacccttcatgctaaaaactctcaataaattaggtattgatgggacgtatttcaaaataataagagctatctatgacaaacccacagccaatatcatactgaatgggcaaaaactggaagcattccctttgaaaactggcacaagacagggatgccctctctcaccactcctattcaacatagtgttggaagttctggccagggcaattaggcaggagaaggaaataaagctgataagcaacttcagcaaagtctcaggatacaaaatcaatgtacaaaaatcacaagcattcttatacaccaacaacagacaaacagagagccaaatcatgagtcaactcccattcacaattgcttcaaagagaataaaatacctaggaatccaacttacaagggatgtgaaggacctcttcaaggagaactacaaaccactgctcaaggaaataaaagaggatacaaacaaatggaagaacattccatgctcatgggtaggaagaatcaatatcatgaaaatggccatactgcccaaggtaatttacagattcaatgccatccccatcaagctaccaatgactttcttcacagaattggaaaaaactactttcaagttcatatggaaccaaaaaagagcccgcatcaccaagtcaatcctaagccaaaagaacaaagctggaggcatcacgctacctgacttcaaactatactacaaggctacagtaaccaaaacagcatggtactggtaccaaaacagagatatagatcaatggaacagaacagagccctcagaaataatgctgcatatctacaactatctgatctttgacaaacctgagaaaaacaagcaatggggaaaggattccctatttaataaatggtgctgggaaaactggctagccatatgtagaaagctgaaactggatcccttccttacaccttatacaaaaatcaattcaagatggattaaagatttaaacgttagacctaaaaccataaaaaccctagaagaaaacctaggcattaccattcaggacataggcataggcaaggacttcatgtccaaaacaccaaaagcaatggcaacaaaagccaaaattgacaaatgggatctaattaaactaaagagcttctgcacagcaaaagaaactaccatcagagtgaacagaaaacctacagagaggggagaaaattttcgcaacctactcatctgacaaagggctaatatccagaatctacaatgaactcaaacaaatttacaagaaaaaaacaaacaaccccatcaaaaagtgggcaaaggacatgaacagacacttctcaaaagaagacatttatgcagccaaaaatcacacgaaaaaatgctcatcatcactggccatcagagaaatgccaatcaaaaccacaatgagataccatctcacaccagttataatcagcccctacctggctttgcccctcaacaggccctggcagcttaacacaaaagacagaaacttttgggacctctctggccccacccattgcctgaaacaccagaaaacctccccgggtaacataaggcaagcacagatc

SEQ ID NO: 13289 - DNA, 2117 bp, Homo sapiens
  SIMILAR (733)..(1770): 991254mologous to Escherichia coli similar to,accession number D90876,Smith-Waterman Score=1820.
atggagctgaaaaccaaggctcgagaactacgtgaagaatgcagaagcctcaggagccgatgcgatcaactggaagaaagggtatcagcaatggaagatgaaatgaatgaaatgaagcgagaagggaagtttagagaaaaaagaataaaaagaaatgagcaaagcctccaagaaatatgggactatgtgaaaagaccaaatctacgtctgattggtgtacctgaaagtgatggggagaatggaaccaagttggaaaacactctgcaggatattatccaggagaacttccccaatctagcaaggcaggccaaccatataaacagagccaaagacaaaacccacatgattatctcaatagatgcagaaaaagcctttgacaaaattcaacaactcttcatgctaaaaactctcaataaattaggtattgatgggacgtatttcaaaataataagagctatctatgacaaacccacagccaatatcatactgaatgggcaaaaactggaagcattccctttgaaaactggcacaagacagggatgccctctctcaccgctcctattcaacatagtgttggaagttctggccagggcaatcaggcaggagaaggaaataaagggtattcaattagcaaaagaggaagtcaaattgtccctgtttgcagacgacatgattgtttatctagaaaaccccatcgtctcagcccaaaatctccttaagctgataagcaacttcggcaaagtctcaggatacaaaatcaatgtacaaaaatcacaagcattcttatacaccaacaccagacaaacagagagccaaatcatgagtgaactcccattcacaattgcttcaaagagaataaaatacctaggaatccaacttacaagggatgtgaaggacctcttcaaggagaactacaaaccactgctcaaggaaataaaagaggacacaaacaaatggaagaacattccatgctcatgggtaggaagaatcaatatcgtgaaaatggccatactgcccaaggtaatttacagattcaatgccatccccatcaagctaccaatgactttcttcacagaattggaaaaaactactttaaagttcatatggaaccaaaaaagagcccgcatcgccaagtcaatcctaagccaaaagaacaaagctggaggcatcacgctacctgacttcaaactatactacaaggctacagtaaccaaaacagcatggtactggtaccaaaacaaagatatagaccaatggaacagaacagagccctcagaaataatgtcacatatctacaactatccgatctttgacaaacctgacaaaaacaagaaatggggaaacaattccctatttaataaatggtgctgggaaaactggctagccatatgtagaaagctgaaactagatcccttccttacaccttatactaaaattaattcaagatggattaaagacttacatgttagacctaaaaccataaaaaccctagaagaaaacctaagcaataccattcaggacataggcatgggcaaggacttcatgtctaaaacaccaaaagcaatggcaacaaaagccaaaattgaccaatgggatctaattaaactaaagagcttctgcacagcaaaggaaactaccatcagagtgaacaggcaacctacagaatgggagaaaatttttgcaacccactcatctgacaaagggctactgtccagaatctacaatgaactcaaacaaatttacaagaaaaaaacagacaaccccatcaacaagtgggcgaaggacatgaacagacacttctcaaaagaagacatttatgcagccaaaagacacatgaaaaaatgctcatcatcactggccatcagagaaatgcaaatcaaaaccacaatgagataccatctcacaccagttagaatggcaatcattaaaaagtcaggaaacaacaggtggaatatatcagaggacccaggtttggctctgtcctgtatcaaggaggcctccatcactgtgccaagcttgcgatgtgctgtgtccattatccagggcatattgagcaactgggtacaaaagatcacaggctcagggtctatgagagcctctgttttcagagaagcctg

SEQ ID NO: 13290 - DNA, 1942 bp, Homo sapiens
  SIMILAR (547)..(1104): 951254mologous to Escherichia coli Protease II (EC 3.4.21.83) (Oligopeptidase B),accession number D90827,Smith-Waterman Score= 951.
atggcgtccccaggacctgcacccacagccagtcccaaaatccactctgagctgttaacagcaaccagagaagctcagagacatcatcctgtgccccgtggtcaagacctagtgacctcagaatcattctcgctctccttctgcttctcagctgccatcttcatttttgaacttttgggttcaaactcagaaggagtcacagatcttagactgtggctatgccagccagcgcccaggtgcggggagtggacctacaaccccttggagcagtgctgtgatgacggtgtcatcctagacttgaaccagacccggctctgcggctccagctgcaccttctggccctgcttccagcactgctgcctggagtctttgggctctcagaaccagacagttgtgaggttcaaggtcccaggcatgaagccagattgcaagtcctcccctatcaccaggatctgtgcccaggctggagtgcaaataagcaacttcagcaaagtctcaggatacaaaatcaatgtacaaaaatcacaagcattcttatacaccaacaacagacaaacagagagccaaatcatgagtgaactcccattcacaattgcttcacagagaataaaatacctaggaatccaacttacaagggatgtgaaggacctcttcaaggagaactacaaaccactgctcaaggaaataaaagaggatacaaacaaatggaagaacattccatgctcatgggtaggaagaatcaatatcgtgaaaatggccatactgcccaaggtaatttacagattcaatgccatccccatcaagctaccaatgactttcttcacagaattggaaaaaactactttaaagttcatatggaaccaaaaaagagccctcatcgccaagtcaatcctaagccaaaagaacaaagctggaggcatcacactacctgacttcaaactatactataaggctacagtaaccaaaacagcatggtactggtaccaaaacagagatatagatcaatggaacagaacagagccctcagaaataacgccgcatatctacaactatctgatctttgacaaacctgagaaaaacaagcaatggggaaaggattccctatttaataaatggtgctgggaaaactggctagccatatgtagaaagctgaaactggatcccttccttacaccttatacaaaaatcaattcaagatggattaaagacttaaacgttagacctaaaaccataaaaaccctagaagaaaacctaggcattaccattcaggacataggcatgagcaaggacttcatgtctaaaacaccaaaagcaatggcaacaaaagacaaaattgacaaatgggatctaattaaactaaagagcttctgcacagcaaaagaaactaccatcagagttgaacaggcaacctacaaaatgggagaaaatttttgcaacctactcatctgacaaagggctaatatccagaatctacagtgaactcaaacaaatttacaagaaagaaacaaacaaccccatcaaaaagtgggcaaaggacatgaacagacacttctcaaaagaagacatttatgcagccaaaaaacacatgaaaaaatgctcgtcatcactggccatcagagaaatgcaaatcaaaaccacaatgagataccatctcacaccagttagaatggcaatcattaaaaagtcaggaaacaacagactctgcagggaactgaggataaaagcggctgcaggggagcaagacctggagcgtcatcgagagattgcaaaaacaattcactgccaacagactgtcccagcagggtcccagtgctatggtcgtggccctgattggcatgctgcccctcggatgcccaatcagatggaaccggaagaaatcgaatacagagtcagtccactttatctctgtataaccacccaaatgaacagcatgggaaattga

SEQ ID NO: 13291 - DNA, 1669 bp, Homo sapiens
  SIMILAR (79)..(594): 831254mologous to Escherichia coli glutamate synthase large subunit (EC 2.6.1.53),accession number M18747,Smith-Waterman Score= 664.
atggagtcttttcagtgtgccctaaaggaggtgggccttgatgagccactgagacttgctggcttcaggggagactcagcacattaccagctctggtggctacagggcaaaagtaaagaggcaaaagcagaggcaaaagtaaaggcgactttgtcttgcaccttaggtaccaaaaccgccacagtgttggaagttctggccagggcaatcaggcaggagaaggaaataaagggtattcaattaggaaaagaggaagtcaaattgtccctgtttgcagacgacatgattgtttatctagaaaaccccatcgtctcagcccaaaatctccttaagctgataagcaacttcagcaaagtctcaggatacaaaatcaatgtacaaaaatcacaagcattcttatacaccaacaacagacaaacagagagccaaatcatgagtgaactcccattcacaattgcttcaaagagaataaaatacctaggaatccaacttacaagggatgtgaaggacctcttcaaggagaactacaaaccactgctcaaggaaataaaagaggatacaaacaaatggaagaacattccatgctcatgggtaggaagaatcaatatcgtgaaaatggccatactgcccaagggaatttacagattcaatgccatccccatcaagctaccaatgattttcttcacagaattggaaaaaactactttaaagttcatatggaaccaaaaaagagcccgcatcgccaagtcaatcctaagccaaaagaacaaatctggaggcatcacactacctgacttcaaactatactacaaggctacagtaaccaaaacagcatggtactggtcccaaaacagagatatagatcaatggaacagaacagagccctcagaaataacgccgcgtatctacaactatctgatctttgacaaacctgagaaaaacaagcaatggggaaaggattccctatttaataaatggtgctgggaaaactggctagccatatgtagaaagctgaaactggatcccttccttacaccttatacaaaaatcaattcaagatggattaaagatttaaacgttagacctaaaaccataaaaaccctagaagaaaacctaggcattaccattcaggacataggcgtgggcaaggacttcatgtccaaaacaccaaaagcaatggcaacaaaagccaaaattgacaaatgggatctaattaaactaaagagcttctgcacagcaaaagaaactaccatcagagtgaacaggcaacctacaacatgggagaaaattttcgcaacctactcatctgacaaagggctaatatccagaatctacaatgaactcaaacaaatttacaagaaaaaaacaaacaaccccatcaaaaagtgggcgaaggacatgaacagacacttctcaaaagaagacatttatgcagccaaaaaacacatgaaaaaatgctcatcatcactggccatcagaaaaattctttttaaaaaaataagttctacctttattttagattctggggttacattgcagcgtttggatttcaacattctcttgaatcttgttgatcttctttgtcaccctgattctgaattttatgtctgtcatttcagacatttcaatctggttaggatccaccagggagctaatgcaatttttgcag

SEQ ID NO: 13292 - DNA, 2826 bp, Homo sapiens
  SIMILAR (1180)..(2541): 961254mologous to Homo sapiens putative p150,accession number U93564,Smith-Waterman Score=2308.
atggccaggacaagttacgggcagcacttcttcccaaccctcatttccatgaatatagacagtggtaggcagaataatggcatccccaaattgtccacatcctactcactgaaacctatgaatacattatgttacctggtaaaaagggacttggaaggtgtgcttaagttaaggatcttgacatgggagagtagcctggattatccaggtgggcctagtgtaatcacaaaggtccttataagacagaaggagggccagagtcagagaacgagatatgacaatggaagcagaggttggagtgatgccatcgctgtaaaaaggccacaagccaaggaatgtgggtggccactagaggctggaaaaggcaaggaatggattcttagaaaggaatgcatccctgccaacaccttgatgttagcccagtgcccacccacactcagggtgggtggaagtgtctgcagtgcctggaggatgattcagaactcagatggggagaggaggaaaaggaacagaatccagcttcaggcagtaagactctcaaaagttatacatgatacttttagaaactttccaaggtttgttcattccagagagctatcaaagggagctgagaaaagctcctctttgaagaagggtttggagcaagtcattatctggacaaaatgtagacaatgtggagaaagcaggtgtacaaagaaagtggaggaacggaaagtacttcataacaccttcatcagtaccagcaccactataaccactctaggacagaagcatcaatttgctgtgaagaaatatgccagaattaccacctacctcacatcttctagggaaaatcaagggaaaggtttatgtcctcagctaaacaaaatcgctgcctctttcaccaaggggccaatcagcactgaccctgggatagcagagccctgtgcaggggtggcagatggagtgagacccctggaaaccaccatttcattctttggttctgtaaattttgagcacttttctatgcctcagatcccagaacagagtcagccagacttgtacctaccagacaggtcactgaaaatcttccacaaggaaatacaatcaaccaaagagaaaacaaaaaagaaaatggtcgaatctatcagggaaaagaaatggaaaacaaggtggttttgcacaggattaaagaattatctggccagggcaattaggcaggagaaggaaataaagggtattcaattaggaaaagaggaagtcaaattgtccctgtttgcagatgacatgattgtatatctagaaaaccccattgtctcagcccaaaatctccttaagctgataagcaacttcagcaaagtctcaggatacaaaatcaatgtacgaaaatcacaagcattcttatacaccaataacagacaaacagagagccaaatcatgagtgaactcccattcacaattgcttcaaagagaataaaatacctaggaatccaacttacaagggatgtgaaggacctcttcaaggagaactacaaaccactgctcaatgaaataaaagaggatacaaacaaatggaagaacattccatgctcatgggtaggaagaatcaatatcatgaaaatggccatactgcccaaggtaatttatagattcaatgccatccccatcaagctaccaatgactttcttcacagaattggaaaaaactactttaaagttcatatggaaccaaaaaagagcccgcattgccaagtcaatcctaagccaaaagaacaaagctggaggcatcacactacctgacttcaaactatactacaaggctacagtaaccaaaacagcatggtactggtaccaaaacagagatacagaccaatggaacagaacagagccctcagaaataatgccgcttatctacaactatctgatctttgacaaacctgacaaaaacaagcaatggggaaaggattccctatttaataagtggtgctgggaaaactggctagccatatgtagaaaactgaaactggatcccttccttacatcttatacaaaaattaattcaagatggattaaagacttaaatgttagacctaaaaccataaaaaccctagaagaaaacctaggcattaccattcaggacataggcatgggcaaggacttcatgtctaaaacaccaaaagcaatggcaacaaaagccaaaattgacaaatgggatctaattaaactaaagagcttctgcgcagcaaaagaaactaccatcagagtgaacaggcaacctacgcaatgggagaaaatttttgcaacctactcatctgacaaagggctgatacccagaatctacaatgaactcaaacaaatttacaaggaaaaaacaaacaaccccatcaaaaagtgggcaaagaatatgaacagacacttctcaaaagaagacatttatgcagccaacagacacatgaaaaaatgctcatcatcactggctatcagagaaatgcaaatcaaaaccacaatgagataccatctcacaccagttagaatggcaatcattaaaaagtcaggaaacaacagtcttattctagtgcccctattaaaaaaagaagaacgtgctttgcagagtgacaccactacaaagccaagtagaaccagtgtccaaaggtcaccaattcaagataagcccagatttggcattcatctgaagagtccagtaaagatccagaggacatcgtgtcagttcaagtgtggcaggccaggtctcactaacacaggcctccgtaacaactgtttccatactgaccgagtggttaagttaaatattgaaagtcaaagcccttatacaaagcctgggatataa

SEQ ID NO: 13293 - DNA, 2540 bp, Homo sapiens
  SIMILAR (1)..(1188): 991254mologous to Methylomonas aminofaciens transposase,accession number AB026428,Smith-Waterman Score=2078.
atgatcctatgtttagaaaaccccatcatctcaactcaaaagctccttaagctgataagcagcatcggcaaagtctcaggatacaaaatcaatgtgcaaaagacacaatcatttctacacaccaacaatagacaagcagagagccaaatcatgtatgaactcccattcacaattgctacaaagaataaaatacctaggaattcagctaacaaggaacatgaaggacctcttcaagaactacaaaccattgctcaaggaaataagagaggacacaaacaaatggaaaagcaatccatgctcttggataggaagaatcgatatcatgaaaatggccctactgcccaagatgcagaaaaggccattgacaaaattcaacaacgcttcatgctaaaagccctcaataaattaggtattgatgggatgtatctcaaaatactaagagctttttatgacaaacccacagccaatatcatactgaatgggcaaaaactggaagcattccctttgaaaactggcacaagacagggatgccctctctcaccactcctattcaacatagtgttggaagttctggccagggcaatcaggcaggagaaggaaataaagggtattcatttaggaaaagaagaagtcaaattgtccctatttgcagatgacatgattgtatgtctagaaaaccccattgtctcagcccaaaatctccttaagctgataggcaacttcagcaaagcctcaggatacaaaatcaatgtgcaaaaatcacaagcattcttatacagcaataacagacaaacagagagccaaatcatgagtgaattcccattcacaattgcttcaaaaagaataaaatacctaggaatccaacttacaagggacgtgaaggacctcttcaaggagaactacaaaccactgctcaatgaaataaaagaagatacaaacaaatggaagaacattccatgctcatgggtaggaagaatcaatattgtgaaaatggccatactgcccaaggcagaggcgcctcaccccagggccaccaccatgacagtcccatgggaagtaccaccaggctacgaccaatgttcccttaaggcccaagaactcttcagtcagcttgtggtgaatgctgccaagactgggactcacccttcagggcaatggcctctcctctgactcaggagttttgccccagagccaccatatctgttaatgcactgagcctcacctggagccagcccatctcagagactgaccaagaccctcaatgtagtacctgggtattgctgctggttatgcagggccgaagagctcttcagttagcagacgataaaagctggcaggaatgggtcctttccttcaaggcagcaggttcccttctggcccaggtgttggaagttctggccaaggcaatcaggcaggagaaggaaataaagggtattcaattaggaaaagaggaagccaaattgtccctgtttgcagatgacatgactgtgtatctagaataccccatcgtctcagcccaaaatctccttaagctgataggcaacttcagcaaagtctcgggatacaaaatcaatgtgcaaaaatcacaagcattcttatacaccaataacagacaaacagagagccaaatcatgagtgaactcccattcacaattgcttcaaagagaataaaatacctaggaatccaacttacaagggatgtgaaggacctcttcaaggagaactacaaaccactgctcaatgaagtaaaagaggatacaaacaaatggaagaactttccatgctcatgggtaggaagaatcaatatcgtgaaaatggccatactgcccaaggtaatttacagattcaatgccatctccatcaagctaccaatgactttcttcacagaattggaaaaaactactttaaagttcatttggaaccaaaaaagagcctgcattgccaagtcaatcctcagccaaaagaacaaagctggaggcatcacactacctgacttcaaactatactacaaggctacagtaaccaaaacagcatggtattggtaccaaaacagagatatagacccatggaacagaacagagccctcagaaataatgccacacatctacaaccatctgatctttgacaaacctgacaaaaacaagcaatggggaaaggattccctgtttaataaatggtgctgggaaaactggctagccatatgtagaaagctgaaactggatcccttccttacaccttatacaaaaattaattcaagatggattaaagacttaaatgttagacctaaaaccatgaaaaccctagaagaaaacctaggcaataccattcaggacataggcatgggcaaggacttcatgtctaaaacaccaaaagcaatggcaacaaaagccaaaattgacatatgggatctaattaaactaaagaacttctgcacagcaaaagaaactactatcagagtgaacaggcagcctacagaatgggagaaaatttttgcaatctactcatctgacaaagggctaatctccagaatctacaaataa

SEQ ID NO: 13294 - DNA, 1787 bp, Homo sapiens
  SIMILAR (196)..(609): 291254mologous to Homo sapiens Human neurofilament-H mutant protein fragment 11,accession number Y20852,Smith-Waterman Score= 98.
atggcttatcctggacatgaaaatgtgctaatgagatctgttatttcagggagcatgattgacttctatacactgcatctaccctacctctgtgccatagccccacttactgtaggatgctcccagtcagtaactaagacaggatcctcagctgcaggtctgttggagtttgctagaggtccacttcagaccctgtttgcctgggtatcagcagcagtggctacagaacagcggattttggtgaaccgcaaatgctgctgcctgatcgttcctctggaagttttgtctcagaggagtacccagctgtgcgcccaaacacattcaaaagctagcagaaggcaagaaataactaaaatcagagcagaactgaaggaaatagagacacaaaaaacccttcaaaaaattaatgaatccaggagctggtttcttggaaagatcaacaaaattgatagaccactaacaaggctaataaagaagaaaagagagaagaatcaaatagatgcaataaaaaatcataaaggggatatcaccaccgatcccacagaaatacaaactaccatcagagaatactatgaacacctctatgcaaataaactagaaaatctagaagaaatggataaattcctcaatacatacatcctcccaagactaaaccaggaagaagttgaatctctgaatagaccaataacaggctctgaaattgaggcaataatcaatagcttaccaaccaaaaaaagtccaggaccagatggattcatagccaagttctaccagaggtacaaagaggagctggtaccattccttctgaaactattccaatcaatagaaaaagagggaatcctccctaactcattttatgaggccagtatcatcatgataccaaagcctggcaaagacacaaccaaaaaagagaattttagaccaatatccttgatgaacatcaatgcaaaaatcctcaataaaatactggcaaaccaaatccagcagcacatcaaaaagcctatccactatgatcaagtgggcttcatccctgggatgcaaggctggttcaacaaatgcaaatcaataaatgtaatccagcatataaacagaaccaaagacaaagacaacatgattatctcaatagatgcagaaaaggcctttgacaaaattcaacaacgcttcatgctaaaaactctcaataaattagtgttggaagttctggccagggcaatcaggcaggagaaggaaataaagggtattcaattaggaaaagaggaagtcaaattgtccctgtttgcagatgacatgattgtatatctagaaaaccccatcatctcagcccaaaatctccttaagctgataagcaacttcagcaaagtctcaggatacaaaatcaatgtacaaaaatcacaagcattcttatataccaataacagacaaaccgagagccaaatcatgagtgaactcccatttgcaattgcttcaaagagaataaaatacctaggaatccaacttacaagggacgtgaaggacctcttcaaggagaactacaaaccactgctcaatgaaataaaagaggatacaaataaatggaagaacattccatgctcatgggtaggaagaatcaacatcatgaaaatggccatactgcccaaggaacgcagctcctcaccagcaacggaacaaagctggatggagaatgactttgatgagttgagagaagaaggcttcagacgatcaaacttctccgagctaaaggagaaagttcgaacccatcacaaacaagataaaaaccttgaaaaaag

SEQ ID NO: 13295 - DNA, 4178 bp, Homo sapiens
  SIMILAR (1357)..(923): 971254mologous to Escherichia coli K12 putative ATP-binding component of a transport system,accession number AE000406,Smith- Waterman Score=736.
cagggggtacatgaagcagagtgaggtggtgccagccaggccacccaaggccgggtggccagcgaagcacctccagaactgcatgcgcttgtctgcacccccaggaagaactgcttgtacttatccttgaaggcaaagttaagggcttgcatgggaagtaatggatggcactggcaaggttgcccttccaggaagacagccccatgctccttggagatgcagaggacgcagtccatccaccacacttcgtgctgcttgtgggctgcaatctgctactggcatgttgcccctgcagcagcagcagcttgacctgctggatctgagccacggccatgatgtgtggtattatttctgagggctctgttctgttccatcatggtggcaggcaggacaatggagtgtggagagcatgctgttttggttactgtagccttgtagtatagtttgaagtcaggtagtgtgattcctccagatttgttcttttggcttaggattgacttggcaatgcgggctcttttttggttccatatgaactttaaagtagttttttccaattctgtgaagaaagtcattggtagtttgatggggatggcattgaatctgtaaattaccttgggcagtatggccattttcacgatattgattcttcctacccatgagcatggaatattcttccatttgtttgtatcctcttttatttccttgagcagtggtttgtagttctccttgaagaggtccttcacatcccttgtaagttggattcctaggtattttattctctttgaagcaattgtgaatgggagttcactcatgatttggctctctgtttgtctgttgttggtatataagaatgcttgtgatttttgtacattgattttgtatcctgagactttgctgaagttgcttatcagcttaaggagattttgggctgagacaatggggttttctagatatacaatcatgtcgtctgcaaacagggacaatttgacttcctcttttcctaattgaataccctttatttccttctcctgcctaattgccctggccagaacttccaacactatgttgaataggagtggtgagagagggcatccctgtcttgtgccagttttcaaagggaatgcttccagtttttgctgcatggtcccatatttcttggaggctttttcatttctttttactcttttttctctaaacttgtcttctcacttcatttcattaatttgatcttcaatcactgataccctttcttccacttgattaaattggctattgaagcttctgcatgtgtcatgaagttcttgtgctgtgcttttcagctccatcaggacatttatgttcttctctacactgattattccagttagcaattcctctaatcttttttcaaggttcttagcttccttgcattggcttagaacatgctcctttagctcagaggagtttgttattacccaccttctgaagcctacttctgaaaattcatcaaaccaattctctgtccagttttgttcccttgctggcaaggagttttgatcctttggaggagaagaagtgttctggtttttggaattttcagcctttttgcactggtttttcctcatcttcatggatttatctacctttgatctttgatgttggtgaccttcagatgggtttcctctactgcaggtctgctggagttcgctggaggaccactccagatcctgttgccgggtatcaccggcggaggctgcagaacagcaaagattgttgcctgttccttcctctggaagatttgtcccagaggggcacccacctaatgccagctggagctctcctgtatgaggtgtctgttgacccctgctgagaggtgtctcctcatcaggagccaggggggtcagggacccccttgaggaagcagtctgtccctcagcagagctcaagtactgtgctgggagatctgctgctctcttcagacgtggcgttatttctgagggctctgttctgttccattgatctatatctctgttttggtaccagtaccatgctgttttggttactgtagccttgtagtatagtttgaagtcaggtagtgtgatgcctccagctttgttcttttggcttaggattgacttggcaatgtgggctcttttttggttccatatgaacttgaaagtagttttttccaattctgtgaagaaagtcattggtagcttgatggggatggcattgaatctgtaaattaccttgggcagtatggccattttcatgatattgattcttcctacccatgagcatggaatgttcttccatttgtttgtatcctcttttatttcattgagcagtggtttgtagttctccttgaagaggtccttcccgtcccttgtaagttggattcctaggtattttattctttttgaagcaattgtgaatggcagttcactcatgatttggctctctgtttgtctgttattggtgtataagaatgcttgtgatttttgtacattgattttgtatcctgagactttgctgaagttgcttatcagcttgagattttgggctgagacaatggggttttctagatatacaatcatgtcatctgcaaacagggacaatttgacttcctcttttcctaattgaataccctttatttccttgtcgtgcctaattgccctggccagaacttccatcactatgttgaataggagtggtgagagagggcatccctgtcttgtgccagtcttcaaagggaatgcttccagtttttgcccattcagtatgatattggctgtgggtttgtcatagatagctcttattattttgagatatgtcccatcaatacctaatttattgagagtttttagcatgaagggttgttgaattttgtcaaagggccttttctgcatcagttcctccttgtacctctggtagaattcggctgtgaatccatctggtcctggactcttttttgttggtaagctattgattattgccacaatttcagagcctgttattggtgtattcagagattcaacttcttcctggtttagtcttgggagggtgtatgtgtcgaggaatttatccatttcttctagattttttagtttatttgtgtagaggtgtttgtagtattctctgatggtagtttgtatttctgtgggatcagtggtgatatcccctttatcattttttattgtgtctatttgcttcttttctcttttcttctttattagtcttgctagcggtctgtcaattttgttgatcctttcaaaaaaccagctcctggattcattaatgttttgaagggttttttgtgtctctatttccttcagttctgctctgattttagttatttcttgccttctgctagcttttgaatgtgtttgctcttgcttttctagttcttttaattgtgatgttagggtgtcaattttggatgtctcctgctttctcttgtgggcatttagtgctataaatatccctctacacactgctttgaatgtgtcccagagattctggtatgttgtgtctttgttctcgttggtttcaaagaacatctttatttctgccttcatttcgttatgtacccagtagttattcaggagcaggttgttcagtttccacgtagttgagtggttttgagtgagtttcttaatcctgaggtctagtttgattgcactgtggtctgagagacagtttgttataatttctgatcttttacatttgctgaggagagctttactttgaactatgtggtcaattttggaataggtgtggtatggtgctgaaaaaaatgtatattctgttgatttggggtggagagttctgtagatgtctattaggtccgcttggtgcagagctgagttgaattcttgggtatccttgttaactttctgtctcattgatctgtctaatgttgacagtggggtgttaaagtctcccattattatggtgtgggagtctaagtctctttgtaggtcactcaggacttgcttaatgaatctgggtgctcctgtattgggtgcatatatattcaggatagttagctcttcttggtgaattgatccctttaccattatgtaatggccttctttgtctcttttgatctttgttggtttaaagtctgttttatcagagactaggattgcaacccctgccttttttgttttccatttgcttggtagatcttcctccat

SEQ ID NO: 13296 - DNA, 3211 bp, Homo sapiens
  SIMILAR (1)..(681): 981254mologous to Escherichia coli DniR,accession number U70214,Smith-Waterman Score=1162.
atggaagatgaaatgaatgaaatgaagcaagaagagaagtttagagaaaaaagaataaaaagaaatgagcaaaccctccaagaaatatgggactatgtgaaaagaccaaatctacatctgattggtgtacctgaaagtgatggggagaatggaaccaagttggaaaacactctgcaggatattatccaggagaacttccccaatctagcaaggcaggccaacgttcagattcaggaaatacagagaatgccacaaagatactcctcgagaagagcaactccaagacacataattgtcagattcaccaaagttgaaatgaaggaaaaaatgttaagggcagccagagagaaagacagatcaatgagacaaaaagtcaacaaggatacccaggaattgaactcagctctgcaccaagcggacctaatagacatctacagaactctccaccccaaatcaacagaatatacatttttttcagcaccacaccacacctataccaaaattgaccacatacttggaagtaaagctctcctccgcaaatgtaaaagaacagagattataacaaactatctctcagaccacagtgcaatcaaactagaactcaggattaagaatctcactcaaaaccgctcaactacatggaaactgaacaacctgcttctgaatgactactgggtacataacaaaatgaaggcagaaataaagatgttctttgaaaccaacgagaacaaagacacaacataccagaatctctgggacgcattcaaagcaaaatacaaactaccatcaaggaatactacaaacacctctatgcaaataaactcgaaaatctggaagaaatggataaattcctggacacataacactctcccaagactaaaccaggaagaagttgaatctctgaatagaccaataacaggagctgaaattgtggcaataatcaatagtttaccaaccaaaaagagtccaggaccagatggattcacagccgaattctaccagaggtacaaggaggaactggtaccattccttctgaaactattccaatcaatagaaaaacagggaatcctccctaactcattttatgaggccagcaccattctgataccaaagccgggcagagacacaaccgaaaaagagaattttagaccaatatccttgatgaacattgatgcaaaaatcctcaataaaatactggcaaaacgaatccagcagcacatcaaaaagcttatccaccatgatcaagtgggcttcatccctgggatgcaaggctggttcaatatacacaaatcaataaatgtaatccagcatataaacagagccaaagacaaaaaccacatgattatctcaatagatgcagaaaaagcctttgacaaaattcaacaacgcttcatgctaaaaactctcaataaattaggtattgatgggacgtatttcaaaataataagagctatctatgacaaacccacagccaatatcatactgaatgggcaaaaactggaagcaatccctttgaaagctggcacaagacagggatgtcctctctcaccactcctattcaacatagtgttggaagttctggccagggtaattaggcaggagaaggaaataaagggtattcaattaggaaaagaggaagtcaaattgtccctgtttgcagatgacatgattgtatatctagaaaaccccattgtcacagcccaaaatctccttaagctgataagcaacttcagcaaagtctcaggatacaaaaaaaaaatcaatgtacaaaaatcacaagcattcttatacaccaataacagacaaacagagagccaaatcatgagtaaactcccattcacaattgcttcaaagagaataaaatacctaggaatccaacttacaagggacgtgaaggacctcttcaaggagaactacaaaccactgctcaaggaaataaaagaggatacaaacaaatggaagaacattccatgctcatgggtaggaagaatcaatatcgtgaaaatggccatactgcccaaggtaatttatagattcaatgccatccccatcaagctaccagtgactttcttcacagaattggaaaaaactactttaaagttcatatggaaccaaaaaagagcccgcatagccaagtcaatcctaagccaaaagaacaaagctggaggcatcacactacctgacttcaaactatactacaaggctacagtaaccaaaacagcatgttcccagtcagctcccatggaattaggcttcaggccaatccctgtggactcagggactaggaccatccctgaaccaggcctgaccccatggacccaggcttcaggatggacaccaaagacatgtgcttcaggcttcttcctacagatccagttgacaagtccactctggtggactccagtactaggcttgcaccacaaacccaggattcaggtctacacagaaggcccaagccccaggccagcgcctttagactcagatgccagctctacccacctgctgactcaggcatcagaaagaagaatcaaaactatgaataatcacaccgtgaatagaaaatctaagagagaacattgctgtacaaaagggtttcctgggtcaggcctagggtcccgttgctctgtgcagcctcggcacagggtgtcctctgtcccagctgctcaagcttttgcattgcctaaaaggggacaaggtacagctcaggcagttgctttagagggtgaaagccccaagccttcctagatttcagagtatgtatgaaaatgcctggatgtctaggcagaagtctgctgcaggggtggaatcttcatggagaaccttcattatggcaatgcagaggagaaatgtggggttggagccccacacagagtcctcactggggcactgcttaatggagctgcaagaagagggccatggtcctccagaccccagaatggtagatatactggcagtttgcactctgtgcctgaaaaagccacaagcactcaatgccagcctgtgaaagcagccatgggagctgtacccttcagagccacgggagcagagctgcctacacaatgatagatccactgacaacttgcatcatgtgcctagaaaagccacagacaacaccagcccgtgaaagcttcagggaggcaggctgtacccaccaaaaccacagaggcaaagctatccaaaaccatgggaacccacctcttgcatcagcaag

SEQ ID NO: 13297 - DNA, 3023 bp, Homo sapiens
  SIMILAR (304)..(558): 771254mologous to Escherichia coli biotin sulfoxide reductase (bisC),accession number M34827,Smith-Waterman Score=344.
atggttatctcaatagatgcagaaaaggcctctggcaaaattcaacaacccttcatgctaaaaattgtcaataaattaggtattgatgggacgtatctcaaaataataagagctatctatgacaaacccacagccaatatcatactgaatgggcaaaaactggaagcattccctttgaaaactggcacgagacagggatgccctctctcaccactcctattcaacatagtgttggaagttctagccagagcaatcaggcaggagaaggaaataaagggtattcaattaggaaaagaggaagtcaaattgtccctgtttgcagatgacatgactgtatatctagaaaaccccattgtctcagcccaaaatctccttaagctggtaagcaacttcagcaaagtctcaggatacaaaatcaatgtgcaaaaatcacaagcattcttatacaccaataacagaacagagagccaaatcatgagtgaaatcccattcacaattgcttcaaagagaataaaatacctaggaatccaacttacaagggatgtgaaggacctcttcaaggagaactacaaaccactgctcaatgaaataaaagaggatacaaacaaatggaagaacattccatgctcatgggtaggaagaatcaatatcatgaaaatggccacactgcccaaggtaatttatagattcaatgtcattcccattaagctaccaatgactttcttcacagaattggaaaaaactactttaaagttcatacggaaccaaaaaagagcccgcattgccaagtcaatcctaagccaaaagaacaaagccggaggcatcatgctacctgacttcaagccatactacaaggctacagtaaccgaaacagcatggaccccaaatagctgctatatcaccagcattttttcaccttccacggaggaagagtggaaaggacaaagagcagtgatgacccctcacaacccatcagtcagaatactgccacttggccccaccaagaacaacaaggttattttatcgggggacatgggctggtgtggaacaaatgggacacaggagcttctgcaagctatatacctgaacgaatatggcaacatgaccaaagcactgacccagatcttcacagacaaaacgggtgatggccttaagctattgatggcagcggcggcccatctggagtggctgctgccaagatgccagctgcagtggggtgggaggtgcagccagggctgcatgctcccagtagccggcaggagctgggaacaggtggaagccccaaccccttccaagttggaggggcaggaatccggccctcttgggtgcagctgcagccggccacctagccatggctgcagacccaggcatctctgcactctcagtgggccggggaagcccccacgtccgtgcaggctgggaactcccattggctggcctctccctgctcacagcgcacaatccgatttcagaccaaagttgtggccaagcccaggtgctgtcaagaccctggcaggtgtgcttgactcagggcacgcggacaagcagcccctgctgtctcagcacgaaaaccgaaaggaagcaggggggcgagaaatacaaactaccatcagagaatactacaaacacctctatgcaaataaactagaaaatctagaagaaatggataaattcctcgacacatacactctcccaagactaaaccaggaagaagttgaatctctgaatagaccaataacaggagctgaaattgtggcaataatcaatagcttaccaaccaaaaagagtccaggaccagatggattcacagccaaattctaccagaggtacaaggaggaactggtaccatttcttctgaaactatgccaatcaacagaaaaagagggaatcctccctaactcattttatgagaccagcatcatcctgataccaaagccgggcagagacacaatgaaaaaagagaattttagaccaatatcctggatgaacattgatgcaaaaatcctcaataaagatactggcaaatcgaatccagcagcacatcaaaaagcttatccaccatgatcaagtgggcttcatccctgggatgcaaggctggttcaatatatgcaaatcaataaatgtaatccagcatataaacagaaccaaagacaaaagccacatgattatctccatagatgcagaaaaggcctttgacaaaattaaacaacacttcatgctaaaaactgtcaataaattaggtattgatgggatgtatttcaaaataataagagctatctatgacaaacccacagacaatatcatactgaatgggcaaaaactggaagcattccctttgaaaactggcacaagacatgggatgccctctctcaccactcctattcaacatagtgttggaagttctggccagtgcaattaggcaggagaaggaaataaagggtattcaattaggaaaagaggaagtcaaattgtccctgtttgcagacgacatgattgtatatctagaaaaccccattgtctcagcccaaaatctccttaagctgataagcaacttcagcaaagtctcaggatacaaaatcaatgtacaaaaatcacaagcattcttatacaccaacaacagacaaacagagagccaaatcatgagtgaactcccattcacaattgcttcaaagagaataaaatacttaggaatccaacttacaagggatgtgaaggacctcttcaaggagaactacaaaccactgctcaatgaaataaaagaggatacaaacaaatggaagaatattccatgctcatgggtaggaagaatcaatatcgtgaaaatggccatactgcccaaggtatttccagaaaacactgagggcaggagacaagagagccttctcaagggcacaggcagaaatgctgagaatcaagatacacgaggcttgaccaaaccgggagtggacaaagacaacaaagatggagaagagttgaacaaagtgaccttccggacccccaactatgagcctagattcaagtaa

SEQ ID NO: 13298 - DNA, 4380 bp, Homo sapiens
  SIMILAR (457)..(1695): 991254mologous to Escherichia coli biotin sulfoxide reductase,accession number U00039,Smith-Waterman Score=2241.
atggataaattcttcgacacatacaccctcccaagactaaaccaggaagaagttgaatctctgaatagaccaataacaggctctgaaattgaggcaataattaatagtgtaacaaccaaaaaaagtccaggaccagatggattcacagccgaattctaccagaggtacgaggaggagctgaaaaagagggaatcctccctaactcattttatgaggagcatcatcctgataccaaagcccggcagagacataacaaaaaaagagaattttagaccaatatccctgatgaacatcgatgcaaaaatcctcaataaaatactggcaaaccaaatccagcagtacatcaaaaagcttatccaccatgatcaagtgggcttcatccctgggatgcaaggctggttcaacatacgcaaatcaataaaggtaacccagcatataaacagaaccaaagacaaaaaccacatgattatctcaatagatgcagtaaaggcctttgacaaaattcaacagcgcttcatgctaaaaactctcaataaattaggtattgatgggacatatctcaaaataataagagctatctatgacaaacccacagccaatatcatactgaatgggcaaaaactggaagcattccctttgaaaactggcacaagacagggatgccctctctcaccactcctattcaacatagcgttggaagttctgtccagggcaatcaggcaggagaaggaaataaaggatattcaattaggaaaagaggaagtcaaattctccctgtttgcagatgacatgattgtatatctagaaaaccccatcgtctcagcccaaaatctccttaagctgataggcaacttcagcaaagtctcaggatacaaaatcaatgcgcaaaaatcacaagcattcttatacaccaataacagacaaacagagagccaaatcatgagtgaactcccattcacaattgcttcaaagagaataaaatatctaggaatccaacttacaatggacgtgaaggacttcttcaaggagaactacaaaccaatgctcaatgaaataaaagaggatacaaacaaatggaagaacattccatgctcatgggtaggaagaatcaatatcgtgaaaatggccatactgcccaagatccactccagagtgacagttctgctgcgctcagatactgtgctgcatattgtgaagcttgcagtgaaaattcctacaattgtcctgcttctggaggggagccccagggccttgaggaaacacaggcagaagccagggagtggttccagcaggcctcgagtgagacccagtgctgtgctggcatcaggtctgagtcaatgcagtcatagtggtggtggcaacaggggtgcttatgtcactccaccccaagctttagcagaaaaggcctttgacaaaattcaacaacccttcatgctaaaaactctcaataaattaggtattgatgggacatatctcaaaataataagagctatctatgacaaacccacagccaatatcatactgaatgggcaaaaactggaagcattccctttgaaaactggcacaagacagggatgccctctctcaccactcctattcaacatagccttggaagttctggccagggcaatcaggcaggagaaggaaataaagggtattcaattcggaaaagaggaagtcaaattgtccctgtttgcagatgacatgattgtatatctagaaaaccccattgtctcagcccaaattctccttaagctgataagcaacttcagcaaagtctcaggatacaaaatcaatgtacaaaaaccacaagcattcttacacaccaataacagacaaacagagaaccaaatcatgagtgaactcccattcacgattgcttcaaagagaataaaatacctaggaatccaacttacaagggacgtgaaggacctcttcaaggagaactacaaaccactgctcaaggaaataaaagaggatacaaacaaatggaagaacattccatgctcatgggtaggaagaatcaatatcgtgaaaatggccatactgcccaaggtaatttatagattcaatgccatccccagcaagctaccaatgactttcttcacagaattggaaaaaaatactttaaagttcatatggaaccaaaaaagagcccgcatcgccaagtcaatcctaagccaaaagaacaaagctggaggcatcacgctacctgacttcaaactatactacaaggctacagtaaccaaaacagcatggtactggtaccaaaacagagatatagatcaatggaacagaacagagccctcagaaataacgccgcatatctacaactatctgatctttgacaaacctgagaaaaacaagcaatggggaacggattccctatttaataaatggtgctgggaaaactggctagccatatgtagaaagctgaaactggatcccttccttacaccttatacaaaaattaattcaagatggattaaagacttaaactttcgacctaaaaccataaaaactctggaagaaaacctaggcattaccattcaggacataggcatgggcaaggacttcatgtctaaaacaccaaaagcaatggcaacaacagacaaaattgacaaatgggatctaattcaactaaagagcttctgcacagcaaaagaaactaccatcagagtgaacaggcaacctacaaaatgggagaaaattttcgcaacctactcatctgacaaagggctaatatccagaatctacaatgaactcaaacaaatttacaagaaaaaaacaaacaaccccatcaaaaagtgggcgaaggacatgaacagacacttctcaaaagaagacatttatgcagccaaaaaacacatgaaaaaatgctcaccatcactggccatcagagaaatgcaaatcaaaaccacaatgagatatcatctcacaccagttagaatggcgatcattaaaaagtcaggaaacaacagtacgtttgactttggacaacatgagtttgaactacacaggtccacttatacgcggattgttttcagtaaaattacaccaatattggaagttctggccagggcaattaggcaggagaaggaaataaagggtattcaattaggaaaagaggaagtcaaattgtccctgtttgcagatgacatgattgtatatctagaaaaccccattgtctcagcccaaaatctcctcaagctgataggcaacttcagcaaagtctcaggatacaaaatcaatgtacaaaaatcacaagcattcttatacaccaataacagacaaacagagagccaaatcatgagtgaactcccattcacaattgcttcaaagagaataaaatacctaggaatccaacttacaagggacgtgaaggacctcttcaaggagaactacaaaccactgctcaatgaaataaaagaggatacaaacaaatggaagaacattccatgctcatgggtaggaagaatcaatattgtgaaaatggccatactgcccaaggtaatttatagattcaatgccatccccatcaagctacccatgactttcttcacagaattggaaaaaactactttaaagttcatatggaaccaaaaaagagcctgcatcgccaaggcaatcctaagccaaaagaacaaagctggaggcatcacactacctgacttcaaactgtactacaaggctacagtaacgaaaacagcatgtttgttaaacagaagggctctccccctggcaaaccggggaagaaaaaaccctgtttttggggggcccccaaaaacggtgccgatatccccagccaaagttggcggccatccggaaacccgggaacaaccccccctctcccgaaaccccccagttttttccctggggcccccagaatggggcaatcccaagcttggggccacaaaggcttttggttcaaaaagggcaagccaaccgaaccccccggaaaaaaggcccgggttaaaaagccccccgggggccaatcccccaaggccattggacccacccgtggcccgggaaaaccaccaaaacccgatatgcgggcccccaagccccccacagattccggtcaccaaacccagaagccctcatgaccggcagacagcgctttcacaccgcacatcaacgtttcacggtccgaccccagaaccaccgctcgctcatccagcgccgaccgtgtcaacgccagcgagtacccaacatccagcgaggagacatcaggtcgctcgtccagataggtcatcaacgccgttgcctgcgcggatagcgcttcgggtgttttgcccgacaccatccacggcaccaccggaacatccacgacagaacccgaacccggccccgcagactgactcggcactcccgggggct

SEQ ID NO: 13299 - DNA, 3349 bp, Homo sapiens
  SIMILAR (1)..(2136): 931254mologous to Homo sapiens putative p150,accession number U93563,Smith-Waterman Score=3401.
atgggagactttaacatcccactgtcaacattagacagatcaacgagacagaaagtcaacaaggatacccaggaattgaactcagctctgcaccaagcggacctcatagatagctacagaactctccaccccaaatcaacagaatatacatttttttcagcaccacaccacacctattccaaaattgaccacatacttggaagtaaagctctcctcagcaaatgtaaaagaacagaaattataacaaactatctctcagaccacagtgcaatcaaactagaactcaggattaagaatctcactcaaaactgctcaactacatggaaactgaacaacctgctcctgaatgactactgggtacataacgaaatgaaggcagaaataaagatgttctttgaaaccaatgagaacaaagacacaacataccacaatctctgggatgcattcaaagcagtgtgtagagggaaatttatagcactaaatgcccacaagagaaagcaggaaagatccaaaattgacaccctaacatcacaattaaaagaactagaaaagcaagagcaaacacattcaaaagctagcagaaggcaagaaataactaaaatcagagcagaactgaaggaaatagagacacaaaaaacccttcaaaaaattaacgaatccaggagctgggtttttgaaaggatcaacaaaattgatagaccgctagcaagactaacaaagaaaaaaagcgagaagaatcaaatagatgcaataaaaaatgataaaggggatatcaccaccgatcctacagaaatacaaactaccatcagagaatactacaaacacctctacgcaaataaactagaaaatctagaagaaacggataaattcctcgacacatacactctcccaagacgaaaccaggaagaagttgaatctctgaatagaccaataacaggagctgaaattgtggcaataatcaataacttaccaaccaaaaagagtccaggatcagatggattcacagccgaattctaccagaggtacaaggaggaactggtaccattccttctgaaactattccaatcaatagaaaaagagggaatcctccctaactcattttatgaggccagcatcatcctgataccaaagccgggcagagacacaaccaaaaaagagaattttagaccaatatccttgatgaacattgatgcaaaaatcctcaataaaatactggcaaaccaaatccagcagcacatcaaaaagcttatccaccatgatcaagtgggcttcatccctgggatgcaaggctggttcaatatatgcaaatcaataaatgtaatccagcatataaacagaaccaaagacaaaaaccacatgattatctcaatagatgcagaaaaggcctttgacaaaattcaacaacccttcatgctaaaaactctcaataaattaggtattgatgggacttatctcaaaataataagagctatctatgacgaacccacagccaatatcatactgaatgggcaaaaactggaagcattccctttgaaaactggcacaagacagggatgccctctctcaccactcctattcaacatagtgttggaagttctggccagggcaattaggcaggagagggaaataaagggtattcaattaggaaaagaggaagtcaaattgtccctgtttgcagatgacatgattgtatatctagaaaaccccattgtctcagcccaaaatctccttaagctgataagcaacttcggcaaagtctcaggatacaaaatcaatgtacaaaaatcacaagcattcttaaacaccaacaacagacaaacagagagccaaatcatgagtgaactcccattcacaattgcttcaaagagaataaaatacctaggaatccaacttacaagggatgtgaaggacctcttcaaggagaactacaaaccactgctcaaggaaataaaagaggatacaaacaaatggaagaacattccatgctcatgggtaggaagaatcaatatcatgaaaatggccatactgcccaaggtaatttacagattcaatgccatccccatcaagctaaccaatgactttcttcacagaattggaaaaaactactttaaagttcatacggaaccaaaaaagagcctgcgtcgccaagtcaatcctaagccaaaagaacaaagctggaagcatcacactacctgacctcaaactatactacaaggctacagtaaccaaaacagcatggtactggtaccaaaacagagatatagatcaatggaacagaacagagccctcagaaataacgctgcatatctacaactatctgatctttgacaaacctgagaaaaacaagcaatggggaaaggattccctatttaataaatggtgctgggaaaactggctagccatatgtagaaagctgaaactggatcccttccttacaccttatacaaaaatcaattcaagatggattaaagacttaaacattagacctaaaaccataaaaaccctagaagaaaacctaggcattaccattcaggacataggcatgggcaaggacttcatgtctaaaacaccaaaagcaatggcaaccaaagccaaaattgacaaatgggatctaattaaactaaagagcttctgcacagcaaaagaaactaccatcagagtgaacaggcaacctacaaaatgggggaaaattttcgcaacctactcatctgacaaagggctaatatccagaatctacaatgaactcaaacaaatttacaagaaaaaaacaaacaaccccatcaaaaagtttgcaaaggatatgaacagacacttctcaaaaaaagacatctatgcagccaaaaaacacatgaaaaaatgctcaccatcactggccatcagagaaatgcaaatcaaaaccacaatgagataccatctcacaccagttagaatggcaatcattaaaaagtcaggaaacaacagaactggccgtggtttacatccaggaagggattggtcagtcacctgtgccaggtccccgggggatcctgagcccagcggtataaagggtggctgtgggagtggcacaccctctcccagccccagcaagcaaaccgtcaggcggccgtggactcagatcccggagatgaagcccctgctcctggccgtcagcctcggcctcattgctgccctgcaggcccaccacctcctggcctcagacgaggagattcaggatgtgtcagggacgtggtatctgaaggccatgacggtggacagggagttccctgagatgaatctggaatcggtgacacccatgaccctcacgaccctggaagggggcaacctggaagccaaggtcaccatgctgtga

SEQ ID NO: 13300 - DNA, 2526 bp, Homo sapiens
  SIMILAR (262)..(702): 571254mologous to Rattus norvegicus cp151,accession number AF092090,Smith-Waterman Score=375.
atggtcaaatccaaaacactgacaacatcagattctggtgaggatgtggggcaacaggaactctcattcattgctggtcagcctctcgccatctttattcaaaccagaggagttcacgcccctggatccaacccaggagcccatttttcccccagagttgctgaccagtgtcatcctgcaagcactaaagccagccttactaggcatccccttatgacaaactccatccttccttccttgggggggggtcctacagtcaacacccctagggagagagcagcagagactgagcacaggcgagaaggtgtggaaacaagagaggaactgaaacacgaaaacggggcccttgactcaccaccaacccacaggggaaaccacagagcacagcagcccagcgccgactgcacctccccggaaaagttcctggaggttcaagaatggctcctctatgttgactccctgtctcatctcagacacccagtaagcctcatattccagaatcgctctctgcatcatgctgtcactgctggatatggggaaggggtggcattggtgattcagtactgcttttcctacctcttcgatacctctttcagtgatgcaaagttaaaaccagatgctatgagtgctcacctgtgttttgattctcatgaacgtacttctttggagaatatcttcttccaattagaaaaaaacaaacagattcttaaggttaagtcacgtagcttcttgcctggtgcccacatgagagcttctacggactcattgttggaagttctggccagggcaatttggccggagaaggaaataaagggtattcaattaggaaaaaaggaagtcatattgtccctgtttgcagatgacatgattgtatatctagaaaaccccattgtctcagcccaaaatctccttaagctgataagcaacttcagcaaagtctcaggatacaaaatcaatgtacaaaaatcacaagcattcttatacaccaataacagacaaacagagagccaaatcatgagtgaactcccattcacaattgtttcaaagagaataaaatacctaggaatccaacttacaagggacgtgaaggacctcttcaaggagaactacaaaccactgctcaaggaaataaaagaggatacaaacaaatggaagaacattccatgctcatgggtaggaagaatcaatatcgtgaaaatggccatactgcccaaggtaatgtatagattcaatgccatccccatcaagctaccaatgcctttcttcacagaattggaaaaaactactttaaagttcatatggaaccaaaaaagagcccgcatcgccaagtcaatcctaagccaaaagaacaaagctggaggcatcacgctacctgacttcaaactatactgcaaggctacagtaaccaaaacagcatggtactggtaccaaaacagagatatagatcaatgcaacagaacagagccctcagaaatgaggccgcatatctacaactatctgatctttgacaaacctgacaaaaacaagcaatggggaaaggattccctatttaataaatggtgctgggaaaactggctagccatatgtagaaagctgaaactggatcccttccttacaccttatacaaaaattaattcaagatggattaaagacttaaacgttagacctaaaaccataaaaaccctaggagaaaacctaggcattaccattcaggacataggcatgggcaaggacttcctgtctaaaacaccaaaagcaatggcaacagaagccaaaattgacaaatgggatctaattaaactaaagagcttctgcacaccaaaagaaactaccatcagagtgaacaggcaacctacaaaatgggagaaaattttcgcaacctattcatctgacaaagggctaatattcagaatctacaatgaacttaaacaaatttacaagaaaaagacaaacaaccccatcaaaaagtgggcgaaggacatgaacagacccttctcaaaagaagacatttatgcagccaaaaaatacatgaaaaaatgctcaccatcactggccatcagagaaatgcaaatcaaaaccacaatgagataccatctcacaccagttagaatggcgatcattaaaaagtcaggaaataacagacaaacagagagccaaatcatgagtgaactcccaatcacaattgcttcaaagagaataaaatacctaggaatccaacttacaaaggatgtgaaggacctcttcaaggagaactacaaaccactgctcaatgaaataaaagaggacacaaacaaatggaagaacattccatgctcatggataggaagaatcaatattgtgaaaaatggccatactgcccaagattactgactcagcaatggagatgttatcggcaaaatgccattacctgcacattttggatatctctggttgtgtcttgcttactgaccaaatccttgaggaccttcagataggctgcaaacaactccggatccttaagatgcaatactgcacaaatatttccaa

SEQ ID NO: 13301 - DNA, 2562 bp, Homo sapiens
  SIMILAR (296)..(403): 911254mologous to Homo sapiens Human secreted protein dx138_4,accession number Y05323,Smith-Waterman Score=191.
atgagtgaactcccattcacaattgcttcaaagagaataaaatacctaggaatccaacttacaagggacgtgaaggacctcttcaaggagaactacaaaccactgctcagtgaaataaaagaggatacaaagaaatggaagaacattccatgctcatgggtaggaagaatcaatatcatgaaaatggccatactgcccaaggtgctagagaaaaacgtattaggaagagatatggaaactatgaaaaaggtccaaatcaaacttctagagataagcactataatgaaaaatgagatgaaaaatgtactggatggaattaactgtgcattagacagtgaacaaatgaaggttttcaacacatactccaatgaagactatgacaggagaaatgacgaagttgaccctgtggctgcttcagctgagtatgaacttgaaaaacgtgtagaaaagctggaacttttcccagtggagctagagaaaggaatgtatggagaggaagacagggtgcagctgggttctcgatgggtcagccacaggaataataagtggcctttaaggatgaggttccagacttcactcagagaaagctatgaggatggtcttggtataagtattattggaatgggtgttggagcagatgctggacttgaaaagctgggaatattcgtcaagacagtaacagaaggtggtgctgctcaacgggatggcagaaaaagtggggtattgctgaaaagacacctgaaaatgtggaagcgactttggaactggacaacaggcagaggttggaacagtttggagggctcagaagaagacaggaaaatgtgggaaaatttggaacttcctagagacttgttgaatggctttgaccaaaatgctgatagtgatatgaacaataaggtccaggctgaggtgtcctcagatggagaagaggaacttgttgggaactgcagtaaaggtcactcttgctatgtaaagagactggcagcattttgccactgccagaatgatatggtttggctgtgtccccacacaaatctcatcttgaattgtagctctcatatttcccacatgcttgggcagtatggccattttcacgatattgattcttcctacccatgagcatggaatgttcttccatttgtttgtatcctcttttatttcattgagcagtggcttgtagttctccttgaagaggtccttcacgtcccttgtaagttggatttctaagtattttattctatcaggctcgaaccctttaagatcaacgttcttgagcagatcacgaagcatatcgaaaaactgcagtgcggaggtgtagtcaaacaactcagcaggcgtgggaacaatcagcacatcagcagcacatacgacattaatcgtgccgatacccaggttaggcgcgctgtcaataactatgacatcatagtcatgagcaacagtttcaatggccagtcggagcatcaggtgtggatcggtgggcagtttaccttcatcaaatttgcccattaactcagtttcaatacggtgcagagccagacaggaaggaataatgtcaagccccggccagcaagtgggctttattgcataagtgacatcgtccttttccccaagatagaaaggcaggagagtgtcttctgcatgaatatgaagatctggtacccatccgtgatacattgaggctgttccctcggggtcgttaccttccacgagcaaaacacgtagccccttcagagccagatccggtggaaatacgtcttcagcacgtcgcaatcgcgtaccaaacacatcacgcatatgattaatttgttcaattgtataaccaacacgttgctcaacccgtcctcgaatttgcatatccgggttcggtagtcgccctgctttctcggcatctctgatagcctgagcatgaaccccaattatatccgctgcttcacgcggctggtcaacgtcggtgcctttgatcagcgcgacatggtaagccagcagctgcagcggaacggtgtagaagatcggtgcaatcacctcttccacatgcggcatctcgatgatgtgcatgttatcgctacttacaaaacccgcatcctgatcggcgaagacatacaactgaccgccacgcgcgcgaacttcttcaatgttgaatttcagtttttccagcaattcgttgttcggtgcaacaacaataaccggcatatcggcatcaattagcgccagcggaccgtgtttcagttcgccagcagcgtaggcttcagcgtgaatgtaagagatctctttcaacttcaatgcgccttccagcgcgattgggtactgatcgccacggcccaggaacagcgcgtgatgtttgtcagagaaatcttcagccagcgcttcaatgcgtttgtcctgagacagcatctgctcaatacggctcggcagcgcctgcagaccatgcacgatgtcatgttcaatggaggcatccagacctttcaggcgagacagcttcgccaccagcatcaacagcacagttaactgagtggtgaatgctttagtggatgccacgccgatttctgtacccgcgttggacat

SEQ ID NO: 13302 - DNA, 1710 bp, Homo sapiens
  SIMILAR (1)..(240): 951254mologous to Cloning vector pZC320 SopA,accession number U26464,Smith-Waterman Score=377.
atggacaaattcctggaaaaatacatttcttctagtttaaatcaggaagcattagatacccttaacagaccaataacaaacagcgaggttgataaattaccaacaaaaaaaagtccaggaccagatggattcacagcagaattctaccagacattcaaagaaccaatccttttgacactattccacaacatagagaaagaaggaaccttccctaattcattctacaaagccagcatcaccctaataccaaaaccaggaaaggacataaccaaaaaagaaaactacagactgatatccttgacgaacatagatgtaccggaagtcctagctggagcaatcagaccagagaaagaaataaagggcattcacatcgataaagaggaagtcaaactgtccctgtttgctgacaatacgattgtttaccttgaaaaccctaaggactcctccagaaagttcctaaaactgatcaaagaattcagcaaagtttctggatacaagattaatagagcgacctggcagctctgcagcactagtaaagggaaccccactacagcaagtggactggcatgggaaacctatttgaccctgtgggctgaggactcttttccccaacttgggaaaaccaggaagccccgactttggaagctctttctgtctcctcagcaaatcctggttcaaacagaaactgcgacctaccagggctgtcagctgaagacgttgcaagcttaccttgtacatgctttgagtctcaccaagctcctgtgcattagaataaaatacctaggaatccaacttacaagggatgtgaaggagctcttcaaggagaactacaaaccactgctcaatgaaataaaagaggatacaaacaaatggaagaacattccatgctcatgggtaggaagaatcaatatcgtgaaaatggccatactgcccaaggtaatttatagattcaatgccatccccatcaacctaccaatgactttcttcacagaattggaaaaaaactactttaaagttcatatggaaccaaaaaagagcccgcatagccaagtcaatcctaagccaaaagaacaaagctggaggcatcacactacctgacttcaaactatactacaaggctacagtaaccaaaacaggatggtactggtaccaaaacagagatatagatcaatggaacggaacagagccctctgaaataatgccgcatatctacaactatctgatctttgacaaacctgagaaaaacaagcaatggggaaaggattccctatttaataaatggtgctgggaaaactggctagccatatgtagaaagctgaaactggatcccttccttacaccttatacaaaaattaattcaagatggattaaagacttaaatgttagacctaaaaccataaaaaccctagaagaaaacctaggcaataccattcaggacataggcatgggcaaggacttcatgtctttgcccaaacaccagaagcaatggcaacaaaagccaaaattgacaaatgggatctaattaaactaaggagcttctgcacagcagaagaaattaccatcagagatcatgaagacgccagatcctgctggcttgcattctcagaggagggaataccaggtggaattgtggccatgcggcattgtcatgaagaatatgagatttgcagctgtcatggcaaggaaaccctggagcttcagagattttag

SEQ ID NO: 13303 - DNA, 2807 bp, Homo sapiens
  SIMILAR (3)..(737): 931254mologous to Homo sapiens putative p150,accession number U93563,Smith-Waterman Score=1182.
aaaagcaagagcaaacacattcaaaagctagcagaaggcaagaaataactaaaatcagagcagaactgaaggaaatagagacacaaaaaacccttcaaaaaattaatgaatccaggagctggttttttgaaaggatcaacaaaattgatagaccgctagcaagactaataaagaagaaaagagagaagaatcaaatagacgcaataaaaaatgataaaggggatatcactaccagtcccacagaaatacaaacaaccatcagagaatactacaaacacctctacgcaaataaactagaagatctagaagaactggataaattcctcgaaacatacaccctcccaagactaaaccaggaagaaggtgactctctgaatagaccaataacaggatctgaaattgtggcaataatcaatagcttgccaaccaaaaagagtccaggaccagatggattcacagccgaattctaccagaggtacaaggaggaactggtaccattccttctgaaacgattccaatcaatagaaaaagagggaatcctccctaactcattttatgaggccaacatcatcctgataccaaagtcggccagagacacaaccaaaaaagataattttaggccaatatccttgatgaaccttgatgcaaaaatcctcaataaaatactgacaaaccgaatccagcagcacatcaaaaagcttatccaccatgatcaagtgggcttcatccctgggatggcaaggctggttcaatatacgcaaatcaataaatgtaatccagcatataaagggtattcaaagacaaaaaccacatgattatctcaatagatgcagaaaaagcctttgacaaaattcaacaacccttcatgctaaaaactctcaataaattagcccaaaatctccttaagctgataagcaacttcaacaaagtctcaggatacaaaatcaatgtacaaaaatcacaagcattcttatacaccagcaacagacaaacagagagccaaatcatgagtgaactcccattcacaattgcttcaaagagaataaaatacctaggaatccaacttacaagggatgtgaaggacctcttcaaggagaactacaaaccactgctcaaggaaataaaagaggatacaaacaaatggaagaacattccatgctcatgggtaggaagaatcaatatcgtgaaaatggccatactgcccaaggtaatttacagattcaatgccatccccatcaagctaccaatgactttcttcacagaattggaaaaaactactttaaagttcatatggaaccaaaaaagagcccacatcgccaagtcaatcctaagccaaaagaacaaagctggaggcatcacactacctgacttcaaactatactacaaggctacagtaaccaaaacagcatggtactggtaccaaaacatgtgctatagatcaatggaacagaacagagccctcagttattatgtcgcatatctacaaccatctgatctttgacaaacctgagaaaaacaagcaatggggaaaggattccctatttaataaatggtgctgtgaaaactggctagccatatatagaaagctgaaactggatcccttctttacaccttatacaaaaatcaattcaagatggactaaagacttaaatgttagacctaaaaccataaaaaccctagaagaaaacctaggcattaccattcaggacataggcatgggcaaggacttcatgtctaaaacaccaaaagcaacggcagcaaaagcccaaattgacaaatgggatctaattaaactaaagagcttctgcacagcaaaagaaactaccatcagagtgaataggcaacctacaaaatgggaggaaattttcgcaacctactcatctgacaaagggctgatatccagaatctacaatgaactcaaacaaatttacaagaaaaaaacaaacaaccccatcaaaaagtgggcaaaggacatgaacagacacttctcaaaacaagacatttatgcagccaaaaaacacatgaaaaaatgctcatcatcactggccatcagagaaatgcaaatcaaaaccacaatgagataccatctcacaccagttagaatggctatcaaaaagtcaggaaacaacaggactccagggctgaacgaggcccaagaatcagaggaccaaatgccgaggcagtctcaggcagctccgacagtccgggacgccaggcccagcagtcctacagttgccctcttgaatcagtcgggtccagagatgagcagcagctgttacctaggctatgtcagggccaggagccaagacttttctgatgtcgctcaaaacccagcaaagagccagctgcctccttacatcctcaccccggccctggaccaagatggcagcaaggatcacatggacccatttcgccagcttaccacatcccaggcccagtggaatcttcaccttccaaggatcttgtctttatcagaattaactctgaaagcagaagagcagccaccaggaactgtgctacatgctttctttacaaacaatgcctcattgaagcttcaccacctggaacaagatgctactgctaccttcttagaaaacaggaaattaagacaaggggacaccaaagttacacagctactagagacagagacagaattcaaacccagttttctcacctgtaaattggagctaacggtatcaaccacgctatggtttgaatatggtttatttggccccatcaagtctcatgttgaaattcgatcccccagtgttgaaagtggggcctggtgggaggtgttcggattgtga

SEQ ID NO: 13304 - DNA, 3131 bp, Homo sapiens
  SIMILAR (1419)..(4): 991254mologous to Cloning vector pBACe3.6 levansucrase,accession number U80929,Smith-Waterman Score=2463.
atggataaattccttgacacatacactctcccaaaactaaaccaggaagaagttgaatctctgaatagaccaataacaggatctgaaattgtggcaataatcaatagcttaccaaccaaaaagagtccaggaccagatggattcacagccgaattctaccagaggtacaaggaggaactgctgataagcaacttcagcaaactcctcaggatacaaaatcaatgtacaaaaatcacaagcattcttatacaccaataacagacaaacagagagccaaatcatgagtgaactcccattctgttattgcttcaaagagaataaaatacctaggaatccaacttacaagggatgtgaaggacctcctcaaggagaactacaaaccactgctcaatgaaataaaagaggatacaaacaaacggaagaacattccatgctcgtaggtaggaagaatcaatatcgtgaaaatggccatactgcccaaggacaaaacaagtaaatatattgatgttgatgagaatgagggttctcactgtggaaaaaggaaatacaaatatggaatggagaaagcgttggaaattctggccagggcaatcaggcaggagaaagaaataaagggtattcaattaggaaaagaggaagtcaaattgtccctgtttgcagatgacatgattgtacatttagaaaaccccatcatctcagcccaaaatctccttaagctgataagcaacttcagcaaagtctcaggacacaaaatcaatgtacaaaaatcacaaacattcctatacaccaataacagacaaacagagagccaaatcatgagtggactcccattcaaaattgctacaaagagaataaaatacctaggaatccaacttacaagggatgtgagggatctcttcaaggagaactacaaaccactgctcaatgaaataaaagaggatacaaacaaatggaagaagaacatcctgtcctcatggataggaagaatcaatatcgtgaaaatggccatactgcccaaggtaatttatagattcaatgccatcctcatcaacctaccaatgactttcttcacggaattggaaaaaactactttaaaattcatatggaaccaaaaaagagcctgcattgccaagtcaatcctaagccaaaagaacaaagctggaggcatcacactacctgacttcaaactatactacaaggctacagtaaccaaaacagcatgggacatggatgaagctggaaaccatcattctcagcaaactattgcaaggacaaaaaaccaaacactgcgttttctcagtcatgggtgggaattcaacaatgagaacacatggacacaggaaggggaacatcacacaccagggcctgtcaggggtaccttgggacaactgacatttgcaagacttaacctgagccccatcagttacaagagtttggaggcctcagctgtcacttctgtttccatggaaactcaaatcagattgccaaaaatgaggttttggtatcaggatgatgctggcctcataaaatgtgttggggaggagttgctctttttctattgtttggaaccatttcagaaggaatggtaccagctcctctctgtacctctggtagaatttggctgtgaatccgtctggtcctgggctttttttggctgggacatggatgaagctggaaaccatcattctcagcaaactaacacaccaacagaaaaccgaacagcacatcttctcactcataagtgggaattgaacaatgaaaacacatggacacatggagggaaacatcacacaccagggcctgttgggggatgttcacttatccaagtggaaatcagatggtttatcgaaatggtatgtaagagagaagtttacagatacgaccattcatggtggtggcagttgcagcaacagcagcaggatccccagggcagactgcaggcctctgggggctgggctctcagaagggtgccaggccacagccaaaatgctcaggcagaagcaaggtggctgtactgtgagcctagggaaggcaggtcccccttagcgggaacagtgaaagcaagggtgctcaatgtgcttgctcctttaccctgcagcagcagcagccgtgatacacatttttgggcttcctcaggcatgagccaaatatcagacactctatccctcaaactccaagagaccctcacgttcctcaacatccttctcttccaaagaaagggagaggggaagaacagcatgtcaacaacactctccaaagaattcctgactctcagcttctttgacttcaacctgtttcaaaactcaatgttggaagttctggccagggcaattaggcaggagaaggaaataaagggtattcaattaggaaaagaggaagtcaaattgtccctgtttgcagatgacatgattgtatatctagaaaacccccttgtctcagcccaaaatctccttaagctgataagcaacttcagcaaagtctcagaatacaaaatcaatgtacaaaaatcacaagcattcttacacaccaataacagacaaacagagagccaaatcatgagtgaactccccttcacaattgcttcaaagagaataaaatacctaggaatccaacttacaagggatgtgaaggacctcttcaaggagaactacaaaccactgctcaatgaaataaaagaggatacaaacaaatggaagaacattccatgctcatgggtaggaagaatcaatatcgtgaaaatggccatactgcccaaggtaatttatagattcaatgccatcctcatcaagctaccaatgactttcttcacagaattggaaaaaactactttaaagttcatatggaaccaaaaaagagcccacgtcgccaagtcaatcctaagccaaaagaacaaagctggaggcatcacactacctgacttcaaactatattgcaaggctacagtaaccaaaacagcatgccaggaggtggcggtagtaaccaatggcaaaatcctgagacactgcctctatcagcttctcattgtcctgcggacgcttcctggatctaatctgatgcttatgaaagtgatttccttctttcgaaaacaccaggcccaaacaaaaactaacttcatcctgcagataaaaact

SEQ ID NO: 13305 - DNA, 5688 bp, Homo sapiens
  SIMILAR (403)..(780): 921254mologous to Plasmid F Protein D,accession number M12987,Smith-Waterman Score=586.
atgggagactttaacaccctactgtcagcattagacagatcaacgagacagaaagttaacaaggatattcaggaattgaactcagctctgcaccaagcagacctaatagacatctacagaactctccaccccaaatcaacagaatatacattcttctcagcaccacaccgcacttattccaaaattgaccacttagttggaagtaaagcactcctcaggaaatgtaaaagaacagaaattataacaaactgtctctcagaccacagtgcaatcaaactagaactcaggattaagaaactcactcaaaaccactcaactacatggcaactgaacaacctgctcttgaatgactactgggtacataacgaaatgaaggcagaaataaagatgttctttgaaaccaatgaaaacaaagacacaacataccagaatctctggtatgtcaaagataccagaatctctggtatgctctggtatgtgaaagcagtgtgtagagggaaatttatagcactaaatgcccacaagagaaagcaggaaagatctaaaattgacaccctaacatcacaattaaaagaactagagaagcaagagcaaacacattcaaaaactagcagaaggcaagaaataactaagatcagagcagaactgaaggaaatagagacacaaaaaacccttcaaaaaatcaatgaatgcaggagctggttttttgaaaagatcaacaaaattgatagaccgctagcaagactaattaagaagaaaagagagaagaatcaaatagatgcaataaaaaatgacaaaggggatatcatcaccgatcccacagaaatacaaactaccatcagagaatactataaacacctctacggaaataaactagaaaatctagaagaaatggataaattcctggacacatacaccctcccaagactaaaccaggaagaagttgaatctctgaatagaccaataacaggctctgaaattgaggcaataattaatagcttaccaaccaaaaaaagtccaggaccagatggattcacagccgaattctaccagaggtacaaggaggagctgagaataaaatacctaggaattcaacttacaagggacgtgaaggaccttttcaaggagaactacaaaccactgctcaatgaaataaaagaggatacaaacaaatggaagaacattccatgctcatgggtaggaagaatcaatatcatgaaaatggccatactgcccaaggtaatttatagattcaatgccatccccatcaagctaccaatgactttcttcacagaattggaaaaaactactttaaagttcatatggaaccaaaaaagagcccgcatcgccaagtcaatcctaagccaaaagaacaaagctggaggcatcacgctacctgacttcaaactatactacaaggctacagtaaccaaaacagcatggtactggtaccaaaacagagatacagatcaatggaacagaacagagccctcagaaataatgctgcatatctacaaccatctgatctttgacaaacctgacaaaaacaagcaatggggaaaggattccctatttaataaatggtgctgggaaaactggctagccatatgtagaaagctgaaactggatcccttccttataccttatacaaaaattaattcaagatggattaaagacttaaacgttagacctaaaaccataaaatccctagaagaagacctaggcaataccattcaggacataggcatgggcaaggacttcatgtctaaaacaccaaaagcaatggcaacaaaagccaaaattgacaaatgggatctaattaaactaaagagcttctgcacagcaaaagaaactaccatcagagtgaacaggcaacctacagaatgggagaaattttttgcaatctactcttctgacaaagggctcatatccagaaggtacaatgaactcaaacaaatttacaagaaaaaaaacaaacaaccccatcaaaaagtgggcgaaggatatgaacagatacttctcaaaagaagacatttatgtagccaacagacacatgaaaaaatgctcatcatcactggccatcagagaaatgcaaatcaaaaccacaataagataccatctcaccccagttagaatggcgatcattaaaaagtcaggaaacaacaggtgctggagaggatgtggagaaataggaacacttttacactgttgggtggactgttctattattgtcaaggtcccatcttcacttcaagctcatttacagttatcagggaaagaggttgatgtgaactcagaagtccatgttcaggaaatggctgaagttcgtaaagatgatgttgtaacagtgactgaattctaccagacattcaaagaagaattggtaccaatcctattgacactattccgcaagacagagaaagaaggaacactccctaattcatcctatgaagctagcatcaccctaataccaaaaccaggaaaggatacaaccaaaaaagaaaactacaggctgatatccctgatgaacacagacgctaaaattcttaacaaaatactagctaaccgaatccaacaacatatcaaaaagacaatccaccatgatcaagtgggttccataccagggatggagggatggtttaacatatgcaagtcaataaatgtgatacaccacataaacagaattaaaaacaaaaatcacatgatcatctcaatagatgcagaaaaagcattagacaaaatccagcatctctttatgattaaaactctcagcaaaatcggcatacaagggacatacctcaatgtaataaaagccatctatgacaaacccacagctaacataatactgaatggggaaaagttgaaagcattccctctgagaaatgaaacaagacaaggatgccctctctcaccactcctcttcaacacagtactgaaagtcctagccagagcagtcagacaagagaaggaaataaagggtatccaaattggtaaagaggaagtcatactgtcactgtttgctgatgatatgattgtttacctcaaaaaccctaaagactcctctagaaagctcctagaactgataaaaggattcaacaaagtttccagatacaaaattaatgtacacaaatcagtagctcttctaaacaccaacagcaaccaagcagagaatcaaatcaataactcaaccccttttacaatagctgcaaaaaaaaatgaagtacttaggaatatacctagccaaggaggtgaaagacctctacaaggaaaactacaaaccactgctcaacgaaataaaagaggatacaaacaaaatggaagaacattccatgctcatgcgtaggaagaatcaatatcatgaaaatggccatactgcccaagaattggaaaaaaactactttaaagttcatatggaaccaaaaaagagcctgcatcgccaagtcaatcctaagccaaaagaacaaagctggaggcatcacactacctgacttcaaactatactacaaggctacagtaaccaaaacagcatggtactggtaccaaaacagagatatagatcaatggaacagaacagagccctcagaaataatgccacctatctacaactatctgatctttgacaaacctgagaaaaacaagcaatggggaaaggattccctatttaataaatggtgctgggaaaactggctagccatatgtagaaagctgaaactggatcccttccttacaccttatacaaaaatcaattcaagatggattaaagacttaaatgttagacctaaaaccataaaaaccctagaagaaaacctaggcattaccattcaggacataggcttgggcaaggacttcatgtctaaaacaccaaaagcaatggcaacaaaagccaaaattgacaaatgggatctaattaaactaaagagcttctgtgcagaaaaagaaactaccatcagagtgaacaggcaacctacaaaatgggagaaaatttttgcaacttactcatctgacaaagggctaatatccagaatctacaatgaactcaaacagatttacaagaaaaaaacaaacaaccccatcaaaaagtgggtgaaggacatgaacagacacttctcaaaagaagacatttatgcagccaaaaaacacatgaaaaaatgctcatcatcactggccatcagagaaatgcaaatcaaaaccacaatgagataccatctcacaccagttagaatggcgatcattaaaaagtcaggagacaacagggacatggatgaaggtggaaaccatcattctcagcaaactattgcaaggacaaaaaaccaaacactgcatgttctcactcatagtgaggaaactgtggctcaggaagatgatgtgcctttgacaaggtcatggttgctgaaagcactcaagccccaagaggttcagagcagagccaagtcccctgatggccagtacaaagaggaggagaaagagaaggacagcagagggtgctctctgctggatttccccagcatgccagcttcccactgtgcagataaagcaaaatctgataggagcggggaggaagtgggctcaggctccaggagtacaagttggtatgcaagcaagtcattccaaacgccgcctccacacaaaccctctgagctgcaaattattaacctgcttaactctattgcagaaacaagcgctgctggggtgttggaagttctggccagggcaattaggcaggagaaggaaataaagggtattcaattaggaaaagaggaattcaaattgtccctgtttgcagatgacatgattgtatatctagaaaaccccattgtctcagcccaaaatctccttaagctgataagcaacttcagcaaagtctcaggatacaaaatcaatgtacaaaaatcacaagcattcttatacaccaataacagacaaacagagagccaaatcatgagtgaactcccattcacaattgcttcaaagagaataaaatacctaggaatccaacttacaagggatctgaaggacctcttcaaggagaactacaaaccactgctcaatgaaataaaagaggatacaaacaaatggaagaacattccatgctcatgggtaggaagaatcaatatcgtgaaaatggccatactgcccaagagggacgtgactgcaaattgtccaggttcttggcgttttgaacaaagaattggacaaaacacgcagcaaagaaagaatgaagcaacaaaagaacgaaagcagctctctcggctttcggctcggaggaggccaaggtgcaactttcttcggtcgtctcgaatccgggttcatccgacaccagccgcctccaccatgccgccgaagttccaccccaatgagatcaaagtcgtatacttcacgtgcactggagttgaagtcggtgccacttctgctctggcccccaagattggccccgcgggtctgtctccaaaagaggttggtgatgacattgccaaggtaacgggtgactggaagggcctgaggattacagtgaaactgaccattcagaacagacaggcccagattgaagtggtaccttctgcctccgccctgatcatcaaaaggaactaccaagagacagaaagaaacagaaaaacattaaacacagggggaatatcactttttatgagatcgtcaacattgctcgacagatgcagcactgatccttag

SEQ ID NO: 13306 - DNA, 6163 bp, Homo sapiens
  SIMILAR (1255)..(1599): 1001254mologous to Plasmid F Protein D,accession number M12987,Smith-Waterman Score=584.
atgaagaggagagggttccaagatggccgaataggaacagctccagtctacagctctcagcatgagcgacgcagaagacggatgatttctgcatttccaactgaggtaccgggttcatctcactagggagtgccagacagtgggcgcaggccagtgggtgcgcgcaccgtgcggagccgaagcagggcgaggcattgcctcacctgggaagcgcaaggggtcagggagttccctttccgagtcaaagaaaggggtgacggacgcacctggaaaatcgggtcactcccacccgaatattgcgcttttcagaccggcttaaaaaacggcgcaccacgagactatatcccacacctggccttcggagggtcctacgcccacggaatctcgctgattgctagcacagcggtctgagatcaaactgcaaggccgcagcaaggctgggggaggggcgcccgccattgcccaggcttgcttaggtaaacaaagcagccggggaagctcgaactgggtgcagcccaccacagctcaaggaggcctgcctgcctctgtaggctccacctctgggggcagggcacagacaaacaaaaagacagcagtaacctctgcagacttaaatgtccctgtctgacagctttgaagagagcagtggttctcccagcacgcagctggagatctgagaacgggcagactgcctcctcaagtgggtccctgacccctgacccccgagcagcctaactgggaggcaccccccagcaggggcacactgacacctcacacggcagggtattccaacagacctgcagctgagggtcctgtctgttagaaggaaaactaacaaacagaaaggacatccacaccgaaaacgcatctgtacatcaccatcatcaaagaccaaaagtagataaaaccacaaagatggggaaaaaacagaacagaaaaactggaaactctaaaacgcagagcacctctcctcctccaaaggaacgcagttcctcaccagcaacggaccaaagctggatggagaatgattttgacgagctgagagaagaaggcttcagacgctcaaattactctgagctacgggaggacattcaaaccaaaggcaaagaagttgaaaactttgaaaaaaatttagaagaatgtataactagaataaccaatacagagaagtgcttaaaggagctgatggagctgaaaaccaaggctcgagaactacgtgaagaatgcagaagcctcaggagccaatgcgatcaactggaagaaagggtatcagcaatggaagatgaaatgaatgaaatgaagcaagaagggaagtttagagaaaaaagaataaaaagaaacgagcaaagcctccaagaaatatgggactatgtgaaaagaccaaatctacgtctgattggtgtacctgaaagtgatgcggagaatggaaccaagttggaaaacactctgcaggatattatccaggagactttccccaatctagcaaggcaggccaacgttcagattcaggaaatacagagaacgccacaaagatactcctcgagaagagcaactccaagacacataattgtcagattcaccaaagttgaaatgaaggaaaaaatgttaagggcagccagagagaaaggtcgagttaccctcaaagggaagcccatcagactaacagcggatctctcggcagaaaccctacaagccagaagagagtgggggccaatattgaacattcttaaagaaaagaattttcaacccagaatttcatatccagccaaactaagcttcataagtgaaggagaaataaaatactttacagacaagcaaatgctgaccgattttgtcaccagcaggcctgccctaaaagagctcctgaaggaagcgctaaacatggaaaggaacaaccggtaccagccactgcaaaatcatgccaaaatgtaaagaccatcgagactaggaagaaactgcatcaactaacgagcaaaatcaccagctaacatcataatgacaggatcaaattcacacataacaatattaactttaaatgtaaatggactaaattctccaattaaaagacacagactggcaagttggataaagagtcaagacccatcagtgtgctgtattcaggaaacccatctcatgtgcagagacacacataggctcaaaataaaaggatggaggaagatctaccaagcaaatggaaaacaaaaaaaggcaggggttgcaatcctagtctctgataaaacagactttaaaccaacaaagatcaaaagagacaaagaaggccattacatgatggtaaagggatcaattcaacaagaggagctaactatcctaaatatgtatgcacccaatacaggagcacccagattcataaagcaagtcctgagtgacctacaaagagacttagactcccacacattaataatgggagactttaacaccccactgtcaacattagacagatcaacgagacagaaagtcaacaaggatacccaggaattgaactcagctctgcaccaagcagacctaatagacatctacagaactctccaccccaaatcaacagaatatacatttttttcagcaccacaccacagctattccaaaattgaccacatacttggaagtgaagctctcctcagcaaatgtaaaagaacagaaattataacaaactatctctcagaccacagtgcaatcaaactagaactcaggattaagaatctcactcaaagccgctcaactacatggaaactgaacaacctgctcctgaatgactactgggtacataacgaaatgaaggcagaaataaagatgttctttgaaaccaacgagaacaaagacacaacataccagaatctctaggacgcattcaaagcagtgtgtagagggaaatttatagcactaaatgcccacaagagaaagcaggaaagatccaaaattgacaccctaacatcacaattaaaagaactagaaaagcaagagcaaacacattcaaaagctagcagaaggcaagaaataactaaaatcagagcagaactgaaggaaatagagacacaaaaaacccttcaaaaaatcaatgaatccaggagctggtttttttgaaaggatcaacaaaattgatagaccgctagcaagactaacaaagagaaaaagagagaagaatcaaatacacgcaataaaaaatgataaaggggatatcaccaaccgatcccacagaaatacacactaccatcagagaatactataaaaacctctacgcaaagaaactagaaaatctagaagaaatggataaattcctggagacatacaccctcccaagaccaaaccaggaagaagttgaatctctgaatagaccaataacaggatctgaaattgtggcaataatcaatagcttaccaaccaaaaagagtccaggaccagatggattcacagccgaattctaccagaggtacaaggaggaactggtaccattccttctgaaactattccaatcaatagaaaaagaaggaatcctccctaactcattttaatgaggccagcatcattctgataccaaagccgggcagagacacaaccaaaaaagagaattttagaccaatatccttgatgaacattgatgcaaaactcctcaataaaatactggcaaaccgaatccagcagcacatcaaaaagcttatccaccatgatcaagtgggcttcatccctgggatgcaaggctggttcaatatacacaaatcaataaacataatccagcatataaacagaaccaaagacaaacaccacatgattatctcaatagatgcagaaaaggcctttgacaaaattcaacaacgctttcatgctaaaaaatctcaataaattaagtattgatgggatgtatctcaaaataataagagctatctatgacaaacccacagccaatatcatactgaatgggcaaaaactggaagcattccctttgaaaactggcacaagacagggatgccctctctcaccactcctattcaacatagtgttggaagttctggccagggcaattaggcaggagaaggaaataaagggtattcaattaggaaaagaggaagtcaaatttgtccctgttggcagatgacatgatggtatatctaggaaaacccccattgtcctcagccccaaaatcttctttaaggctggttaagcaacttcagcaaaagtcttcaggttacaaaatcaatgtgcaaaaatcaccaagcattcctatacaccaataacacagacaaacaagagagccaaatcatgagtgaactcccatttcacaattgcttccaagagaattaaatacctaggaatccaccttacaagggacgtgaaggacctcttcaaggagaactacaaaccacttgctcaaggaaaataaaagaggatacaaacaaatggaagaacattccatgctcatgggtaggaggaagaatcaatctcgtgaaaaatggccatacttgcccaaggtaatttacagattcaatgccatccccatcaagctaccaatgactttcttcacagaattggaaaaaaactactttaagtaaagttcatatgggaaccaaaaaaggagcctgcattgccaagtcaatcctaagccaaaagaacaaagctgggaggcatcaacgctacctgactttcaaactattacttacaaggctacagtaaccaaaacagtatgttatcagcatggtactggtaccaaaacagcatggtactggtaccaaaacagagatatagatcaatggaacggaacagaacagagccctcagaaataatgccacatatctacaactatctgacatctttgacaaacctgagaaaaacaagcatgggggaaaggcatcccctacttaataaaatggctgctggggaaaactggctagcccatatgtagaaagctcaaactgaaactggatcccttccaagctgaaactggatcccttccttacaccttatacaaaaatcaattcaagatggattaaagatttaaacatcattagacctaaaaccataaaaaccctagaagaatacctaggcattaccattcaggacataggcatgggcaaggacttcatgtctaaaacaccaaaagcaatggcaacaaaagccaaaattgacaaatgggatctaattaaactaaagagtttaattaaactaaagagcacagcaggaaaaaaccaccatcagagtgaacaggcaacctacagaatgggagaaaattttcacaacctactcatctgacaaaaagggctaatatccagaatctacaatgaactcaaacaaattttcaagaaaaaaatcaaacaaccccatccaaaagtgggcgaaggatatgaacagacacttctcaaaagaagacatttatgcagccgaaaaaacacatgaaaaaaatgctcaccatcactggccatgcagagacaatgcaaatcaaaaccacaaatcaaaaccacaatgagataccatctcacaccagttagaatggcaatcattaaaaagtcaggaaacaacaggtgctggagaggatgcggagaaataggaacacttttacactgttggtgggactgtaaactagtccaaccattgtggaagtcagtgtggcgattcctcagggatctagaactagaaataccatttgacccagccatcccatttactgggtatatacccaaatgagtataaatcatgctgctataaagacacatgcacacgtatgtttattgcggcactattcacaatagcaaagacttggaaccaacccaaatgtccaacaatgatagattggattaagaaaatgtggcacatatacaccatggaatactatgcagccataaaaaatgatgagttcatatcctttgtagggacatggatgaaattggaaaccatcattctcagtaaactatcgcaagaacaaaaaaccaaacaccgcatattctcactcataggtgggaattgaacaatgagatcacatggacacaggaaggggaatatcacactctggggactatggtggggaggggggaggggggagggatagcattgggagatatacctaatgctagatgacgagttagtggtgcagtgcaccagcatggcacatgtatacatatgtaactaacctgcacaatgtgcacatgtaccctaaaac

SEQ ID NO: 13307 - DNA, 3633 bp, Homo sapiens
  SIMILAR (407)..(1657): 1001254mologous to Homo sapiens transcription factor,accession number U80917,Smith-Waterman Score=2223.
atggatccgccggcgggagccgctcgccgcctgctctgccccgcgctgctgctgctgctgctgctgctgccgccgccgctcctgccgccgccgccgccgcccgcgaacgccaggctcgccgccgccgccgaccccccaggcgggcccctggggcacggagcggagcgcatcctggcggtgcccgtgcgcactgacgcccagggccgcttggtgtcccacgtggtgtcggcagctacgtccagagcaggggtacgagcccgcagggccgccccggtccggaccccgagcttccccggaggcaacgaggaggagcctggcagtcacctcttctacaatgtcacggtctttggccgagacctgcacctgcggctgcggcccaacgcccgcctcgtggcgcccggggccactatggagtggcagggcgagaagggcaccacccgcgtggagcccctgctcgggagctgtctctacgtcggagacgtggccggcctagccgaagcctcctctgtggcgctcagcaactgcgatgggctggctggtctgatccggatggaggaggaggagttcttcatcgaacccttggagaaggggctggcggcgcaggaggctgagcaaggccgtgtgcatgtggtgtatcgccggccacccacgtcccctcctctcggggggccacaggccctggacacaggggcctccctggacagcctggacagcctcagccgcgccctgggcgtcctagaggagcacgccaacagctcgaggcggagggcacgcaggcatgctgcagacgatgactacaacatcgaggtcctgctgggcgtggatgactctgtggtgcagttccacgggaaggagcacgtacagaagtacctgctgacactcatgaacattgtcaatgaaatctaccatgacgagtccttgggtgcccacatcaacgtggtcctggtgcggatcatcctcctgagctatggaaagtccatgagcctcatcgagatcgggaacccctctcagagcctggagaatgtctgccgctgggcctacctccagcagaagccagacacgggccacgatgaataccacgatcacgccatcttcctcacacggcaggactttgggccttccggcatgcaaggctatgctcctgtcaccggcatgtgccatccggtccgcagctgcaccctgaaccatgaggacggcttctcctcagcgtttgtggtggcccatgagactggccacgtgctgggcatggagcacgacgggcagggcaaccgctgtggcgacgaggtgcggctgggcagcatcatggcgcccctggtgcaggccgccttccaccgcttccactggtcccgctgcagccagcaggagctgagccgctacctgcactcctatgactgcctgctggatgaccccttcgcccacgactggccggcgctgccccagctcccgggactgcactactccatgaacgagcaatgccgctttgacttcggcctgggctacatgatgtgcacggcgttccggacctttgacccctgcaagcagctgtggtgcagccatcctgacaacccctacttttgcaagaccaagaaggggccccccttggacgggactatgtgtgcacctggcaagcattgttttaaaggacactgcatctggctgacacctgacatcctcaaacgggacggcagctggggcgcttggagtccgtttggctcctgctcacgtacctgtggcacgggcgtgaagttcaggacccgccagtgtgacaacccacacccggccaacgggggccgcacctgctcgggccttgcctacgacttccagctctgcagccgccaggactgccccgactccctggctgacttccgcgaggagcagtgccgccagtgggacctgtacttcgagcacggcgacgcccagcaccactggctgccccacgagcaccgggatgccaaggagagatgccacctgtactgcgagtccagggagaccggggaggtggtgtccatgaagcgcatggtgcatgatgggacgcgctgctcctacaaggacgccttcagcctctgtgtgcgcggggactgcaggaaggtgggctgtgacggtgtgatcggctccagcaagcaggaagacaagtgtggcgtgtgcggaggggacaacagccactgcaaagtggtcaagggcacgttcacacggtcacccaagaagcatggttacatcaagatgtttgagatccctgcaggagccagacacctgctcattcaggaggtagacgccaccagccaccatctggccgtcaagaacctggagacaggcaagttcatcttaaatgaagagaatgacgtggatgccagttccaaaaccttcattgccatgggcgtggagtgggagtacagagacgaggacggccgggagacgctgcagaccatgggccccctccacggcaccatcaccgttctggtcatcccggtgggagacacccgggtctcactgacgtacaaatacatgatccatgaggactcactgaatgtcgatgacaacaacgtcctggaagaggactctgtggtctacgagtgggccctgaagaagtggtctccgtgctccaagccctgtggcggagggtcccagttcaccaagtatggctgccgccggaggctggaccacaagatggtacaccgtggcttctgtgccgccctctcgaagcccaaagccatccgcagagcgtgcaacccacaggaatgctcccagccagtgtgggtcacaggcgaatgggagccatgtagccagacctgtgggcggacaggcatgcaggtgcgctccgtgcgctgcattcagccgctacacgacaacaccacccgctccgtgcacgccaagcactgcaatgacgcccggcccgagagccgccgggcctgcagccgcgagctctgccctggtcgttggcgagccgggccctggtcccagtgctcagtaacctgtggcaacggcacccaggagcggccagtgccctgccgcaccgcggacgacagcttcggcatctgccaggaggagcgtcctgagacagcgaggacctgcaggcttggcccctgtccccgaaacatctcagatccctccaagaagagctacgtagttcagtggctgtcccgcccggaccccgactcgcccatccggaagatctcgtcaaagggccactgccaaggcgacaagtcaatattctgtaggatggaagtcttgtcccgctattgctccatcccaggctacaacaagctgtcctgcaagtcctgtaacctgtacaacaacctcaccaacgtggagggcaggatagagccaccgcctgggaagcacaacgacattgacgtgttcatgcctaccctcccagtgcccactgtagccatggaggtgcggccatcaccaagcacccccctggaggtccctctcaatgcctccagcaccaatgccacagaggatcacccagaaaccaatgccgtagatgaaccctacaaaatccatggcctggaagatgaagtccagccacccaacctaatccctcgacgaccgagcccctatgaaaagaccagaaaccaaagaatccaagagctcattgatgagatgcggaagaaagagatgctcggaaagttc

SEQ ID NO: 13308 - DNA, 933 bp, Homo sapiens
  SIMILAR (1)..(714): 991254mologous to Escherichia coli Oligopeptide transport ATP -binding protein OppD,accession number D90763,Smith-Waterman Score= 1230.
aaactgcgcgctgaacggatctcaatgatttttcaggacccaatgacttcgttgaatccctatatgcgcgtcggtgagcagttgatggaagtgctgatgctgcataagaacatgagcaaagctgaggcgtttgaagagtcggtgcggatgctcgatgcggtaaaaatgccggaagcgcgtaaacgcatgaaaatgtacccgcacgaattttctggcggcatgcgtcagcgagtcatgattgcgatggccttgttatgtcgacctaagctgctgattgcggatgaaccaacaactgcgctggacgtcaccgtacaggcgcagatcatgacgctattaaatgaactgaagcgggaatttaataccgccatcattatgatcacccacgatcttgtcgtggtggcggggatctgcgacaaagtgctggtaatgtacgccgggcgcacgatggaatatggcaacgcgcgcgatgtcttttatcaacccgttcatccttattctatcggtttgctcaacgcggtgccgcgtctcgatgcggaaggtgaaacaatgttgaccatcccgggtaatccgccaaacctgctgcgattaccgaaaggttgcccgttccagccacgttgtccgcatgcgatggaaatttgtagtagcgcaccgccgctggaagagtttacgcctggccgtctgcgtgcttgctttaaaccggtggaggaactgttatgaatgctgtaactgaaggaagaaaagtcctccttgaaatcgccgatcttaaagtgcactttgaaatcaaagatggcaaacagtggttctggcaaccgccgaaaacgctcaaagccgtcgatggtgtcactcttcgctggccgatccgcgattggcggacggccgctgatgaaagaaggccgggcgtactcagtgtcagggtgatataagatgtgtatt

SEQ ID NO: 13309 - DNA, 458 bp, Homo sapiens
  SIMILAR (6)..(455): 881254mologous to Escherichia coli ASPARTATE AMINOTRANSFERASE (EC 2.6.1.1) (TRANSAMINASE A) (ASPAT),accession number D90860,Smith-Waterman Score=713.
gctcccgtcagggttggatggtgttgaacgggccgaaaaaaccacccaaaggctacatcgaaggtctggaaatgctggcttcaatgcgcctgtgtgctaacaccgcgctaggtggttatcagagcatcagtgaatttattacccctggcggtcgtctttatgaccacggtaaccgcgcgtgggaactgatcaacgatattccgggcgtttcctgcgtgaaacctcgtggtgcgctgtatatgttcccgaaaatcgacgccaaacgctttaacattcacgacgatcagaaaatggtgttggatttcctgttgcaggaaaaagttctgttggtgcaagggacggcattcaacgtggcgtggccggatcacttccgccatttggtactaccgcgtgtcgatgatatcgagctgtctttgagcaagttcgcgcgtttcctttctggttatcatcagctgtaa

SEQ ID NO: 13310 - DNA, 492 bp, Homo sapiens
  SIMILAR (11)..(490): 991254mologous to Escherichia coli Enzyme I (Ntr),accession number U29581,Smith-Waterman Score=794.
ggtacccggggatccggctctggaacgcgaacgactgaccggggcgctggaagaagcggcaaacgagtttcgccgctacagcaaacgctttgccgccggtgcacaaaaagaaacggcggctattttcgatctttactcgcacctgctttcggacacccggctgcgtcgcgaattgtttgccgaggttgataaaggctcggtggcagagtgggcggtaaaaacggtcattgaaaaatttgccgaacagtttgccgcgctaagtgataactatctcaaagagcgggctggcgatttacgtgcgctgggtcagcgattgctgtttcatcttgatgacgctaatcaagggccgaacgcctggccggaacgtttcattctggtggcagatgaactgtcagcgacaacgcttgctgagctgccccaggatcgcttattcggtgttgtcgtgcgagatggcgcagccaactcccatgctgcgatcatggtacgtgcgct

SEQ ID NO: 13311 - DNA, 1202 bp, Homo sapiens
  SIMILAR (162)..(818): 961254mologous to Escherichia coli ASPARTATE AMINOTRANSFERASE (EC 2.6.1.1) (TRANSAMINASE A) (ASPAT),accession number D90860,Smith-Waterman Score=1102.
aacagttgttagcgcaagcacagcaactttctggttatacattgggagaactggcggcacttgtcgggctggttacgccagagtgggcggtaaaaacggtcattgaaaaatttgccgaacagtttgccgcgctaagtgataactatctcaaagagcgggctggcgatttacgtgcgctggagcttttaatggagattgtggagattgcacgtcagcataatctcattatcttcgccgatgaaatttatgacaaaattctctacgacgacgctgagcatcactcaattgcgccgctggcacctgacctgctgaccattacctttaacggactgtcgaaaacgtaccgcgttgcaggcttccgtcaggggtggatggtgttgaacgggccgaaaaaacacgccaaaggctacatcgaaggtctggaaatgctggcttcaatgcgcctgtgtgctaacgttcctgcgcaacacgccattcagaccgcgctaggtggttatcagagcatcagtgaatttattacccctggcggtcgtctttatgagcagcgtaaccgcgcgtgggaactgatcaacgatattccggggcgtttctgcgtgaaacctcgtggtgcgctgtatatgttcccgaaaatcgacgccaaacgctttaacattcacgacgatcaaaaaatggtgttggatttcctgtggcaggaaaaagttctgttggtgcaagggacggcattcaactggccgtggccggatcacttccgcattgtcacgctaccgcgtgtcgatgatatcgagctgtctttgagcaagttcgcgcgtttcctttctgcaaattccggtcgcaaccgaaacgttcagggaagaaacgcttccagccatcgggatgctgatcaactcatcgcaatgttcacgagtcaggcgacgcataccttcaccttccgcacccatcaccagcgccaggcgtccggtcattttgctctgatagagtgtatgatccgcctcgcctgccgtaccgacgatccagatattctcttcctgcaacatacgcatggtgcgcgcaaggttagtcacccgaatcagcggaacgctttctgccgcgccgcaggctacttttttcgccgtagcgttgagctgtgcggagcgatctttcggcacaatcaccgcatgaacgcctgcggcgtccgcactacgcaggcacgcgccgagagatag

SEQ ID NO: 13312 - DNA, 312 bp, Homo sapiens
  SIMILAR (46)..(303): 251254mologous to Campylobacter jejuni putative periplasmic protein,accession number AL139078,Smith-Waterman Score=91.
atggaagggtcaagaatgaaataccgcatcgctttagctgtttctctctttgctcttagtgccggtagttatgccactaccctgtgtcaggaaaaggagcaaaatatccttaaggagatcagctatgccgaaaaacaccaaaaccagaatcgtattgacggtctgaataaaaccctgagtgaaatccgggccaactgttcagatagccagctgcgtgccgatcatcaaaagaaaaacgcaaagcagaaagatgagggggcggaacgccagcaaaatttagccgaggcgaaacaaaaaggcgatgccgattag

SEQ ID NO: 13313 - DNA, 1073 bp, Homo sapiens
  SIMILAR (617)..(1072): 991254mologous to Escherichia coli Citrate lyase alpha chain (acyl lyase subunit) (citF) homolog,accession number D90702,Smith- Waterman Score=773.
actcaggttgacattaactaatcccgcgtttcccgtgttacacctgactggaattgcaagttctgccgttctggccccaagaggtttatgccctacaacacggaaattggcagcgaagacatcacctaaatcaacttcaattgtctctccggcattgacggaacatgagccaagtgaattgatcgtaccagacagcgtcaccctgaccggctcaatgttggcgattgatgctccggtgatcgccagcggcgcgaccacgccgaataaccgcgtcgcggatgaccagggctttttacgccagtggagcaaggtggcgaaagaacgcaaactgcaacggttttatatcggcgaaccgagcgccgaagccgttgccgcgcaaatgccggatctgattttaattagcgcaaccggcggggattcggcgctggcactgtatgatcagctttccaccatcgccccgacattaatcatcaattacgacgacaaaagctggcagtcgctgttaacgcaacttggcgaaattaccgggcatgagaaacaagcggcagagcggattgcgcagtttgataagcaactggcggcggcgaaagagcaaatcaaattaccgccgcagccgggcgtggttacccgcatttatacctccggcctgcgtggtccactggcggaagagatctcccgtggtctgctggcagaaccggtgcagatccactctcacggcggtcgtgtgcatctggtacagagcggcgaactgaatattgacgtggctttcatcggcgtcccgtcctgtgatgaattcggtaatgccaacggctacaccggtaaagcctgctgcggctccctcggctatgcaatagttgatgccgacaacgcaaaacaggtcgtgatgcttaccgaagaactgctgccttatccgcataatccggcaagcattgagcaagatcaggttgatttgatcgtcaaagttgaccgcgttggcgatgctgcaaaaatcggcgctggcgcgacccgtatgaccactaacccgcgcgaactgcttattgcccgtagcgctgcggatgtgattgtcaactctg

SEQ ID NO: 13314 - DNA, 6987 bp, Homo sapiens
  SIMILAR (484)..(3198): 991254mologous to Homo sapiens transcription factor,accession number U80918,Smith-Waterman Score=4849.
atgcgtgccctgctgattctctatctcaccaatcaactaaaatacagcgatactcacgcctacgagttatttagcgcctactgttcgctggtgtatgtcacgccaatcctcggtggctttttggcgcataaagttctcggcaatcgcatggcggtgatgctgggggcgttgttgatggcgatcggtcatgtggtgctgggtgccagtgagatccatccgtcattcctctgtctgttccgacggttaatcagtggttacggcagcgggcataacatcggtcatatatttccaccaacgttggcaaacatcagtgctggcaaccgcattccagcgttcttcagattcaatctctaccatggcaaacagcagattacgcgctttgtcgagatagatggcgtagttatgcgcaccgtgagatttcagcactgcttccagttctggccagatgggattatgccgacgctgatactcttcgtgggcgtcggggtttacctgcatgacaaaggctttgcggatcatgtttgctccttacagcgccagcgcactggcgagtgcgtaacgccgaaacgcttgccgagcgctatcaactcttcacggctgatggtttcatccagcgtcggtccgctcaagcagacgccgtggaagggccacaacaccagcgaatgtttttgcatctcttgtgcggacctgcaggcgcataatctgggatacgctgaccatgagcaaaatgacgtccgccagacctcaaacgatggcagttttaccgacgccgggttcaccaatcagtaccgggttatttttagtacgacgttgcagcacctgaatggtacggcgaatttcttcatcacgaccaatcaccggatcgagtttgccctgttcggctcgttcgaacgctttaacgatcggctgggtaaccagtttggtgcggctatcacctatttctcatttttgtcgatgataccaattttgatggtgtcgtttgccgcagggggctttgtgctggcctcccatccgatgttgctacaggatatcttcgacaaaattctgcaaaacatcagcgatccgacgctagccgccacgttgaaaaacaccatcaacaccgccgttcagcagcgtacgactgtagggcttgtcggcctggcggtggcactttattccggcatcaactggatgggtaacctgcgtgaagcgattcgtgcccagtcgcgcgatgtctgggaacgctcgccgcaagatcaggagaagttctggcaaatgattattagcgccctgcacctgaacagcattgagtggctgaaaccgacgtggcgattgattggcctggcgatttccatcttcgccaactatctgcttttcttctggatcttgactctagagatccccgatgtgcgaaaccgcctcttcttcccgctcagcaacgcgaaccggtggaatacgcacctcatcacccgcttcgagtttatattcaggcttaatacgttttttgttcacccgcacttcgcctttacgcaaaatacggtaaatcatactttttggtacgcctttcaattggagatccccggtaccgagctggaattcagcgcgctttctaccgatttccgtaacagcgttgacgtgatgaccactgaaacgacctgtttaagctctgtctggcaaaccgatgaagaagtccataacctgctggcgctgcacggtcgcggccaggattactgccagcttaaccctcaaccgatggcgtactacgatggctgcatcagcgttgatttaagcgccatcaaaccaatgattgcgctgccgttccacccgagcaacgtgtatgaaatcgacacactgaaccagaacctgaccgacattctgcgtgagattgaaattgagtccgaacgcgtggcgcacggtaaagccaaactctcgctgctggataaagtggaaaatggtcgcctgaaagtgcagcaggggattatcgcgggctgttctggcggtaactacgaaaacgtcagcgcggcggcgaatgcactgcgcggtcaatcctgtggcaatgacaccttctcgctggcagtttacccgtcatcacagccggtgtttatggatctaacgaaaaaaaggtgtgaagcgtaccggagtacccggattatgaaaatactggtctacggcattaactactcgccggagttaaccggcatcggcaaatacaccggcgagatggtggaatggctggcggcacaaggtgggcgagaactattccgcctggcgctacaaacgagaagagggggccgcacggtgtggcgctgcccgctgtatgtgccaaaacagccgagcaccctgaaacgcctgttgcatctgggcagttttgccgtcagcagtttctttccgctgatggcgcaacgtcgctggaagccggatcgcattattggcgtggtgccaacgctgttttgcgcgccgggaatggccctgctggcgaaactctctggtgcgcgtaccgtgctgcatattcaggattacgaagtggacgccatgctggggctgggccttgccggaaaaggcaaaggcggcaaagtggcacagctggcaacggcgttcgaacgccagtccacctttggcgggaaaactgcaactacctggggctataacggcaatctgctggggccggcggtgaaattacagcgcggcaaagcggtaacggttgatatctacaaccaactgacggaagagacaacgttgcactggcacgggctggaagtaccgggaattatcacgacgccgctgaacgactggctgatctggcatgaagtcggtcataacgccgcagaaacgccgttgactgtaccgggtgcaactgaagtcgctaacaacgtcgtggcgctgtacatgcaggatcgttatctcggcaagatgaaccgtgtcgctgacgatattaccgtcgcaccggaatatctggaggagagcaacaaccaggcatgggcacgcggcggtgcgggtgaccgtctgctgatgtacgcacagctgaaggaatgggcagagaaaaactttgatatcaagaaatggtatccagatggcactcctctgccagagttttacagcgagcgtgaagggatgaaaggctggaacctgttccagttgatgcatcgtaaagcacgcggcgatgaggtcagcaatgacaagtttggcggcaagaattactgtgctgaatccaacgcgcgcgaccacgccgaatacaccgtcgcggatgaccagggctttttacgccagtggagcaaggtggcgaaagaacgcaaactgcaacggctctatatcggcgaaccgagcgccgaagccgttgccgcgcaaatgccggatctgattttaattagcgcaaccggcggggattcggcgctggcactgtatgatcagctttccaccatcgccccgacattaatcatcaattacgacgacaaaagctggcacccccgactgagcttcaataaggcagatgaaattactaccgtcttttgtggttcgaaaaagagtctggcaaatggcatcccgatggcaaacattctgttccccacatcggtgatcgctacccagcaaacgcagcatttccgcttcgtcgatgacttcaatgcccagttcctgcgcttcgccagtttagatcctgcagcttcacccgctatcaccatatcgggaaaggcgactctagagatccccggtaccgagctagtattctatgcggcgctcgagaaaaagctgaacatcaaaccagggcaaacgacatttgatggccgctttacgctgctgccaacttgctgcctggggaactgtgataaagggccaaacatgatgatcgatgaggacactcacgcgcatctgaccccggaagcgatccctgaactgctggagcgcaaaaacggttacgaaggcgcgcgtaaggcgctgaccgggctgtctccggacgaaatcgttaatcaggtaaaagacgctggtctgaaagggcgcggcggcgcgggcttctcgactggcctgaaatggagcctgatgccgaaagacgaatccatgaacatccgttacctgctgtgtaatgccgatgaaatggagccgggcacctataaagaccgcctgttgatggagcaactgccgcacctgctggtggaaggtatgctcatctccgcgtttgcgctgaaagcttaccgtggctacatcttcctgcgtggcgaatatatcgaagcggcagttaatctgcgccgtgccattgccgaagccgactctagagatccccgcgtgaacaaattccaggacgaagtgggcggcaaactgcgctttggcgatccgggcgtgcgtctgtttgaaaccagcgaaaatggtctggattacttcaccagcgtaccggcacgcttccagccgcaggacgggaaatcgcgtatcgcgccgtattaccacctgtttggcagcgatgaattgtcacagcgtgctccggtcttccagagccgtatgccgcagccgtacatcaaactcaacccagcggatgccgcgaagttgggtgtgaacgcaggtacacgcgtctcctttagttacgatggcaacacggtcacgctgccggttgaaatcgccgaaggactgacggcagggcagtgccgacacctcacgttccgcgatcgagcaagatgtggtgttgcactgtcggagcggcggcagttacgacgtgcattacagtattacgccgttaagtactctggacggcagcaatattggttcggttctggtgattcaggacgttaccgaatcacgcaaaatgtgcgccagctgagctacagcgcctcccatgatgcactgacgcatctcgccaaccgcgccagttttgagaaacaactgcgtatcctgctgcaaacgtcaattgatgctatttccagcggcactatcgacatcagcgatggtacggttttgcgcctgaccgggcaggatacttccgtcgcccttaatgcctcactatttaacggcgatgggacgctggtgaatgccaccgatggtgtgacgttgacaggtgagcttaataccaaccttgaaactgacagcctgacttatctttccaacgtgacggttaatggcaatctgaccaatacgtccggtgcggttagcctgcaaaatggcgtcgctggcgatacgctgacggtaaacggtgattataccggcggcggtacgctactgctcgatagcgaattaaacggcgatgactcggtaagcgatcaattggtgatgaacggtaatactgctggcaacacaactgtggtggttaactccattacagggattggtgagccgacatcgacaggcattaaagtggttgatttcgcagctgatcccacgcagtttcaaaacaatgcgcagttcagtctggcaggcagcggctacgtcaatatgggagcgtatgactacacgctggtggaagataacaacgactggtatctgcgatcgcaagaagtaacgccgccatcgccacctgatccagacccgacttttgcggaaagaattccaaaaacaggtacgacatacatgaatcagaatctgctggtgacaaagcgcgacggtagcacagagcgcatcaatctcgacaaaatccatcgcgttctggattgggcggcagaaggactgcataacgtttcgatttcccaggttgaaaagcctacggccagtttgatgccgcctgcgctgtacgaccacgtggtgaaaatggtcgagatgggcaaatacgataatcatctgctggaagactacacggaagaagagttcaagcagatggacacctttatcgatcacgaccgtgatatgaccttctcttatgctgccgaaaagcagctggaaggcaaatatctggtacagaaccgcgtgaccggcgaaatctatgacctgcaggcactgctgcaaaaaggaaaaaccagaattgctggtagtgacttttgcaaaggatttgccgtcagcggggcagcggttctttgctccagtacggtggccgattatctgctgcaattcgcccgccaccttatctacagcaccagtatgccgccgctcaggcgcaggcattacgtgcgtcgctggcggtcattcgcagtgatgagggtgatgcacggcgcgaaaaactggcggcactcattacgcgttttcgtgccggagatatcgaccgtctgctggaggtgctgcatggcaacggttaataaacaagccattgcagcggcatttggtcgggcagccgcacactatgagcaacatgcagatctacagcgccagagcttgacgccttactggcaatgcttccacagcgtaaatacacccacgtactggacgcgggttgtggactctagaggaatccccggcagacgccgcatcggctttgctgttgcccaccatccgctgtttgtaatagtcggtttgcagccagatctacctgcgcctattccacgaggccagttgcataacaaactctttataggcttcgtcccgacactgcaggcgggggccgtcgcgaaaagtgtaattcacgcgcacgtcagcgtttcccctgatggattagacctggtcttttttgtcgtcaaccaatgggctggcgtcgtgttctgcttcgatctcttcagcaggaagcggggcaggttcagcgtctggcgtaacaaaggtttcggtagatactgccagcggctggccaattttcgtgacagacaggctttccagttgctcaaccagattcactttacccggtgcaaacaggttgataacggtggaaccgagtttaaagcgacccatttcctggcctttcagcagtgccacagaaccgtcgttttccccggcaggccaggtccagcgcttgatgataccttcggcggcggcgtaatggtgcccgcccagaccgtctcaatgctgccaacaatcgtcgctccgaccagaatctgcgccattgggccaaattcggtatcgaaaaggcaaatcacgcgttcgttacgggcaaacagattcggcacgttctga

SEQ ID NO: 13315 - DNA, 948 bp, Homo sapiens
  SIMILAR (12)..(584): 1001254mologous to Escherichia coli ferrienterobactin transport protein,accession number M29730,Smith-Waterman Score=962.
aggatccccattcggcgctggcactgtatgatcagctttccaccatcgccccgacattaatcatcaattacgacgacaaaagctggcagtcgctgttaacgcagcttggcgaaattaccgggcatgagaaacaagcggcagagcggattgcgcagtttgataagcaactggcggcggcgaaagagcaaatcaaattaccgccgcagccggtcactgccattgtctatactgccgctgcacacagtgccaatctctggacgccagaatcagcacaagggcagatgctggaacaactcggctttacgctggcgaagttacccgcagggttaaatgccagccaaagtcagggtaaacgccatgacatcattcagcttggtggggaaaatctggctgcagggttaaatggcgagtcactattcctgttcgccggtgatcagaaagatgccgatgctatttatgctaatccgctgctcgcgcacctgcctgcagtacaaaacaagcaggtttatgcgctgggaaccgagacgttccgtctggattactacagcgccatgcaagtgctggataggcttaaggcgctgttttaagcattaactgtcggacgctgtcacctgcggcggcgtctggcgaaaatgtcgcaactccaccagcaccagcaataacaacacgccgataatcaacaaaccaaaaccgctcgcgcttgcggaagcaaccggtgtcatcatcgcgcccaaaccacccagcagcgccgcgcctatggcatcgcccgtcacgttctgcgccgtccacaaaccgttaatccgccctaacatcgcttccggggtttgcgtttgcagcattgtgtattgcagcaacgagctgaccgcactcaaccagccgaacagcgccagacaaaccacgcctaaaatccacatcggcatcaggccaaacagaccaatggcgaggaac

SEQ ID NO: 13316 - DNA, 318 bp, Homo sapiens
  SIMILAR (1)..(315): 951254mologous to Escherichia coli Probable carnitine operon oxidoreductase CaiA (EC 1.3.99.-),accession number D90812,Smith- Waterman Score=516.
atgatccaggaaaaacggccgctaatggcgattaagatcgacaacatgcgcaacatggtgatgaaagtggcatggcaagccgatcagcatcagtcactgcgcaccagcgcggcgctggaaaaactgtactgtgcacgtaccgcaatggaagtcattgatgatgcgattcaaatcatgggcggtatgggctataccgatgaggcgcgcgtctcccgcttttggcgtgatgtccgttgtgaacgtatcggcggcggtacagacgaaattatgatttacgtagcaggtcggcagatcctgaaagactatcagaacaaataa

SEQ ID NO: 13317 - DNA, 1494 bp, Homo sapiens; identical to SEQ ID NO: 7392
  SIMILAR (516)..(151): 1001254mologous to Escherichia coli K12 putative dehydratase,accession number AE000500,Smith-Waterman Score=643.

SEQ ID NO: 13318 - DNA, 408 bp, Homo sapiens
  SIMILAR (3200)..(2829): 321254mologous to Gallus gallus alpha-1 collagen type III,accession number U07973,Smith-Waterman Score=92.
ctaatcctcatacttggcggtgagatgatcgggcgtgtgcacttttatggcctgcacatgacagtaggaatggctattgcaggttaacaaattggtgcggggcaaccgtttcaggatgttaggaatgacccatttttcacagcaagataatttttcggtgaccagggtgaagtggcaggggctggtcatggtgacaaaggcgggggtcatgtagcgtgccttcaccccatctcgggccatggcgtccaggttgggggtgtccacgtcctgctcgtagttccagcggaactcgtcgaaggacaccaggagcagcttgttccgggagccctgactttgtaccggtgccccggccctgggagccaggagcgtgggcagagcactagtgaggaggacggtcgggcctctcat

SEQ ID NO: 13319 - DNA, 1650 bp, Homo sapiens
  SIMILAR (303)..(596): 741254mologous to Homarus americanus alpha-III tubulin,accession number U68764,Smith-Waterman Score=387.
atggatgtgaggattatcattgtgctcaccgctggtttgctgataagcctgctgttgattgtccttttctcccgtcgcctgagcgccaatattgatatcatcaccgatggcctctcgactctggcacaaaatattcccactcgattaccacaattgcccggtgaaatggggcaaatcagtcagagtgttaataacctcgcccaggcactgcgtgaaacgcggacacttaacgatctgattattgaaaacgctgccgatggcgtcattgccattgaccgccagggtgatgtaaccaccatgaacccagcagcagaagttatcactggctatcaacgccatgaactggtagggcagccttactccagattgatgcaccgacgccgaaggcgctgctgtccgaaatcgaaaaattgctggcatcgccaccgtaaattgtggccggaccataccatcaacctggcgttggaaatccacggtcaggttgatcctgtgaccggcgtgtcgcaaaccatgccgaaagcgccgtggacaacgccggtggaggtgaaatatctgctggaagagaagctcggcattcgggtgatggtcgataatgactgcgtgatgctggcgctggcggagaaatggcaaaataattcgcaggaacgggatttctgcgtgatcaacgttgattacggcattggctcgtcgttcgtgattaacgagcaaatttatcgcggcagtttgtatgagacgaatcagtttatgtgggaagggatcggcgcaaaacaccgacagcggaatcgccgctacgccgtgctcctgcgtcagcgactagcaaaactcaacatcatccaggatacggatgtagccttggatgtgcccgtgcccaatgaagaggaagagcgcaacatgaaacattacgctgcgttgctaacgggccgcacctcctatttcctcaagggtgaggaaatgaagtccatgtacaccacctacaatccgcagaatgtggtggccaccgcccgtttcctgttccacaagaagaatctatactactccttctacacctcatcgcgaatcggtcgtccgcgtgccattcaattcgttgatgatgcgggtgtaatcctggaggagcatcaactggagaccaccttggcgggcactctcagtgtctatcagaatgccacgggcaagatctgcggtgtctggcgacgagttccacgtgattacacaggcatcctgcgcgacgatcgtctccatgttgtcctcctctggggcaacaaacagcaggccgagttggctctggccggaaagacaagctgtgaccgtctccgggagctgcatgtgtcagaggttttcaccgtcatcaccgaaacgcgcgaggcagctgcggtaaagctcatcagcgtggtcgtgaagcgattcacagatgtctgcctgttcatccgcgaatttaatctttgtagggacatcccggtcaccggtgaaaagaatcctttccgaccagtaaagaagtttgcccagcagcactttgaatgttcgattagaccccggtgcgtagcacgctgtcagcgaatgactttagtgcacccaaagcagtgtttgctcagccgttgctttgctcgccaagtcggcagccaaaacgagagcttagagagactcgcggaatag

SEQ ID NO: 13320 - DNA, 2655 bp, Homo sapiens; identical to SEQ ID NO: 7766
  SIMILAR (511)..(1323): 901254mologous to Escherichia coli ATH1 protein,accession number D90769,Smith-Waterman Score=1283.

SEQ ID NO: 13321 - DNA, 1494 bp, Homo sapiens
  SIMILAR (98)..(1462): 1001254mologous to Homo sapiens GDH,accession number X07674,Smith-Waterman Score=2385.
atggtgcaatcgttgtttgccgactttgcgaaaatcttcccgggtcgtttcaccaacgtcaccaacggtgtgacgccgcgtcgctggctggcggtagcgaacccatcgctttcagccgtgctggacgaacacctgggccgtaactggcgcaccgaccttagcctgcttaatgagctgcaacaacactgtgatttcccaatggttaatcacgctgtgcatcaggcgaactcggagaacaaaaagcgtctggcagagtatatcgcccagcagctgaatgtggtggtgaatccaaaggcgttgttcgatgtacaaatcaaacgtattcacgaatacaaacgtcaattgatgaatgtgttgcatgtgattacccgctataaccgcatcaaggccgacccggatgcgaagtgggtaccgcgcgtgaatatttttggcgcgaaagtgatcaacaacgatccgcagattggcgataagctgaaagtcgtgttcatcccgaactacagcgttaccctggcgcagttgatcattccggcggcagatctgtctgaacagatttcgctgggcaggacggaagcttccggcaccagtaacatgaagtttgcgcttaacggtgcgctgactatcggtacgttggaacgtgcgaatgtcgagatgctggatcatgtcggtgctgacaatatcttatttttggttacacagcgggagagtgaagactgcgtcaaaaaaggcatcgaggttccacaaacccagcaaggggacattggcgcgaaagatatcccctcctggcggcggatatgcaaagttttactcaataacgattactggtgtcgggcattatcatttagccccacaaaatcgaagaactatcagcgttataacgaacggataaaaggaaaacgtcaggatttaacgcaatttctcgccagcttgccggaagatgatcgcatcaaagcgattaatgaaatccgcatggcgatccatcaggttagcccctttcgtgaagagccagtggattgcgttctgtgggttaaaaacagccaacttatgcctaatgattacaacccaaacaacgtggcaccacccgaaaaaaaactgctgcaaaaatccattgaaatagatggttttacccaacccattgtggtcacacatacggataaaaatgccatggaaatcgtggatggttttcaccgccatgaaattggtaaaggctcatcatcattaaaattacgcttaaaaggttatttgccggtgacctgtctggaaggtacgcgtaatcaacgcatcgccgcgactattcgtcataatcgcgctcgtggacgccatcaaatcaccgccatgtcggaaatcgtccgtgaacttagccagttgggatgggacgataataaaattggcaaagagctgggaatggacagcgacgaagtgctgcgcctgaagcaaattaacggcctgcaagcagtcgtatgccgaccgtcaatattcccgcgcctggacggttaa

SEQ ID NO: 13322 - DNA, 753 bp, Homo sapiens
  SIMILAR (272)..(189): 571254mologous to Homo sapiens Human secreted protein, SEQ ID NO: 7115,accession number G03034,Smith-Waterman Score=81.
atgcaactggcaggtcctggagtttttggccccccacgagatcgccacgtcgctataaccgtgctgcgtgaggcgctggcattgggcgtcaatcatattgataccagcgacttttatggtccgcacgtcaccaatcagattatccgcgaagcgctttatccttactctgacgacctgacaattgtcactaatattggttatttgccggtgacctgtctggaaggtacgcgtaatcaacgcatcgccgcgactattcgtcataatcgcgctcgtggacgccatcaaatcaccgccatgtcggaaatcgtccgtgaacttagccagttgggatgggacgataataaaattggcaaagagctgggaatggacagcgacgaagtgctgcgcctgaagcaaattaacggactgcaagagttgtttgccgaccgtcaatattcccgcgcctggacgctaaagctggcgcaagcgttcagctgctgccagcaacgtcgattccttcttggcaaaacagagactaatcagtttatgtgggaagggatcggcgcaaaacaccgacagcggaatcgccgctacgccgtgctcctgcgtcagccactggcaaaactcaacatcatccagggtttctgggaaaggggacagctcaaggctccactggcctcatccctggctgaagggagcctggaactttcagaggccacctccctggggtccctctgctgccccctgatgtacctgaagccgtcccaggcttga

SEQ ID NO: 13323 - DNA, 516 bp, Homo sapiens
  SIMILAR (37)..(147): 371254mologous to Homo sapiens cofactor E,accession number U61232,Smith-Waterman Score=89.
atgacgctgtgccgggaaattcgtcgtttttctgacattccgatcgtgatggtgacggcaaaaatcgaagagatcgatcgcctgctggggctggagattggcgcagatgattatatctgtaagccgtacagcccacgggaagtggtagcgcgcgtcaaaaccattttgcgccgttgcaaaccgcagcggatgttgcagcaacaggatgctgaaagcccgttgattatcgacgaaggtcgttttcaggcttcatggcgcggtaaaatgcttgacctgacgcctgcggaatttcgtctgctgaaaacgctctctcacgaaccaggaaaagtgttctcccgcgagcaattgctcaatcatctttatgacgactaccgcgtagtaaccgaccgcaccatcgacagccacattaaaaacctgcgccgcaagctggaatctctcgacgccgaacagtcatttatccgcgccgtttatggcgtcggttaccgctgggaagccgacgcctgccgcatcgtttag

SEQ ID NO: 13324 - DNA, 2254 bp, Homo sapiens
  SIMILAR (499)..(1086): 921254mologous to Escherichia coli K12 2-oxo-3- deoxygalactonate 6-phosphate aldolase and galactonate dehydratase,accession number AE000446,Smith-Waterman Score=939.
atgtactggtatctgaaggctgccgctcaggggagcgtcagcgcttacgtcaacatcggttatatgtataaacacggacaaggcgttgagaaagattatcaggctgcctttgaatggtttacgaaagccgctgaatgcaatgacgccactgcctggtataacctggccattatgtatcactacggagaaggaagacctgtcgatctccgacaggctctcgacctgtatcgtaaagttcagtcatccggaaccagagatcgtcagcacttccggtgtgtagatcgggagatggaagtgacatttctcgcagaccagatttcccagcccgaccacttctccgctgtgataaaccccatgatgattgaggtcctggaaaacttcgcgccattcaagctgcgttttatcggtgatgtctgccagctcctgccacaagctttctttaatcacccgcataaagacgctgtcagattcttctttcaggctctcttcatagcgcatgcctacagttgggttggcggcgatcgtccggcggatgttatcgacggcattaaaacgctacgcgaaatcggcttcgataccttcaaactgaacggttgtgaagaactggggctaattgataactcccgcgcggtagatgcggcggttaacaccgtggcacaaattcgtgaagcttttggcaatcagattgagtttggtcttgatttccacggtcgcgtcagcgcgccgatggcgaaagtgctgattaaagaactggagccgtatcgcccgctgtttattgaggagccggtgctggcggaacaagccgaatactacccgaaactggcggcacaaacgcatattccactggcggcgggtgaacgcatgttctcacgcttcgattttaaacgcgtgctggagggaagtggtatttcgattctgcaaccggatctctcccacgcgggcggtattaccgaatgctacaaaatcgccggaatggcagaagcctatgacgtgacccttgcgccgcactgtccgctcggaccgattgcactggccggttggctgcatatcactttgttttctaataacccgaccttcaagaacaaagtatgggaattcattacaaaagcacaattagcagaacaggcgctccgcagcggtcacatagaagcgttaattaacatatgggaaaatgacaactactcacattatcgtccggaaaagagtgtctggaacctgtatttattggcacagttgccgcgtgagatggctttgaccttctggctgcgtatcaatgagaaaaagcatctgttcgcgggtgaggactattttctcagtatcctcggattggatgcgctaccaggtctgctgttggctttttcacatcgtccaaaagaaacatttccgttaattttaaattttggcgcaacagaactggcgctgcctgttgcccacgtctggcgacgtttcgcggcgcagcgtgatctggctcgccagtggattttacaatggctggaacatacggctagtgcacttatccctcttgtctttaccaaacccagcgataatagcgaagccgcattacttgccctgcgtttactgtacgaacagggacatggcgaattgctacaaaccgtggcaaaccgctggcagcgtacagatgtccaatggacatttacccggcacgcatttaaaaccgggcgtctggcactggaaagtttaggtctggggccgtatgaagcgcgagaacgtgccgatgtgttccgccgctttaatattcagatggtggaagagatggcaatggttgagaacgacaccaaagcccgcgcggcggtctataaacgcaccagcgcgatgttaaaattgataaaagatcaactcaatcagtacctgaaaccgttcggctacttttttgcgccggaactttcgaccagcaaccgggcaacgctcggtgggatgatcaataccgatgcatccggtcagggatcgctggtctatggcaaaacgtcagatcacgtacttggcgtacgcgcggtgttgttggggggcgatattctcgatacgcaacctttacccgtcgaattggcggaaacgctgggtaaatccaataccacaatcgggcgaatttataacacggtttatcaacgttgccgtcagcaacgccagttaattatcgacaacttccccaaacttaaccgctttcttaccggttacgatctgcgtcatgtctttaacgatgagatgaccgagttcgacctgacgcgcattctgattg

SEQ ID NO: 13325 - DNA, 917 bp, Homo sapiens
  SIMILAR (1)..(627): 711254mologous to Escherichia coli O157:H7 K+ efflux antiporter, glutathione-regulated,accession number AE005181,Smith- Waterman Score=687.
atggcgaatgtgctggagccggagtgggcgaaatcgctgaccctggcggtggcgctgtcgatggcagcaacgccgattctgctggtgatcctcaatcgccttgagcaatcttctactgaggaagcgcgtgaagccgatgagatcgacgaagaacagccgcgcgtgattatcgccggattcggtcgttttgggcagattaccggacgtttactgctctccagcggggtgaaaatggtggtactcgatcacgatccggaccatatcgaaaccttgcgtaaatttggtatgaaagtgttttatggcgatgccacgcggatggatttactggaatctgccggagcggcgaaagcggaagtgctgattaacgccatcgacgatccgcaaaccaacctgcaactgacagagatggcaggcgttgaaaagccggagcgtgaaaccttcgaaggtgcgctgaaaaccgggcgtctggcactggaaagtttaggtctggggccgtatgaagcgcgagaacgtgccgatgtgttccgccgctttaatattcagatggtggaagagatggcaatggttgagaacgacaccaaagcccgcgcggcggtctataaacgcaccagcgcgatgttaagtgagatcattaccgaggaccgcgaacatctgtcattaattcaacgacatggctggcagggaaccgaagaaggtaaacataccggcaacatggcggatgaaccggaaacgaaaccctcatcctaataaagagtgacgtagatcacactttacagctaactgtttggttttgtttccttctaatgcgtggaggcgagggaggagacgtggacctcgcccgagaatataccattttcctggaggatgggggtcagaccagggggcgaggggttacactttctgtctggggggcgacg

SEQ ID NO: 13326 - DNA, 428 bp, Homo sapiens
  SIMILAR (1498)..(2247): 931254mologous to Homo sapiens putative tumor stroma and activated macrophage protein DLM-1,accession number AJ300575,Smith- Waterman Score=1295.
gtctgggcgatgattttgttcgcgccgccaatatcatcttgcactgtgaaggcaaagtggtggtttcgggaattggcaaatcgggccacattggtaagaaaatcgccgcaacgcttgccagtaccggcactccggctttttttgtccatccggcagaagcgctgcacggcgatctggggatgatcgaaagccgcgatgtgatgctgtttatctcttactccggtggcgcgaaggaactggatctgattattccgcgtctggaagataaatctatcgcgctgcggcaaaccgacgtcaccgctgggcctggcggcaaaagcggtgctggatatctccgtagaacgcgaagcctgcccgatgcaccttgcgccgacctccagcaccgtcaataccctgatgatgggtgacgcgctggcgatggcggtcat

SEQ ID NO: 13327 - DNA, 1434 bp, Homo sapiens
atgactgatgaagaatcgccgattgaaatcaaagataataatccgataagtaatggagagtatctaaccactgaagacgaaagccatgctgtgaaagtggatgacggtgtaactggatatataaataatgccagtgtgatgactagtggtgatggatcttatggtatttctgttgatagtcaaaacaaagtattatatataagcgatagcgatattaagacctctggaagcgtatctgacaaagaaaatggagggataacagccagcgcagtagtcagtgaatttggtggcaccatctttatgaatggtgataattcagtcgagtcggaacgcgagccttgcccgatgcactttgcgccgacctccagcaccgtcaataccctgatgatgggtgacgcgctggcgatggcggtcatgcaggcgcgcggatttaatgaagaagattttgcccgctcccacccagccggggcactgggcgctcgcttgctgaataaagtgcatcatctgatgcgccgtgacgatgccatcccacaggtggcgttaaccgccagcgtgatggatgcgatgctggaactcagccgcaccggtctggggctggtggcggtatgtgacgctcaacaacaggtacaaggcgtctttaccgacggcgatttacgtcgctggctggttggcggcggcgcactcaccacgccagtcaatgaagcgatgacggtcggcggcaccacgttgcaatcgcaaagtcgcgccatcgacgccaaagagatcctgatgaagcgcaaaatcactgccgcaccggtggtggatgaaaacggcaaatgcaccggcgcaataaaactggacctgcaggcatgcatcttgccctcccccccaattatgtcgcctaggttctgggatctgatcgacagtattcgccagcggcagagcaatatgagcgtgctggtcgccaccgcctatatggaagaggccgaacgcttcgactggctggtagcgatgaatgccggagaagtgctggcaactggcagcgccgaagagctacggcagcaaacgcaacaggctacgctggaagaagcatttataaatctgttaccgcaagcgcaacgccaggcgcatcaggcggtagtgatcccaccgtatcaacctgaaaacgcagagattgccatcgaagcgcgcgatctgaccatgcgttttggttccttcgttgccgttgatcacgttaatttccgcattccacgcggggagatttttggttttcttggttcgaacggctgcggtaaatccaccaccatgaaaatgctcaccggactgtgcccgccagcgaaggcaacgacgcgggtacaactgccccgacgacgtcggcgatccttcacccgggatagaaggaacgggcaaatacgaccagcgcgcagagcattgagcgccaacggggaggcttag

SEQ ID NO: 13328 - DNA, 2481 bp, Homo sapiens
  SIMILAR (629)..(1066): 991254mologous to Homo sapiens sialin,accession number AJ387747,Smith-Waterman Score=755.
ttattttttctcgacgacgggacatgcctgatacccgccgcccagcgatttcatcaactgaatgctttggatcacccggcggctgtccagcatcagtaatgacatctcttcggcaagcactggcaaccgggcttcggtggcctgtaagcggctggttaagccgcgctgataggcggcctcggcagcgcgctgggtaaagcgcgtggcttccacgcgttcagcctgcatttctcgctcgtcgttgagcgtttgcagacgcgtgccgttgacggcaacgtcacgcaccgcgttcagtactgactggttgtaacgttcaatcccgctgaaccgctgaaaatgagctacgttgaaggtctgctttccagcaatcagaaagatgtgctgatggaagagattgtcgccaactaccacgctaacaccaaagacgctgaactgcacagtgagggtacgggacctcccaggtttccccaagctgccgtctgggtggcctgacccctggtgggcagcggtgaccacccagtcctcgctgatgtggtagcccccgcagaagtggaagccagctttgtatttgctatcacggtaagttgcagcctcatagctgcttcgccagcgtaatgattcatcagcaaacagtgacgcgtcggcgtagttttgtatctccagcccgggtaaccagcgtaccggatgcccgagataagcctgaaatgtcgcaattgtccgcgcctgaaagccaataaaaccaatgatttggctaatgatcacacagtcccaggcagtaagaccgacgtcattcagatgctggcgcgatcggttgtcgataatagaaggcgagctagccagttggcgggcatattgcgtgatttgtgccaaccgatgattactttccctggtggaatcaggcccggggagcggcgtaagtcgcgccgaatagtagttacataaccgctggacgccgcaaacctgagcaaccgtcagggccgtcgacaagcgttcataagcggtgaaggtccttttgccggggggctttggtgccctccccaagaggcgtgtgtccatggacggggggacctggtagatgtcatgccccatcccggcaaaaagggggcacctggtaaatatcttgagaaagggcctccaggcccctgggggcacatggtacagatctgtggccgggctgggaaacgggtgatggggtgtctgcttcgagaaggtggatgtctgcttggctgggggagactggaactgagggctgggacccgggacttggtagaggccttgctgagccttgctgggagtgggcaccaggtagacgctgtctggctggggctggtaggtgttggggagcatgggcgtgtactgggaggccggaggcgctggggcatggaggccaggctgaggctgggccggggtggcgggagggccggggccaggccctgctggcttcttatcatacatgcccaccaagatcttgaggcggttcccaggcacgatgccctggcgcccatgcagcgagcagagccaccagccgtccaggccctgcgtgtcctgctccagcgccgtcagaaaacacgatgcagttcgattcgagcggcgattattgccgcaggtccggttgcaaatttcatttttgctatctttgcctactggctggtttttattattggtgtgcctggcgtacgtccggtggttggcgaaatagcagccaattcgataggtcactgggcgtttgagcctgataaagaagatccggtatcttcgctggggattcgtcctcgtgggccgcaaattgaacctgtactggaaaatgtgcagccaaactcggcggcaagcaaggcaggtttgcaagcaggcgacaggatcgttaaagtcgatggtcagcccgctccacttatattccagtttcactggcgcagagaattcgcacagcagcgcaggcaccggctggaagtagacattatcaaagacaaaggtctgttccgcctgagtgacgttcagcacggaattcaccggatgaccgcctttctgcaacgggatcactttgccttcgttatcatacagttcgatggcaaacggaatatgcagcggctgtttttctgcctgatccggcgtggctggcgtgcgctggctgatggtcagggtgtactgctcggtttccggattgtagtcgtctttgacggtcacaatcggtgtaccggactggctgtaccaacggcggaaatgggagagatcgacattcgacgcatcttccatcgcctgcacaaagtcgtcacaggtcgctgcactaccatcatgacgctcgaaataaagctgcatccctttctggaagttttcttcgccaagcagggtgtggatcatgcgaatcacttccgcgcccttctcgtaaacggtcagggtgtagaagttgttcatctcaatgaccatatccgggcggatcgggtgcgccatcgggctggcgtcttctgcaaactgcaatccgcgcat

SEQ ID NO: 13329 - DNA, 783 bp, Homo sapiens
  SIMILAR (412)..(777): 461254mologous to Escherichia coli No definition line found,accession number U00039,Smith-Waterman Score=216.
atgcagatgctgagaaagcatctgcatctttcggtggtgttatttgaccagctcaggtgttacctgactcaccgcattggtgtagtaaggcgcaccccagcccggttccggccagaatgcaccatagccgtaatcccacaggttataaagagcgacacacatatctggctaaattctgtgtacgacgacatctcacagagagctccccttagtcgaaaactaagacgcacacattacccggctccaaacgccgtagcaacacgctctggacacatagacttctacaccagcgacaacatcgcgggagcaaatttcgagacccaactggccccagcacaggcagtttcaacagcccctggagatacgccaagcggccgccctacggtgcaaaatcagcgctatccccgtggaaatgcgcaattttcacggttgtctgacgatgatcgaaagcgttcacgggaaaaatttagtcgctatgtgccggaagatatcactaccttgctgccaatgacccacccgtcaaaatgccctggtttccagaagtgggatgtgtcatgtaatgccgtcaacaacatgatgaataacccctctattacctgccccacggtaaaggcgttgctggttgccctacggtccgatgatcaaatcagtgccgagctggtgcagatgcgcttgcttgccccagaacaatggggcatgccgctacatgtaacgttttgttctaaacccctcatccccgccgagcacgatggtccaactggcgacgaataccagaacccatga

SEQ ID NO: 13330 - DNA, 1141 bp, Homo sapiens
  SIMILAR (11)..(118): 971254mologous to Homo sapiens bridging integrator- 2,accession number AF146531,Smith-Waterman Score=171.
tgcgtcccaagcgcgatagtccaataaaattcttcgtgcggaaaaatcccgctagcctgcgcgcccccgatgacggtttgttatgggcttgcgggccaaatatggttattccggggaatgcgccactctcccgttgtctgcagatgatcgaaagcgtgcaagggcagaagtttagtcgctatgtgccggaagatatcactaccttgctgtcaatgacccagccgctcaaactgcgtggtttccagaagtgggatgtgttctgtaatgccgtcaacaacatgatgaataaccctatattacctgcccacggtaaaggcgttctggttgccctacgtccggtaccgggtatccgcgttgaacaagccctgacgctgtgtcgccctaaccgtaccggcgatatcatgaccattggcggtaatcggctggtgctgtttctctcattctgtcggattaacgatctggataccgcgttgaatcatattttcccattgcctactggcgacattttctcaaaccgtatggtctggtttgaagatgatcaaatcagtgccgagctggtgcagatgcgcttgcttgccccagaacaatggggcatgccgctgcctttaacgcaaagttctaaaccggtcatcaatgccgagcacgatggtcgccactggcgacgaataccagaacccatgcgactttggtcgataaaattggcgatgaaagcaccaccattacagtagcgccatttggcagcgaccaacggcgggatgtaaagctcgatttacgtcactgggcgtttgagcctgataaagaagatccggtatcttcgctggggattcgtcctcgtgggccgcaaattgaacctgtactggaaaatgtgcagccaaactcggcggcaagcaaggcaggtttgcaagcaggcgacaggatcgttaaagtcgatggtcagcccttaacgcagtgggtgacctttgtgatgcttgtccgggataacccgggtaaatccttagcgttagaaatcgaaaggcaggggagtcccttgtctttgacattaatcccggagagtaaaccgggtaatggtaaagcgattggttttgtcggtattgagccgaaagtcattcctttgccagatgagtatgacctgcaggactga

SEQ ID NO: 13331 - DNA, 846 bp, Homo sapiens
  SIMILAR (343)..(720): 651254mologous to Homo sapiens gag,accession number AF156961,Smith-Waterman Score=413.
atgacgcggacgaagaagagaagcggaaaacagagaagccgagcgacgacaccacgaagaggaagccgcacaacaaacaagagcaaaaagaggaggacaggacgacaggagagacgacccgccgacgagaagaggaggaggggcggagcgggagacgggggaggagacccgccgaaaacggatccctccagaatgactaagccaggtctgggggaaatgaacccgatgcaattgcgcgaaaccacgcttgatccgaacactcgccgtctggtgcagttgactatcgatgatgaagacgatcagcgtactgacgcgatgatggatatgctgctggcgaagaaacgctcggaagatcgccgcaactggttgcaagagaaaggcgacatggcggagattgagtgcttcttcctcatgtctatatccccttttcaagcccgacagggcgccaacattggattgtttcgacgagggtcaagggtaccacgcaggcctctgcgcacaaaaagtcacttagtcgagctcacacagttcaaaagggggagccaagagaagcttctggaagggcaaaaaccggttcaaggttccccaattaagacgacttggcatcgactccaaagcgcccccaagtggaggctccaggccaaggtacaggaccctttgctgatgtgtccgtggggacagggactccaggccactgaggagatggcagcaactcccaatgcacagtggaggaaagtcaccactgaagatgtcccctcctgctccctagcccatcacccagtttttggttcattgattaaacatgtcctatgcagggggactgagttacaagccagaatgttgtag

SEQ ID NO: 13332 - DNA, 228 bp, Homo sapiens
  SIMILAR (3)..(125): 1001254mologous to Escherichia coli DadR protein,accession number D90753,Smith-Waterman Score=223.
gggggcgcaaagaagtcctgaagcatgtgcatcgcctgtggggatttgatgtgatgctcgaacagcaaaacgaagacggcagcatcgagttgctggaacgttgcccgccaagaatgggaaatctgtaaaaacaacaaaaaacccctcgtttgaggggtttgctctttaaacggaagggattatcgcccctgaatggctaaatcacccggcagatttttctgcatccgg

SEQ ID NO: 13333 - DNA, 211 bp, Homo sapiens
  SIMILAR (1)..(135): 971254mologous to Escherichia coli K12 putative transport periplasmic protein,accession number AE000384,Smith-Waterman Score= 236.
atcaaccaacaggcaccgctgattcctatctactatcagccgttaatcaaactgcttaaaccctacgttggcggttttccgctgcataatccccaggattatgtctccagcaaagagttgtatatcaaggcacattgacaactttattaccgtgggagcacgtacggcggcgccattcacgtcgatctacgggtacggacatagaattcgt

SEQ ID NO: 13334 - DNA, 495 bp, Homo sapiens
  SIMILAR (1)..(189): 491254mologous to Escherichia coli K12 putative alpha helix chain,accession number AE000142,Smith-Waterman Score=160.
atgtctcatacaatccgtgataaacagaaactgaaagcgcgtgccagtaagattcagggccaggtcgtggcgctcaagaaaatgctcgacgagccgcacgaatgcgctgcagttttacaacagattgctgctatccgtggcgcggtaaacggtctgatgcgggaagtgattaaaggtcatctgacggaacacatcgttcaccagggggatgagctaaaacgtgaagaagatctggatgtcgttctgaagtcacgtgtaggatctacgtcggtagtcgtcgtccagctggtggttacgaaccccgtaagcaacgtggctatcagaaatgctaagcaccgtgaagatattgcctggaagccgcctgtgtcctggtacgtgctggacctgcaggtggatctggccccaccttccgccttccccgaaagtggttggggacttaacaaggtgttgaagccatttggtgcacccggcacaggaaaccttgcagtgttgtga

SEQ ID NO: 13335 - DNA, 620 bp, Homo sapiens
  SIMILAR (220)..(2): 721254mologous to Homo sapiens Protein sequence encoded by clone p199-7 (PL mutet.rsT4),accession number P93369,Smith-Waterman Score=303.
ccggcatggcggcgtttattccgagcaaagatgaagagcacaataaccaggtgctcacaaaagtaaaagcggataaatcgctggaagccaataacggtctcgatggcacatggatcgctcacccaggccttgcggacacggcaatggcggtattcagcgacattctcggctcccgtaaaaatcagcttgaagtgatgcgcgaacaagacgcgccgattactgccgatcagctgctggcaccttgtgatggtgaacgcaccgaagaaggtatgcgcgccaacattcgcgtggctgtgcagtacatcgaagcgtggatctctggcaacggctgtgtgccgacctatggcctgatggacaatgcgactaaggttgaaatttccagtgcctcgctatgccagtggatccatcatcaaaaaacgttgagcaatggcaaaccggtgaccaaagccttgttccgccagatgctgggcgaagagatgaaagtcattgccagcgaactgggcgaagaacgtttctcccaggggcgttttgacgatgccgcacgcttgatggaacagatcaccacttccgatgagttaattgatttcctgaccctgccaggctaccgcctgttagcgtaa

SEQ ID NO: 13336 - DNA, 1600 bp, Homo sapiens
  SIMILAR (62)..(994): 911254mologous to synthetic construct aceB,accession number A31765,Smith-Waterman Score=1487.
ggccaagcttgccatgcctccagttcgcctttaaaaggatcaaggggttcaccgcccaattttgaaattctttatggccccattttcgaagattcactggccccagattgaccaaaagtgatcgccgggcaaaattaccctgcgtgatgcggttaccggccccatcagttcccccaatgaagcaggcaaaatttaccagctcaagcccaatccagcggttttgatttgtcgggtacgcggtctgcacttgccggaaaaacatgtcacctggcgtggtgaggcaatccccggcagcctgtttgattttgcgctctatttcttccacaactatcaggcactgttggcaaagggcagtggtccctatttctatctgccgaaaacccagtcctggcaggaagcggcctggtggagcgaagtcttcagctatgcagaagatcgctttaatctgccgcgcggcaccatcaaggcgacgttgctgattgaaacgctgcccgccgtgttccagatggatgaaatccttcacgcgctgcgtgaccatattgttggtctgaactgcggtcgttgggattacatcttcagctatatcaaaacgttgaaaaactatcccgatcgcgtcctgccagacagacaggcagtgacgatggataaaccattcctgaatgcttactcacgcctgttgattaaaacctgccataaacgcggtgcttttgcgatgggcggcatggcggcgtttattccgagcaaagatgaagagcacaataaccaggtgctcaacaaagtaaaagcggataaatcgctggaagccaataacggtcacgatggcacatggatcgctcacccaggccttgcggacacggcaatggcggtattcaacgacattctcggctcccggaaaaatcagcttgaagtgatgcgcgaacaacacgcgccgattactgccgatcagctgctggcaccttgtgatggtgaacgcaccgaaagaaaattcaatgcattaatggaaagtgaaaaaggacagagccagaacttgtggaaatttgccgtttactcaggacttcgtcacggggaactggcagctctggcgtgggaggatgtggatctcgaaaagggaatagtgaatgtcagaagaaacctgacgatacttgatatgttcggtcccccaaaaacaaatgccgggatccgaacagtaacactactgcagcctgctcttgaagcactgaaggagcaatacaaactgaccgggcatcatcgcaaaagcgaaatcaccttttatcatcgggagtacggcagaaccgaaaagcaaaaactgcattttgttttcatgcccagggtgtgtaacggaaaacaaaaaccttattactcggtaagcagtttgggggcaaggtggaatgcagcagtaaaacgtgctggtattcgccgccgtaatccgtaccatacgcggcatacttttgcctgctggctgttgacggcaggagcgaacccggcatttatagccagccaaatggggcatgagactgcgcagatggtgtatgaaatctacgggatgtggattgatgacatgagcgacgaacagatagccatgttgaatgcgcgggttatg

SEQ ID NO: 13337 - DNA, 280 bp, Homo sapiens
  SIMILAR (5)..(277): 981254mologous to Escherichia coli ORF3 protein (AA 1- 168),accession number X13583,Smith-Waterman Score=450.
agcggctgagcttgggcagtcaatcggtgggatattcccttctgatgaaatagtcaaaggctctattagcggatatgtcttcgagcaatttgaaatcgcctgttacacctcactattagcagcagcaaaaaatgccggtgatacagcttcaattccaaccatcgaagcgattttaaatgaggaaaagcaaatggccgactggctgattcagaatattccgcaaacaactgagaaatttttaattcgctctgaaactgatggcgtagaagcgaagaaataa

SEQ ID NO: 13338 - DNA, 1694 bp, Homo sapiens
  SIMILAR (1637)..(858): 811254mologous to Escherichia coli K12 putative transport,accession number AE000192,Smith-Waterman Score=1064.
aggggcacctctggatccgtatcgacctgagccagtcggcagtgagtcacagtgtgaaggaactggaaaatcatactggtgttcgcctgctggacagaaccacgcgtgaagtggtgcttacagatgcagggcagcagctggctttgcgtcttgagcgactgctggatgaactgaacagcacgttgcgcgataccgggcgtatggggcaacaactgagcggaaaagttcgggtcgctgccagccagaccatttccgcgcatcttattccgcaatgcattgctgaaagccatcgccgctatccagatattcagtttgtcctgcacgatcgtccgcagcagtgggtaatggaaagtattcgccagggagatgtcgattttggcatcgtcatcgatccaggcccagtgggcgatctgcaatgtgaagcgattctttccgagcctttctttctgctttgccatcgcgatagcgctttggccgtggaagattatgtacctggcgctaccattgcctgaaggtagcccactggtggtaaagcgcattacgccggttgttgaacgccagttgatgctggtgcgcaggaagaaccgttcactttccaccgccgctgaagctttatgggacgtggtacgagaccagggcaatgcgctaatggccgctgcataggtagcgtcacggtcaaactcgtactcgttccagttggtaagagtgaatttctcgctgcccagcataaagttgtaacctgcaacccagccggcgacatagccgttgtcgccagtgtaataggtttgatctgtataacgcttagcaaagtacggtttgaagccccaaccgctgccggtgaaaagccagctgcagcggaactctaatcctgggttgcgcgtttgataacgtaaggagaatctctgtctattcgccaaccgcgaaaaccagcattgaatcggtggtactgtagataaggtcgctatgaggaatgaacgtttcccaggtaatgttgtgggtcgcaatatgcacttcagtaattgcaggcgcggtaccgccatcgccacatacaggagtgacataacaaacatggcaatccctgccacagaaccgacgattttcagcgatttcataccgcgtgaagcaacccacataaagaagataaacagcaccagcgttaacccctgtaacgctacgactgaatattctttgattagcgaaccgtcgcctttcatcgcccaaccgagcgcaatcagaattgcctggggtttttgtgccagatagggaatatgcaccacccagtaggtccacgcggcgagataagccagtccgggtcccatcgtgtgtttaatccaggtactgaccccgcccttcccatctttgaaggtcgagcctaactgaccaacaattagcgcataaggtgtgaaatagagtgcaaagataaacacccatgaaaaaacaaccaccagcccctggttggcatagttattaacaacgttgccaaaaccccagacagtgataaaagacatcagcgcaatgttgtaccatcgcaactgtttttcctgaacattcccagccatagacaaatccttcgccaaaattaaaggggcatcggtaaaacgagggattatgcgcggcaaataagaagtgcggaaatgacctgcaaacattgcacataccacagttataaacgccgtcaatacactatttttcat

SEQ ID NO: 13339 - DNA, 646 bp, Homo sapiens
  SIMILAR (2)..(634): 961254mologous to Escherichia coli similar to,accession number D90870,Smith-Waterman Score=1032.
gggcaacaactgagcggaaaaagttcgggtcgctgccagccagaccatttccgcgcatcttattccgcaatgcattgctgaaagccatcgccgctatccagatattcagtttgtcctgcacgatcgtccgcagcagtgggtaatggaaagtattcgccagggagatgtcgattttggcatcgtcatcgatccaggcccagtgggcgatctgcaatgtgaagcgattctttccgagcctttctttctgctttgccatcgcgatagcgctttggccgggggggattatgtaccctggcaggcattacagggagcgaaattggtgttgcaggattacgcgtcaggcagccgaccgctgattgacgcagcgctggcgcgcaatggtattcaggcgaatattgtgcaggagattggacatccggcgacgctgttcccgatggtagccgcaggcatcggcatcagtattcttcccgcactggcgctaccattgcctgaaggtagcccactggtggtaaagcgcattacgccggttgttgaacgccagttgatgctggtgcgcaggaagaaccgttcactttccaccgccgctgaagctttatgggacgtggtacgagaccagggcaatgcgctaatggcttgggcgggaagg

SEQ ID NO: 13340 - DNA, 1071 bp, Homo sapiens
  SIMILAR (1774)..(4986): 911254mologous to Homo sapiens putative p150,accession number U93563,Smith-Waterman Score=5076.
atggtccttcggaatggagatgggggtgaagagagccctcagaatgctgctgcgtaccagatgacagaaaggcttgacgaattttctaaacagaaaaatgaaaaggtgttccaggatgtcctcactcgtcttgtaggcatcaagaccctttgcagcagagatggctggaaccttcttgtttcgctaggaaaggaggacctgcagacacaggtgcacgctctcctgactctgtgccttcctcactcagcagagaatttgaatgaatatgttgaagcattaattaccttgaaacaaaaaattatcaatacagacaagcagtctggggatctgttcccgatggtagccgcaggcatcggcatcagtattcttcccgcactggcgctaccattgcctgaaggtagcccactggtggtaaagcgcattacgccggttgttgaacgccagttgatgctggtgcgcaggaagaaccgttcactttccaccgccgctgaagctttatgggacgtgtgcaactgcgccattcagcccttctttaccgccattacccgctgcataggtagcgtcacggtcaaactcaaaacccagaagtcaccccaagacattgagagagcagtggcgagttgggagcggagactctgggtgacctacagagaaggcagctgtcggacaggacattttcttcacaagacttccaaaggccacacccagaatgacttccacgggaagaagaaactagaagctaaggtgaagaagctgcaagagggaaaatttccagaagcgacattcctgttgcagagaagagatattcacttgaggaccttaatatattgcgtgaccgagggcacgggtcataggagagccacagcacaaaggtgcagtggacacaattttgtaataggagtcgttcaggtacctgtagaggaactggcacaggatgtgcagggaaaggaggaagacagccacacatccaggaagcagcgctggctgatccccagataccatgatcacaccgtcccagaaaatgaatgtgtcaaagctctaaaagctctaaaagaatgcggaatgggatga

SEQ ID NO: 13341 - DNA, 384 bp, Homo sapiens
  SIMILAR (1)..(195): 981254mologous to Escherichia coli No definition line found,accession number U00006,Smith-Waterman Score=355.
gatgttgatcgtaaatacagcctggcggaactgatccacacctggtcagatttggcgggcttatcttacgacggttacgatccaacccgttcagtggtgaatccgcagttcaaagaaactacccgctggattggtaacccgtataagaaaaacgcactgatcgattacgacacactgccctatggcgatcagatcgcggcggtaggctggataaggcgtttacgccacatccggcaatacaactgccgcaatgtttacatcgaactcccctcaggccacacttttcaggtggccttttttaataatgccagttactgtgttcccgtctacatacctaagggaataacatgtatcacgacgtcagctatctgcgctcccgcctga

SEQ ID NO: 13342 - DNA, 1922 bp, Homo sapiens
  SIMILAR (1608)..(1886): 871254mologous to Cloning vector pZC320 SopB,accession number U26464,Smith-Waterman Score=393.
gcatccagaatttgctcctccatccacggggactgagagccattactattgctgtatttggtaagcaaaatacgtacatcaggctcgaaccctttaagatcaacgttcttgagcagatcacgaagcaccatcgaaaaactgcagtgcggagggattttgccgatttcggaaccaccatcaaacaggattttcgcctgctggggcaaaccagcgtggaccgcttgctgcaactctctcagggccaggcggtgaagggcaatcagctgttgcccgtctcactggtgaaaagaaaaaccaccctggcgcccaatacgcaaaccgcctctccccgcgcgttggccgattcattaatgcagctggcacgacaggtttcccgactggaaagcgggcaggattttgccgatttcggaaccaccatcaaacaggattttcgcctgctggggcaaaccagcgtggaccgcttgctgcaactctctcagggccaggcggtgaagggcaatcagctgttgcccgtctcactggtgaaaagaaaaaccaccctggcgcccaatacgcaaaccgcctctccccgcgcgttggccgattcattaatgcagctggcacgacaggtttcccgactggaaagcgggcatgaattctgttccaaactggaccaccattcaccctatctccgggctattcttttgatttataagggattttgccgatttcgtaaccaccatcaaacaggtttttcgcttgctggggcaaaccagcgtggaccgcttgctgcaactctctcagggccaggcggtgaagggcaatcagctgttgcccgtctcactggtgaaaagaaaaaccaccctggcgcccaatacgcaaaccgcctctccccgcgcgttggccgattcattaatgcagctggcacgacaggtttcccgactggaaagcgggcagtgagcgcaacgcaattaatgtgtttggacaaactggtgtttgtttttttcgacctctttgataagggcccattaaaagctggaggatgcattaagaccagggcttcaggttttcttctgttatttaaccggagaaagtggctccaagtagcgaagcgagcaggactgggcggcggccaaagcggtcggacagtgctccgagaacgggtgcgcatagaaattgcatcaacgcatatagcgctagcagcacgccatacccctggcgatgctgtcggaatggcgatatccccaagaggcccggcagtccggcataaccaagcctatgcctcagcatccagggtgacgctatttcagcgcggcgaggacgggggaattgacgaggggttgttgtatcgtgggccgtgtacctggaattggaggcaagggttggaatacgggaataccgggcttcttggggatatggtcagttcggggagcttcaccggtcgatttggggtgtggttagcgatatatgcgttgatgcatatctatgggcacgcgttctgggagcactgtccggcagctttggcggcagcccagtcatgctcggttcggtactggagatattatcggaaacgcgatcatggcgaccacacccgtcctgtggatctacccactagtcaattccccatcacacaggcgttaggtcgaagagtatctggtgtcatagagattgcgtatgggagtcgcggtcgtagagctgctgcacttacagaaagtgattatcgtgttctggttggcgagctggatgatgagcagatggctgcattatccagattgggtaacgattatcgcccaacaagtgcttatgaacgtggtcagcgttatgcaagccgattgcagaatgaatttgctgcaaatatttctgcgctggctgatgcgcaccatatttcacgtgaactatatgcccggtcaggtgaatgcacttcaaaaagcctttacagataa

SEQ ID NO: 13343 - DNA, 1631 bp, Homo sapiens
  SIMILAR (442)..(2988): 941254mologous to Homo sapiens putative p150,accession number U93563,Smith-Waterman Score=4078.
ggttggaaggtttcagggattttgcaataacgccagaagggaaggcaacaagtcctttcacatggcagcagaagatagaagttcaaagtgaagtggggaaaatccttaataaattatcagatctcctgagaattcactatcataagaacagcagggattttgccgatttcggaaccaccatcaaacaggattttcgcctgctggggcaaaccagcgtggaccgcttgctgcaactctctcagggccaggcggtgaagggcaatcagctgttgcccgtctcactggtgaaaagaaaaaccaccctggcgcccaatacgcaaaccgcctctccccgcgcgttggccgattcattaatgcagctggcacgacaggtttcccgactggaaagcgggcaggattttgccgatttcggaaccaccatcaaacaggattttcgcctgctggggcaaaccagcgtggaccgcttgctgcaactctctcagggccaggcggtgaagggcaatcagctgttgcccgtctcactggtgaaaagaaaaaccaccctggcgcccaatacgcaaaccgcctctccccgcgcgttggccgattcattaatgcagctggcacgacaggtttcccgactggaaagcgggcaggattttgccgatttcggaaccaccatcaaacaggattttcgcctgctggggcaaaccagcgtggaccgcttgctgcaactctctcagggccaggcggtgaagggcaatcagctgttgcccgtctcactggtgaaaagaaaaaccaccctggcgcccaatacgcaaaccgcctctccccgcgcgttggccgattcattaatgcagctggcacgacaggtttcccgactggaaagcgggcactatgaccatgattacgaattcgagctcggtacccgcttccgggctgtcatcattaaactgtgcaatggcgatagccttcgtcatttcatgaccagcgtttatgcactggttaagtgtttccatgagggggatcctctacataagactgggtgtcagcacctaatccctaaacagcagcaaaacgaaaaataccaagtgcctcaattcgatcaatcaacgattaaaaatattgagtctgcaaaaggacttgatgtgtgggacagctggccgctgcaaaacgctgacggaacagtagctgaatacaacggctatcacgttgagatgctcttgcgggaagccggaaaggcgggattttgccgatttcggaaccaccatcaaacaggattttcgcctgctggggcaaaccagcgtggaccgcttgctgcaactctctcagggccaggcggtgaagggcaatcagctgttgcccgtctcactggtgaaaagaaaaaccaccctggcgcccaatacgcaaaccgcctctccccgcgcgttggccgattcattaatgcagctggcacgacaggaaacagctatgaccatgattacgaattcgagctcggtacccatcagcgccttggtgccgtcgcgcggatagtcggcgacgacctgctgaacgagcttcggcgcgatgtcgtcgatgcgcgtgccggtgacgtcgaccagcacgcccatgctgagaaaggcgacttccgggcgcggatggggatcctctag

SEQ ID NO: 13344 - DNA, 1398 bp, Homo sapiens
  SIMILAR (556)..(1305): 921254mologous to Cloning vector pZC320 SopA,accession number U26464,Smith-Waterman Score=1191.
atgatatcaggacaagagagctctcagagctgtgagacatttttagaaatagcaaacaaaacttggtcccgtttctcctcgcagtttgcagcagttggaaaaaggctttcatggggcagttactacagggattttgccgatttcgacaccaccatcaaacaggattttcgcctgctggggcaaaccagcgtggaccgcttgctgcaactctctcagggccaggcggtgaagggcaatcagctgttgcccgtctcactggtgaaaagaaaaaccaccctggcgcccaatacgcaaaccgcctctccccgcgcgttggccgattcattaatgcagctggcacgacaggtttcccgactggaaagcgggcaagttcttttgattcataagggattttgccgatttcggaaccaccatcaaacaggattttcgcctgctggggcaaaccagcgtggaccgcttgctgcaactctctcagggccaggcggtgaagggcaatcagctgttgcccgtctcactggtgaaaagaaaaaccaccctggcgcccaatacgcaaaccgcctctccccgcgcgttggccgattcattaatgcagctggcacgacaggtttcccgactggaaagcgggcatttaatgatgacagcccggaagcgaggaaaataacccggcgctggagaataggtgaagcagcggatttagttggggtttcttctcaggctatcagagatgccgagaaagcagggcgactaccgcacccggatatggaaattcgaggacgggttgagcaacgtgttggttatacaattgaacaaattaatcatatgcgtgatgtgtttggtacgcgattgcgacgtgctgaagacgtatttccaccggtgatcggggttgctgcccataaaggtggcgtttacaaaacctcagtttctgttcatcttgctcaggatctggctctgaaggggctacgtgttttgctcgtggaaggtaacgacccccagggaacagcctcaatgtatcacggatgggtaccagatcttcatattcatgcagaagacactctcctgcctttctatcttggggaaaaggacgatgtcacttatgcaataaagcccacttgctggccggggcttgacattattccttcctgtctggctctgcaccgtattgaaactgagttaatgggcaaatttgatgaaggtaaactgcccaccgatccacacctgatgctccgactggccattgaaactgttgctcatgactatgatgtcatagttattgacagcgcgcctaacctgggtatcggcacgattaggggatcctctagagtcggaggcaggcatgcccaaacagagagcctaaatcatgagtgtactcccattcacaattgcttccaagagaattaa

SEQ ID NO: 13345 - DNA, 1992 bp, Homo sapiens
  SIMILAR (277)..(2088): 971254mologous to Homo sapiens putative p150,accession number U93563,Smith-Waterman Score=3088.
atgaattccgtgtatattccgacgtccaaccccgggacgcagaaaaacggttaccctaggcgagagaatcttttatttaactgggcgttaccgtcggcgccgccatggaaacttcctgcggtaaagaacggccagaacgcttcagcagagcgcttagcaatcgggtcggcagagattagcgaacggacgccctcggtacccttgcagttagataatgattccgctgtggagcaggctactggaacccgctgctcacttcacacacgggattttgccgatttcggaaccaccatcaaacaggattttcgcctgctggggcaaaccagcgtggaccgcttgctgcaactctctcagggccaggcggtgaagggcaatcagctgttgcccgtctcactggtgaaaagaaaaaccaccctggcgcccaatacgcaaaccgcctctccccgcgcgttggccgattcattaatgcagctggcacgacaggtttcccgactggaaagcgggcaggattttgccgatttcggaaccaccatcaaacaggattttcgcctgctggggcaaaccagcgtggaccgcttgctgcaactctctcagggccaggcggtgaagggcaatcagctgttgcccgtctcactggtgaaaagaaaaaccaccctggcgcccaatacgcaaaccgcctctccccgcgcgttggccgattcattaatgcagctggcacgacaggtttcccgactggaaagcgggcaggattttgccgatttcggaaccaccatcaaacaggattttcgcctgctgggacaaaccagcgtggaccgcttgctgcaactctctcagggccaggcggtgaagggcaatcagctgttgcccgtctcactggtgaaaagaaaaaccaccctggcgcccaatacgcaaaccgcctctccccgcgcgttggccgattcattaatgcagctggcacgacaggtttcccgactggaaagcgggcaactgaagcacaaagaagttgaatccccaaatagaccaataacaagttctgaaattcaggtgctaataaagagcttgccaatcaaaaaaagcccaggcccagatggatttacagctgaattttacgagaggtacaaagaggagctggtaccatttcttctgaaactatttcaaacaattgaacaggagagactactccctaactcattttatgaggccagcatcatcttgacatcaaaacctagcagagatgcaacaaaaaaagataacttcaggccgacatccctgatgaacatttatgcaaaaatcctcaataaaataggacaaactgaatccagtagcacatcaaaaagcttatttagcacaatcaagtcagtgtcatccccagaatgcaaggctggttcaacatacgcaaatcaggattttgccgatttcggaaccaccatcaaacaggattttcgcctgctggggcaaaccagcgtggaccgcttgctgcaactctctcagggccaggcggtgaagggcaatcagctgttgcccgtctcactggtgaaaagaaaaaccaccctggcgcccaatacgcaaaccgcctctccccgcgcgttggccgattcattaatgcagctggcacgacaggtttcccgactggaaagcgggcaagagactacgccttggtctccgttttctgatcccgtgttggccttcgactacaaggtatttatggcctttgtctacaacgtcgtgagggtctctcagcgtatggttgtcgccggatgtataagtgccttcaacgataaactgctgaacgatctgatatgttttcccgtcgccccggtgtccagtaaacagatttttccgtcagatgtaaaggttgcagaaccggaccattcttgcgtctcatcttacaggatcggatcgatggcgccgaacttaacgctgtctgaaatgccacggcataactattttcccgctggaaacagcgttgaccatgataacgaattcgagctc

SEQ ID NO: 13346 - DNA, 1473 bp, Homo sapiens
  SIMILAR (793)..(1470): 981254mologous to Cloning vector pZC320 SopB,accession number U26464,Smith-Waterman Score=1093.
atgaacatgaacatcaaaaaaattgtaaaacaagccacagttctgacttttacgactgcacttctggcaggaggagcgactcaagccttcgcgaaagaaaataaccaaaaagcatacaaagaaacgtacggcgtctctcatattacacgccatgatatgctgcagatccctaaacagcagcaaaacgaaaaataccaagtgcctcaattcgatcaatcaacgattaaaaatattgagtctgcaaaaggacttgatgtgtgggacagctggccgctgcaaaacgctgacggaacagtagctgaatacaacggctatcacgttgtgtttgctcttgcgggaagcccgaaagacgctgatgacacatcaatctacatgttttatcaaaaggtcggcgacaactcaatcgacagctggaaaaacgcgggccgtgggggatcctctagagtcgacctgggggcaaaaccagcgtggaccgctgcttgcaactctctcaggccaggcgtgaactcttgttcaaacttggaacaacactcaaccctatctcgggctattcttttgatttataaggatttttgccgatttcggaaccaccatcaaacaggattttcgccggctggggcaaaccagcgtggaccgcttgctgcaactctctcagggccaggcggtgaagggcaatcagctgttgcccgtctcactggtgaaaagaaaaaccaccctggcgcccaatacgcaaaccgcctctccccgcgcgttggccgattcattaatgcagctggcacgacaggtttcccgactggaaagcgggcaacacccgcgttcggtcgaagagtatctggtgtcatagaaattgccgatgggagtcgccgtcgtaaagctgctgcacttaccgaaagtgattatcgtgttctggttggcgagctggatgatgagcagatggctgcattatccagattgggtaacgattatcgcccaacaagtgcttatgaacgtggtcagcgttatgcaagccgattgcagaatgaatttgctggaaatatttctgcgctggctgatgcggaaaatatttcacgtaagattattacccgctgtatcaacaccgccaaattgcctaaatcagttgttgctcttttttctcaccccggtgaactatctgcccggtcaggtgatgcacttcaaaaagcctttacagataaagaggaattacttaagcagcaggcatctaaccttcatgagcagaaaaaagctggggtgatatttgaagctgaagaagttatcactcttttaacttctgtgcttaaaacgtcatctgcatcaagaactagtttaagctcacgacatcagtttgctcctggagcgacagtattgtataagggcgataaaatggtgcttaacctggacaggtctcgtgttccaactgagtgtatagagaaaattgaggccattcttaaggaacttgaaaagccagcaccctga

SEQ ID NO: 13347 - DNA, 1519 bp, Homo sapiens
  SIMILAR (647)..(1018): 661254mologous to Cloning vector pEH1 lac repressor,accession number AJ007659,Smith-Waterman Score=363.
ggattttgccgatttcggaaccaccatcaaacaggattttcgcctgctggggcaaaccagcgtggaccgcttgctgcaactctctcagggccaggcggtgaagggcaatcagctgttgcccgtctcactggtgaaaagaaaaaccaccctggcgcccaatacgcaaaccgcctctccccgcgcgttggccgattcattaatgcagctggcacgacaggtttcccgactggaaagcgggcaggattgtgccgatttcggaaccaccatcaaacaggattttcgcctgctggggcaaaccagcgtggaccgcttgttgcaactctatcaggtccaggcggtgaagggcaatcagctgttgcctgtctcactggtgaaaagaaaaaccaccctggcgcccaatacgcaaaccgcctctccccgcgcgttggctgattcattaatgcagctggcacgacaggtttcccgactggaaagcgggcaacttcctaggaatccagagacccccaagtggggagcaactggatttagcaattgccggattttgccgatttcggaaccacccatcaaacaggattttcgcctgctggggcaaaccagcgtggaccgcttgctgcaactctctcagggccaggcggtgaagggcaatcagctgttgcccgtctcactggtgaaaagaaaaaccaccctggcgcccaatacgcaaaccgcctctccccgcgcgttggccgattcattaatgcagctggcacgacaggtttcccgactggaaagcgggcaggattttgccgatttcggaaccaccatcaaacaggattttcgcctgctggggcaaaccagcgtggaccgcttgctgcaactctctcagggccaggcggtgaagggcaatcagctgttgcccgtctcactggtgaaaagaaaaaccaccctggcgcccaatacgcaaaccgcctctccccgcgcgttggccgattcattaatgcagctggcacgacaggtttcccgactggaaagcgggcaggattttgccgatttcggaaccaccatcaaacaggattttcgcctgctggggcaaaccagcgtggaccgcttgctgcaactctctcagggccaggcggtgaagggcaatcagctgttgcccgtctcactggtgaaaagaaaaaccaccctggcgcccaatacgcaaaccgcctctccccgcgcgttggccgattcattaatgcagctggcacgacaggtttcccgactggaaagcgggcaggattttgccgatttcggaaccaccatcaaacaggattttcgcctgctggggcaaaccagcgtggaccgcttgctgcaactctctcagggccaggcggtgaagggcaatcagctgttgcccgtctcactggaaacagctatgaccatgattacgaattcgagctcggtacccatccccgagtccttcaatgctatcattccctttgatattggaccatatgcagatttccgagcccctaaatgcgaagtagtgatcagataa

SEQ ID NO: 13348 - DNA, 1233 bp, Homo sapiens; identical to SEQ ID NO: 12339
  SIMILAR (46)..(477): 941254mologous to Cloning vector pZC320 SopA,accession number U26464,Smith-Waterman Score=724.

SEQ ID NO: 13349 - DNA, 1695 bp, Homo sapiens
  SIMILAR (85)..(2142): 971254mologous to Homo sapiens putative p150,accession number U93563,Smith-Waterman Score=3485.
  misc_feature (1)...(1695): n = a,t,c or g
ggggccatcgccctgatagaaggtttttggccctttggacgttggagtccccgttctttaatagtggactcttgttccaaactggaacaacactcaaccctatctcgggctattcttttgatttataagggattttgccgatttcggaaccaccatcaaacaggattttcgcctgctggggcaaaccagcgtggaccgcttgctgcaactctctcagggccaggcggtgaagggcaatcagctgttgcccgtctcactggtgaaaagaaaaaccaccctggcgcccaatacgcaaaccgcctctccccgcgcgttggccgattcattaatgcagctggcacgacaggtttcccgactggaaagcgggcagtgagcgcaacgcaattaatgggattttgccgatttcggaaccaccatcaaacaggattttcgcctgctggggcaaaccagcgtggaccgcttgctgcaactctctcagggccaggcggtgaagggcaatcagctgttgcccgtctcactggtgaaaagaaaaaccaccctggcgcccaatacgcaaaccgcctctccccgcgcgttggccgattcattaatgcagctggcacgacaggtttcccgactggaaagcgggcagtgagcgcaacgcaattaattgacgcggccgaacctcgtcgctttcgtattgcctctcgtgtgatttcggcagcgttcggtcgcgtttccacctacggtgccgaatgcatgtgtatcagtccgctcaagagaacgggattttgccgatttcggaaccaccatcaaacaggattttcgcctgctggggcaaaccagcgtggaccgcttgctgcaactctctcagggccaggcggtgaagggcaatcagctgttgcccgtctcactggtgaaaagaaaaaccaccctggcgcccaatacgcaaaccgcctctccccgcgcgttggccgattcattaatgcagctggcacgacaggtttcccgactggaaagcgggcagtgagcgcaacgcaattaatgccgaaaacaccggttatcaatcccaagaaagtaaaaaatagcccgcgaatcgtccagtcaaacgacctcactgaggcggcatatagtctctcccgggatcaaaaaggtatgctgtatttgttcgttgaccagatcagaaaatctgatggcaccctacaggaacatgacggtatctgcgagatccatgttgctaaatatgctgaaatattcggattgacctctgcggaagccagtaaggatatacggcaggcattgaagagtttcgcggggaaggaagtggttttttatcgccctgaagaggatgccggcgatgaaaaaggctatgaatcttttccttggtttatcaaacgtgcgcacagtccatccagagggctttacagtgtacatatcaacccatatctcattcccttctttatcggancccggtttacgcagtttcggcttagtgaaacaaaagaaatcaccaatccgtatgccatgcgtttatacgaatccctgtgtcagtatcgtaagccggatggctcaggcatcgtctctctgaaaatcgactggatcatagagcgttaccagctgcctcaaagttaccagcgtatgcctgacttccgccgccgcttcctgcaggtctgtgttaatgagatcaacagcagaactccaatgcgcctctcatag

SEQ ID NO: 13350 - DNA, 1563 bp, Homo sapiens; identical to SEQ ID NO: 5664
  SIMILAR (1319)..(1540): 1001254mologous to Cloning vector pTM30 repressor LacI- q,accession number AF023620,Smith-Waterman Score=354.

SEQ ID NO: 13351 - DNA, 2346 bp, Homo sapiens
  SIMILAR (712)..(2940): 971254mologous to Homo sapiens putative p150,accession number U93568,Smith-Waterman Score=3707.
ttaaacgtggccaatatggacaacttcttcgcccccgttttcaccatgggcaaatattatacgcaaggcgacaaggtgctgatgccgctggcgattcaggttcatcatgccgtttgtgatggcttccatgtcggcagaatgtgcccgctttccagtcgggaaacctgtcgtgccagctgcattaatgaatcggccaacgcgcggggagaggcggtttgcgtattgggcgccagggtggtttttcttttcaccagtgagacgggcaacagctgattgcccttcaccgcctggccctgagagagttgcagcaagcggtccacgctggtttgccccagcaggcgaaaatcctgtttgatggtggttccgaaatcggcaaaatcccttataaatcaaaagaatagcccgagaatagggttgagtgttgttccagtttggaacaagagtccatacgaaaacttttcggacttgactgccctgtttggtcgactctaggagcatcccctgataaaaagggaaaagctctcccataagagtggagtaaggagaagtgtaaaggcaccaagttatgagaaatctcatccaggcatccactgtgtctggattgcaagaagggaagctggtggtgggatgtaaatgtgtggggtttctttgggggatgctgaaccgtgaggatgctgatgcatcctccaggacaggcttggtgtcccatctggggacaagctggagtggggctggaatggaggccacgaagccagccaggtggccaggggaatattccagaagggaaatggcagagccccaagcaggatggacattaatcgtgccgatacccaggttaggcgcgctgtcaataactatgacatcatagtcatgagcaacagtttcaatggccagtcggagcatcaggtgtggatcggtgggcagtttaccttcatcaaatttgcccattaactcagtttcaatacggtgcagagccagacaggaaggaataatgtcaagccccggccagcaagtgggctttattgcataagtgacatcgtccttttccccaagatagaaaggcaggagagtgtcttctgcatgaatatgaagatctggtacccatccgtgatacattgaggctgttccctgggggtcgttaccttccacgagcaaaacacgtagccccttcagagccagatcctgagcaagatgaacagaaactgaggttttgtaaacgccacctttatgggcagcaaccccgatcaccggtggaaatacgtcttcagcacgtcgcaatcgcgtaccaaacacatcacgcatatgattaatttgttcaattgtataaccaacacgttgctcaacccgtcctcgaatttccatatccgggtgcggtagtcgccctgctttctcggcatctctgatagcctctcctcctcctcttctcttttttcctcttcctcctctttctcttcctttcccccatcctcctcctcttcgtcttcctcttcctccctgtagctctttcttcctttccttctctttcttcttctccatctctttcttcttctgaaactcaagaagcgcgatgtcagaaacccaggccctggatttgggcgaagtgggcggctgcatgcatgggacgctacaggggtccagctgaaccaatggctgcgggaagagttctcggtaaattaattgcgttgcgctcactgcccgctttccagtcgggaaacctgtcgtgccagctgcattaatgaatcggccaacgcgcggggagaggcggtttgcgtattgggcgccagggtggtttttcttttcaccagtgagacgggcaacagctgattgcccttcaccgcctggccctgagagagttgcagcaagcggtccacgctggtttgccccagcaggcgaaaatcctgtttgatggtggttccgaaatcggcaaaatcccttataaatcaaaagaatagcccgagatagggttgagtgttgttccagtttggaacaagagtccacgtctttcattgccatacggaactccggatgagcattcatcaggcgggcaagaatgtgaataaaggccggataaaacttgtgcttatttttctttacggtctttaaaaaggccgtaatatccagctgaacggtctggttataggtacattgagcaactgactgaaatgcctcaaaatgttctggattggggaggcggttgccgccgctgctgctgacggtgtgacgttctctgttccggtcacaccacatacgttccgccattcctatgcgatgcacatgctgtatgccggtataccgctgaaaagtctgcaaagcctttgttatttcatgccctggtgtccacctcat

SEQ ID NO: 13352 - DNA, 1638 bp, Homo sapiens
  SIMILAR (976)..(1371): 871254mologous to Homo sapiens histone-binding protein,accession number M97856,Smith-Waterman Score=596.
atggccttggcctgggctgtgaccctgtgttgcctcctggtccctgcctggggaaccatcagctggggtatttttagagccccagtgcaggctttcaagccagggtcaattcatgaagtggttctaggcaatcttgagaaaggttgccggctttccccgtcaagctataatcgggggcttcctttaggtttcgaatttagtgctttacggcacctcgaccccaaaaaattgatttgggattttcgcctgctggggcaaaccagcgtggaccgcttgctgcaactctctcagggccaggcggtgaagggcaatcagctgttgcccgtctcactggtgaaaagaaaaaccaccctggcgcccaatacgcaaaccgcctctccccgcgcgttggccgattcattaatgcagctggcacgacaggtttcccgactggaaagcgggcaggattttgccgatttcggaaccaccatcaaacaggattttcgcctgctggggcaaaccagcgtggaccgcttgctgcaactctctcagggccaggcggtgaagggcaatcagctgttgcccgtctcactggtgaaaagaaaaaccaccctggcgcccaatacgcaaaccgcctctccccgcgcgttggccgattcattaatgcagctggcacgacaggtttcccgactggaaagcgggcagacagtcctcctgcacacagatgaatgcccctgtgagcaaattgcctccccggcctgttcagagtcacctacgctgctggcaaatggtttttcagagcaagcagcctctgacgcaggcctggaatctggggcaaggaccggttttacgcagtttcggcttagtgaacaaaaagaaatcaccaatccgtatgccatgcgtttatacgaatccctgtgtcagtatcgtaagccggatggctcaggcatcgtctctctgaaaatcgactggatcatagagcgttaccagctgcctcaaagttaccagcaaaataatgatagcatagatgaggaagcaaggaaagagttgagagaacaggtttatgactccatgggagaaaaagaagaagccaaaaaaacagaagacaagtctttcgcaaagcctgaaactgataaagaacaggactgtgaaatggagaagggtggaagagaagatatggatataagtgaatctgcagaggagccacaggaaaaagttgacttgactctaggttggttaactgaaatctctgaaggggcaaaaggaggaggagcaccagaaggaccaaatgaagctgaggtcacttctgggaagccagaacaggaagtaccagatgttgaggaagaaaaatcagtttctgaaactgatgtccaagaagagtgcagagaaaaggaggttgggagaagcacagagagggattttgccgatttcggaaccaccatcaaacaggattttcgcctgctggggcaaaccagcgtggaccgcttgctgcaactctctcagggccaggcggtgaagggcaatcagctgttgcccgtctcactggtgaaaagaaaaaccaccctggcgcccaatacgcaaaccgcctctccccgcgcgttggccgattcattaatgcagctggcacgacaggtttcccgactggaaagcgggcagtga

SEQ ID NO: 13353 - DNA, 2433 bp, Homo sapiens
  SIMILAR (1)..(3291): 991254mologous to Homo sapiens unknown,accession number AF148856,Smith-Waterman Score=5719.
atggacataaatgcaaagattcttagcaaattactagcaagccatatccaacagcacatcagaaagctaatccatcatgttcaagtaggctttatcccaagagagaggggatcctctacagtagactggattcagcccgtaggaatcacgggagtggaagatcacaaaacgatttttgacggagacggaaaaacatatcagaacgttcagcagtttatcgaggaaggcaattatacacccggcgacaaccatacgctgagagaccctcactacgttgaagacaaaggccataaatacattgtattcgaagccaacacgggaacagaaaacggataccaaggcgaagaatctttatttaacaaagcgtactacggcggcggcacgaacttcttccgtaaagaaagccagaagcttcagcagagcgctaaaaaacgcgatgctgagttagcgaacggcgccctcggtatcatagagttaaataatgattacacattgaaaaaagtaatgaagccgctgatcacttcaaacacggtaactgatgaaatcgagcgcgcgaatgttttcaaaatgaacggcaaatggtacttgttcactgattcacgcggttcaaaaatgacgatcgatggtattaactcaaacgatatttacatgcttggttatgtatcaaactctttaaccggcccttacaagccgctgaacaaaacagggcttgtgctgcaaatgggtcttgatccaaacgatgtgacattcacttactctcacttcgcagtgccgcaagccaaaggcaacaatgtggttatcacaagctacatgacaaacagaggcttcttcgaggataaaaaggcaacatttgcgccaagcttcttaatgaacatcaaaggcaatagaggaacagaaggaaaacaagggatacaatattttccacataagcctttgggtgttggaagtccacatatcaggtttgactatcttcttgtaagtatattgccttcgatccgtaatcccacgggaaagtttgtggtcaaagacttggcaaaacgcaagaattatgcacctgtagcaatgcttcaatcagccatgacacgcactcacaatcatcgctcatgtgaagagccagtgaaggatatgctattagcctttcccaatgaccgagctgcaactatcaggtctaaagaccatcataaacatttcagggattttgccgatttcggaaccaccatcaaacaggattttcgcctgctggggcaaaccagcgtggaccgcttgctgcaactctctcagggccaggcggtgaagggcaatcagctgttgcccgtctcactggtgaaaagaaaaaccaccctggcgcccaatacgcaaaccgcctctccccgcgcgttggccgattcattaatgcagctggcacgacaggtttcccgactggaaagcgggcaggattttgccgatttcggaaccaccatcaaacaggattttcgcctgctggggcaaaccagcgtggaccgcttgctgcaactctctcagggccaggcgcacgccatagtgactggcgatgctgtcggaatggacgatatcccgcaagaggcccggcagtaccggcataaccaagcctatgcctacagcatccagggtgacggtgccgaggatgacgatgagcgcattgttagatttcatacacgggtcaccgtcgacagcgacacacttgcatcggatgcagcccggttaacgtgccggcacggcctgggtaaccagggaacagctccaatgtatcacggatgggtaccagatcttcatattcatgcagaagacactctcctgcctttctatcttggggaaaaggacgatgtcacttatgcaataaagcccacttgctggccggggcttgacattattccttcctgtctggctctgcaccgtattgaaactgagttaatgggcaaatttgatgaaggtaaactgcccaccgatccacacctgatgctccgactggccattgaaactgttgctcatgactatgatgtcatagttattgacagcgcgcctaacctgggtatcggcacgattaatgtcgtatgtgctgctgatgtgctgattgttcccacgcctgctgagttgtttgactacacctccgcactgcagtttttcgatatgcttcgtgatctgctcaagaacgttgatcttaaagggttcgagcctgatgtacgtattttgcttaccaaatacagcaatagtaatggctctcagtccccgtggatggaggagcaaattcgggatgcctggggaagcatggttctaaaaaatgttgtacgtgaaacggatgaagttggtaaaggtcagatccggatgagaactgtttttgaacaggccattgatcaacgctcttcaactggtgcctggagtaatgctctttctatcttgggaacctgtctgcaatga

SEQ ID NO: 13354 - DNA, 1397 bp, Homo sapiens
  SIMILAR (1)..(525): 941254mologous to Homo sapiens putative p150,accession number U93572,Smith-Waterman Score=846.
atggatgcaaaaatcctcaataaaatactggcaaaccaaatccagcagcacatcaaaaagcttatccactatgatccagtgggcttaatccctgggatgcaaggctggttcaacattcacaaatcaataaacgtaatccagcatataaacagaaccaaagacaaaaaccacatgattatctcaatagatgcagaaaaggccttcgacaaaattcaacagcctttcatgctaaaaattctcaataaattaggtattgatgggacgtatctcaaaataataagagctatttatgacaaacccacagccaatatcatactgaatgggcaaaaattggaagcattcgctttgaaaaccggcacaagacagggatgccctctctcaccactcctattcaacatagtgttggaagttctggccagggcaatcaggcaggagaaagaaataaagggtattcaattaggaaaagaggaagtcaaattgtccctgtttgcagatgacatgattgtatatttagaaaaccccatcggggattttgccgatttcggaaccaccatcaaacaggattttcgcctgctggggcaaaccagcgtggaccgcttgctgcaactctctcagggccaggcggtgaagggcaatcagctgttgcccgtctcactggtgaaaagaaaaaccaccctggcgcccaatacgcaaaccgcctctccccgcgcgttggccgattcattaatgcagctggcacgacaggtttcccgactggaaagcgggcaaaaaaggttcctaacgcacttgatgtttcaaagccagcatctggcagaaagctttccccatatggtccctcacccattgggcggcctttcatcggaaacgaggactcttctctcctcaaactttgtggaggatccactcagactctcacctgtgcttccagcgggaggaggaagaagcccaagcggccgagagaatcctctggaccatcagattaccaatgaaagaggagaaccaagctgtgataggttaactgatcctcacagagctccttctgacactgggtcccagtcatctccatgggaacaggaccataggatgatgtttcctccaccaggacaatcatatcctgattcagctcttcctccacaaagggaagacagattttattctaattctgatagactgcctggaccatcagaactcagaagttttaatatgccttctttggataaaacggatgggtcaatgccttcagaaatggaatccactagacatgatgccaaagatgatcctggtagtttaaatgagcctgattcatctctccctgctgaaaatgaagcaactggccccggctttattcctctacctcgtgctccaatcagtggtccattgtttccagggacgacaag

SEQ ID NO: 13355 - DNA, 1413 bp, Homo sapiens
  SIMILAR (961)..(1410): 981254mologous to Cloning vector pZC320 SopA,accession number U26464,Smith-Waterman Score=791.
atggagaaaaaaatcactggatataccaccgttgatatatcccaatggcatcgtaaagaacattttgaggcatttcagtcagttgctcaatgtacctataaccagaccgttcagctggatattacggcctttttaaagaccgtaaagaaaaataagcacaagttttatccggcctttattcacattcttgcccgcctgatgaatgctcatccggagttccgtatggcaatgaaagacggaaatggggccctttttgaggggttcagttttgggtctctgcttgcgggccaattggggcatccaccagtggccatgggccaagtcaagccttgtgttctcccttttggaattaagacttctaggccagcagaacataatgttgcaggaataggaagcaaaaattgtgctagtggatcactaggggtgatactgaatggtgccacttttccatcccttgattcctggacctgtgaattctggctatgcaagaaacagtaccatgtattagatgccgattcagagcatgcacagccttctggagaactctgccccagccttgccaagtattctcacctagatggcattgtaattgtaacttcaaaaggccattctaccgttctatcaatccagctgcttcaggatgatgaggaacatgtgaactcttgttccaaactggaacaacactcaaccctatctcgggctattcttttgatttataaggaattttgccgatttcggaaccaccatcaaacaggattttcgcctgctggggcaaaccagcgtggaccgcttgctgcaactctctcagggccaggcggtgaagggcaatcagctgttgcccgtctcactggtgaaaagaaaaaccaccctggcgcccaatacgcaaaccgcctctccccgcgcgttggccgattcattaatgcagctggcacgacaggtttcccgactggaaagcgggcagctatcagagatgcgaagaaagcagggcgactaccgcacccggatatggaaattcgaggacgggttgagcaacgtgttggttatacaattgaacaaattaatcatatgcgtgatgtgtttggtacgcgattgcgacgtgctgaagacgtatttccaccggtgatcggggttgctgcccataaaggtggcgtttacaaaacctcagtttctgttcatcttgctcaggatctggctctgaaggggctacgtgttttgctcgtggaaggtaacgacccccagggaacagcctcaatgtatcacggatgggtaccagatcttcatattcatgcagaagacactctcctgcctttctatcttggggaaaaggacgatgtcacttatgcaataaagcccacttgctggccggggcttgacattattccttcctgtctggctctgcaccgtattaaatga

SEQ ID NO: 13356 - DNA, 1380 bp, Homo sapiens
  SIMILAR (90)..(521): 621254mologous to Homo sapiens Pin1,accession number U49070,Smith-Waterman Score=392.
atgcacaccaaaggtcaacaggattttcgcctgctggggcaaaccagcgtggaccgcttgctgcaactctctcagggccaggcggtgaagggcaatcagctgttgcccgtctcactggtgaaaagaaaaaccaccctggcgcccaatacgcaaaccgcctctccccgcgcgttggccgattcattaatgcagctggcacgacaggtttcccgactggaaagcgggcacctgaagctttctaaagcagtggttgatgagtggaacatggatgttgatttggaaagaaactatgtggagagaaaacagcggcagaataaaaaactcggcatggaagctgactgggatttgaggggattttgccgatttcggaaccaccatcaaacaggattttcgcctgctggggcaaaccagcgtggaccgcttgctgcaactctctcagggccaggcggtgaagggcaatcagctgttgcccgtctcactggtgaaaagaaaaaccaccctggcgcccaatacgcaaaccgcctctccccgcgcgttggccgattcattaatgcagctggcacgacaggtttcccgactggaaagcgggcaaaccagcccataccgcacacaatcaggcccacaatggttattgcggaagacatgcgtacatggtcaatggctagttttgaaagtggctggcgatgttcttttttcgtcagcgagttgattgctatgtcgagcagaaacgtcccgacaaaccataatgcgtatatctttaagcccaactccaaatcactcataaatcctcttggccttatcgcggcgaacggaacggttaatacaagacttcaacgcatttattcagtgtttcaatgtcgattcacgcggttcaaaaatgacgatcgattggtattaactcaaaacgatatttacatgcttggttatgtatcaaactctttaaccggcccttacaagccgctgaacaaaacagggcttgtgctgcaaatgggtcttgatccaaacgatgtgacattcacttactctcacttcgcagtgccgcaagccaaaggcaacaatgtggttatcacaagctacatgacaaacagaggcttcttcgaggataaaaaggcaacatttgcgccaagcttcttaatgaacatcaaaggcaataaaacatccgttgtcaaaaacagcatcctggagcaaggacagctgacatggctccaagtagcgaagcgagcaggactgggcggcggccaaagcggtcggacagtgctccgagaacgggtgcgcatagaaattgcatcaacgcatatagcgctagcagcacgccatagtgactggcgatgctgtcggaatggacgatatcccgcaagaggcccggcagtaccggcataa

SEQ ID NO: 13357 - DNA, 2236 bp, Homo sapiens
  SIMILAR (2)..(196): 871254mologous to Homo sapiens MHC HLA-SB beta chain,accession number L29173,Smith-Waterman Score=296.
atgtcaagccctaaggttcctgaaaattcttcttatccagcggtcgtggcaagcccatatgaaccagttgttggaggggattttgccgatttcggaaccaccatcaaacaggattttcgcctgctggggcaaaccagcgtggaccgcttgctgcaactctctcagggccaggcggtgaagggcaatcagctgttgcccgtctcactggtgaaaagaaaaaccaccctggcgcccaatacgcaaaccgcctctccccgcgcgttggccgattcattaatgcagctggcacgacaggtttcccgactggaaagcgggcaggattttgccgatttcggaaccaccatcaaacaggattttcgcctgctggggcaaaccagcgtggaccgcttgctgcaactctctcagggccaggcggatctggctctgaaggggctacgtgttttgctcgtggaaggtaacgacccccagggaacagcctcaatgtatcacggatgggtaccagatcttcatattcatgcagaagacactctcctgcctttctatcttggggaaaaggacgatgtcacttatgcaataaagcccacttgctggccggggcttgacattattccttcctgtctggctctgcaccgtattgaaactgagttaatgggcaaatttgatgaaggtaaactgcccaccgatccacacctgatgctccgactggccattgaaactgttgctcatgactatgatgtcatagttattgacagcgcgcctaacctgggtatcggcacgattaatgtcgtatgtgctgctgatgtgctgattgttcccacgcctgctgagttgtttgactacacctccgcactgcagtttttcgatatgcttcgtgatctgctcaagaacgttgatcttaaagggttcgagcctgatgtacgtattttgcttaccaaatacagcaatagtaatggctctcagtccccgtggatggaggagcaaattcgggatgcctggggaagcatggttctaaaaaatgttgtacgtgaaacggatgaagttggtaaaggattttcgcctgctggggcaaaccagcgtggaccgcttgctgcaactctctcagggccaggcggtgaagggcaatcagctgttgcccgtctcactggtgaaaagaaaaaccaccctggcgcccaatacgcaaaccgcctctccccgcgcgttggccgattcattaatgcagctggcacgacaggtttcccgactggaaagcgggcaatggagttaaaagttatttgccagtcctcagtaactgcagacacaggagacaatgttggaaacaatgttggtgaaatggaagtatcttcccttttgatagctgaagctgggctgtcatatcagaacacaatagtcaacatcagcatgtttctcacaaaggttgaattattcagtctttacacgtgggtcaagacaaaaacagcatatccactcagttccacatttccatataaaggccaaggcatttattctcaggataatggggggtctttagagtcccccacagggcttcaagcacgagttgcacggcccgtaccgcgcataagccggcgggattttgccgatttcggaaccaccatcaaacaggattttcgcctgctggggcaaaccagcgtggaccgcttgctgcaactctctcagggccaggcgtgggccatcgccctgatagacggtttttcgcctttgacgttggagtccacgttctttaatagtggatcttggtccaaactggaacaccactcaaccctatctcgggctattcttttgatttataagggattttgccgatttcggaaccaccatcaaacaggattttcgcctgctggggcaaaccagcgtggaccgcttgctgcaactctctcagggccaggcggtgaagggcaatcagctgttgcccgtctcactggtgaaaagaaaaaccaccctggcgcccaatacgcaaaccgcctctccccgcgcgttggccgattcattaatgcagctggcacgacaggaaacagctatgaccatgattacgaattcgagctcggtacccgtcgactccgagttatttatgacaatggaaccgaatccgacatattgcaacgctctcttcagcgagcgctgcatcgcgatgaagttgccaggttaattagtgaaccgtcagccggaccgtgtttggtgatgcatctgagcctgacgatatcgaaagcggaactattta

SEQ ID NO: 13358 - DNA, 1701 bp, Homo sapiens
  SIMILAR (137)..(36): 481254mologous to Frankia sp. ORFB,accession number U53363,Smith-Waterman Score=75.
atgaaactcatggaaacacttaaccagtgcataaacgctggtcatgaaatgacgaaggctatcgccattgcacagtttaatgatgacagcccggaagcgaggaaaataacccggcgctggagaataggtgaagcagcggatttagttggggtttcttctcaggctatcagagatgccgagaaagcagggcgacttccgcacccggatatggcaattcgaggacgggttgagcaacgtgttggttatacaattgaacaaattagtgtttatcctctacaggattttgccgatttcggaaccaccatcaaacaggattttcgcctgctggggcaaaccagcgtggaccgcttgctgcaactctctcagggccaggcgcgcgtaataaccttctttcccgagatcaatacggtagagcggtggcagtgcgacgtaaacgtgaccgtgtttcaccaacgcgcggaaatgttttacgaacaaagcgcagagcagcgtggcaatgtgcagaccatcagagtccgcatccgcgaggatacagattttgccataacgaagctggctcagatcgtcgctgtcaggatcgataccgatcgctaccgaaatatcgtgcacttcctgcgaagccagcacttcgtcggaagagacttcccaggtgttaaggatcttacctttcagtggcatgatcgcctgatattcgcgatcgcgcgcctgcttggcagatccgcctgcggagtcaccttccacaaggaacagctcggtacggttaaggtcctgcgcggtacaatcagccagtttgccaggcaacgccgggccgctggtcagctttttacgcaccacttttttggccgcacgcatacggcgctgggcgctggaaatcgccatctccgccagcagttcagccgcctgaacgttctggttcagccacaggataaaggcatctttcaccacgccagaaacgaatgccgcgcattgacgcgaagagagacgcccgcgttcttccggatccgagccgtgtttaactcccaactttcacaaacccaacttcacatattttttaccgcgcgccctgctggcctagcctctaaatgccgaaagcctccccaggcttgttatttgtgggattttgccgatttcggaaccaccatcaaacaggattttcgcctgctggggcaaaccagcgtggaccgcttgctgcaactctctcagggccaggcggtgaagggcaatcagctgttgcccgtctcactggtgaaaagaaaaaccaccctggcgcccaatacgcaaaccgcctctccccgcgcgttggccgattcattaatgcagctggcacgacaggtttcccgactggaaagcgggcaaaatattgagtctgcaaaaggacttcatgtgtgggacagctggccgctgcataacgcagacggaacagtagatgaatacaacggctatcacgttgtgtttgctcttgcgggaagcccgaaagacgctgatgacacatcaatctacatgttttatcaaaaggtcggcgacaactcaatcgacagctggaaaaacgcgggccgtgtctttaaagacagcgataagttcgacgccaacgatccgatcttgaaagatcagacgcaagaatggtccggttctgcaacctttacatctgacggaaaaatccgtttattctacactgactattccggtgaacattacggctag

SEQ ID NO: 13359 - DNA, 1116 bp, Homo sapiens
  SIMILAR (26)..(232): 431254mologous to Homo sapiens Human secreted protein, SEQ ID NO: 4473,accession number G00392,Smith-Waterman Score=121.
  misc_feature (1)...(1116): n = a,t,c or g
atgatnggattttgccgatttcggaacccccatcaaacaggattttcgcctgctggggcaaaccagcgtggaccgcttgctgcaactctctcagggccaggcggtgaagggcaatcagctgttgcccgtctcactggtgaaaagaaaaaccaccctggcgcccaatacgcaaaccgcctctccccgcgcgttggccgattcattaatgcagctggcacgacaggtttcccgactggaaagcgggcagtgagcgcaacgcaattaatgttacatccagtctctgtttttcatctgacccaacctgataaacagctccacaaccccaatctgggagcaccttttcctcccggctggctgtgtctaggaacaataagaggctcagcccaggaaaagcaagaaaaacctagttttgctttggtcagcagggatggatatgggacagtagagatgagggtctttgaaaaggtagacacggccgacctttctgtaggtctgcctcttcccagtggacacagcttttcccccccggcaaggcagcaagggccctcccattcttgggctccacctcctcactgtccccaaggcaaatggaaagccagggattttgccgatttcggaaccaccatcaaacaggattttcgcctgctggggcaaaccagcgtggaccgcttgctgcaactctctcagggccaggcggtgaagggcaatcagctgttgcccgtctcactggtgaaaagaaaaaccaccctggcgcccaatacgcaaaccgcctctccccgcgcgttggccgattcattaatgcagctggcacgacaggtttcccgactggaaagcgggcaggattttgccgatttcggaaccaccatcaaacaggattttcgcctgctggggcaaaccagcgtggaccgcttgctgcaactctctcagggccaggcgtggctccaagtagcgaagcgagcaggactgggcggcggccaaagcggtcggacagtgctccgagaacgggtgcgcatagaaattgcatcaacgcatatagcgctagcagcacgccatagtgactggcgatgctgtcggaatggacgatatcccgcaagaggcccggcagtaccggcataa

SEQ ID NO: 13360 - DNA, 1637 bp, Homo sapiens
  SIMILAR (241)..(849): 1001254mologous to Homo sapiens endoglycan,accession number AF219137,Smith-Waterman Score=1070.
  misc_feature (1)...(1637): n = a,t,c or g
ggatttttgcggatttgggacccaccatcaaacaggattttcgcctgttggggcaaaccagcgtggaccgcttgctgcaactctttcagggccagncgggattttgccgatttcggaaccaccatcaaacaggattttcgcctgctggggcaaaccagcgtggaccgcttgctgcaactctctcagggccaggcggtgaagggcaatcagctgttgcccgtctcactggtgaaaagaaaaaccaccctggcgcccaatacgcaaaccgcctctccccgcgcgttggccgattcattaatgcagctggcacgacaggtttcccgactggaaagcgggcagtgagcgcaacgcaattaattcaatgtgggctagagaaaagtgtggatcccctggggaaggagaaaaacaaaaagtttacaactacttataagctcttcttcatggacctcaccaagtgctccaaatcgaaaaacaacaacaaagacaacaaaacacataggaattttgccgatttcggaaccaccatcaaacaggattttcgcttgctggggcaaaaccagcgtgaaccgcctgctgcaactctctcagggccagccggtgaagggcaatcagctgttgcccgtctcactggtgaaaagaaaaaccaccctggcgcccaatacgcaaaccgcctctccccgcgcgttggccgattcattaatgcagctggcacgacaggtttcccgactggaaagcgggcattaggcataaagaagaaggaagaaccaagagattctaacaagatgtattctagggttcctgggagacaatgcaatttggaggaaaaaggccttaggcatgggattttgccgatttcggaacccaccatcaaacaggattttcgcctgctggggcaaaccagcgtggaccgcttgctgcaactctctcagggccaggcggtgaagggcaatcagctgttgcccgtctcactggtgaaaagaaaaaccaccctggcgcccaatacgcaaaccgcctctccccgcgcgttggccgattcattaatgcagctggcacgacaggtttcccgactggaaagcgggcaatcagaaaatttgatgccaccctacaggaacatgaacggtatttgcgagatccatgttgctaaatatgctgaaatattcgaattgacctctgcgaaagccaaggatgccggcgatgaaaaaggctatgaatcttttccttggtttatcaaacgtgcgcacagtccatccagagggctttacagtgtacatatcaacccatatctcattcccttctttatcgggttacagaaccggtttacgcagtttcggcttagtgaaacaaaagaaatcaccaatccgtatgccatgcgtttatacgaatccctgtgtcagtatcgtaagccggatggctcaggcatcgtctctctgaaaatcgactggatcatagagcgttaccagctgcctcaaagttaccagcgtatgcctgacttccgccgccgcttcctgcaggtctgtgttaatgagatcaacagcagaactccaatgcgcctctcatacattgagaaaaagaaaggccgccagacgactcatatcgtattttccttccgcgatatcacttccatgacgacaggatag

SEQ ID NO: 13361 - DNA, 1299 bp, Homo sapiens
  SIMILAR (1281)..(841): 851254mologous to Homo sapiens nuclear distribution protein C homolog,accession number AF130736,Smith-Waterman Score=663.
atgaaagccatcgccaaatatgacttcaaagttattgcagagaccgaggtgaggttcaaaaggggggacatcctcaaggtatttattcgcgataagctcatggagcggcgtaaccgtcgcacaggaaggacagagaaagcgcggatctgggaagtgacggacagaacggtcaggacttggattggggaggcggttgccgccgctgctgctgacggtgtgacgttctctgttccggtcacaccacatacgttccgccattcctatgcgatgcacatgctgtatgccggtataccgctgaaagttctgcaaagcctgatgggacataagtccatcagttccacggaagtctacacgaaggtttttgcgctggatgtggctgcccggcaccgggtacagtttgcgatgccggaggattttgccgatttcggaaccaccatcaaacaggattttcgcctgctggggcaaaccagcgtggaccgcttgctgcaactctctcagggccaggcggtgaagggcaatcagctgttgcccgtctcactggtgaaaagaaaaaccaccctggcgcccaatacgcaaaccgcctctccccgcgcgttggccgattcattaatgcagctggcacgacaggtttcccgactggaaagcgggcaaagagtatctggtgtcatagaaattgccgatggaagtcgccgtcgtaaagctgctgcacttaccgaaagtgattatcgtgttctggttggcgagctgaatgatgagcagatgcctgcattatccagattgggtaacgattatcgcccaacaagtgcttatgaacgtggtcagcgttatgcaagccgattgcagaatgaatttgctggaaatatttctgcgctggctgatgcggaaaatatttcacgtaagattattacccgctgtatcaacaccgccaaattgcctaaatcagttgttgctcttttttctcaccccggtgaactatctgcccggtcaggtgatgcacttcaaaaagcctttacagataaagaggaattacttaagcagcaggcatctaaccttcatgagcagaaaaaagctggggtgatatttgaagctgaagaagttatcactcttttaacttctgtgcttaaaccgtcatctgcatcaagaactagtttaagctcacgacatcagtttgctcctggagcgacagtattgtataagggcgataaaatggtgcttaacctggacaggtctcgtgttccaactgagtgtatagagaaaattgaggccattcttaaggaacttggaaagccagcaccctga

SEQ ID NO: 13362 - DNA, 2160 bp, Homo sapiens
  SIMILAR (655)..(951): 431254mologous to Murine leukemia virus reverse transcriptase,accession number AF003736,Smith-Waterman Score=166.
atgcaagcggaagtggctcatcgggtcatctcccgctgcctcgccctgctgctcctgcagacctgggaacacagctcctcgccagcaatggaacaaagctggacgaaaaatgactttgacgagttgacagaagcaggcttcagaccactgtttttcgatatgcttcgtgatctgctcaagaacgttgatcttaaagggttcgagcctgatgtacgtattttgcttaccaaatacagcaatagtaatggctctcagtccccgtggatggaggagcaaattcgggatgcctggggaagcatggttctaaaaaatgttgtacgtgaaacggatgaagttggtaaagctgccccgatggtggattcgttaattgcgcgcgtaggagtaatggctcgcggtaatgccattactttgcctgtatgtggtcgggatgtgaagtttactcttgaagtgctccggggtgatagtgttgagaagacctctcgggtatggtcaggtaatgaacgtgaccaggagctgcttactgaggacgcactggatgatctcatcccttcttttctactgactggtcaacagacaccggcgttcggtcgaagagtatctggtgtcatagaaattgccgatgggagtcgccgtcgtaaagggggaggactgcccgctaaagctggggtgcaccagaaggtggccgtgcagggccattcgcttcagctgctatcccagctgtgttctcatggcatggaagcagctttaaaagcattttgggacaatctggtcattcaaggaaacaaaagcccttcaagtaaggattttgccgatttcggaaccaccatcaaacaggattttcgcctgctggggcaaaccagcgtggaccgcttgctgcaactctctcagggccaggcggtgaagggcaatcagctgttgcccgtctcactggtgaaaagaaaaaccaccctggcgcccaatacgcaaaccgcctctccccgcgcgttggccgattcattaatgcagctggcacgacaggtttcccgactggaaagcgggcaggattttgccgatttcggaaccaccatcaaacaggattttcgcctgctggggcaaaccagcgtggaccgcttgctgcaactctctcagggccaggcggtgaagggcaatcagctgttgcccgtctcactggtgaaaagaaaaaccaccctggcgcccaatacgcaaaccgcctctccccgcgcgttggccgattcattaatgcagctggcacgacaggtttcccgactggaaagcgggcaaggactgcccgctaaagctggggtgcaccagaaggtggccgtgcagggccattcgcttcagctgctatcccagctgtgttctcatggcatggaagcagctttaaaagcattttgggacaatctggtcatccaaggaaacaaaagccttcaaagtaaggattttgccgatttcggaaccaccatcaaacaggattttcgcctgctggggcaaaccagcgtggaccgcttgctgcaactctctcagggccaggcggtgaagggcaatcagctgttgcccgtctcactggtgaaaagaaaaaccaccctggcgcccaatacgcaaaccgcctctccccgcgcgttggccgattcattaatgcagctggcacgacaggtttcccgactggaaagcgggcaggattttgccgatttcggaaccaccatcaaacaggattttcgcctgctggggcaaaccagcgtggaccgcttgctgcaactctctcagggccaggcggtgaagggcaatcagctgttgcccgtctcactggtgaaaagaaaaaccaccctggcgcccaatacgcaaaccgcctctccccgcgcgttggccgattcattaatgcagctggcacgacaggtttcccgactggaaagcgggcaggattttgccgatttcggaaccaccatcaaacaggattttcgcctgctggggcaaaccagcgtggaccgcttgctgcaactctctcagggccaggcggtgaagggcaatcagctgttgcccgtctcactggtgaaaagaaaaaccaccctggcgcccaatacgcaaaccgcctctccccgcgcgttggccgattcattaatgcagctggcacgacaggtttcccgactggaaagcgggcagtga

SEQ ID NO: 13363 - DNA, 1284 bp, Homo sapiens; identical to SEQ ID NO: 7131
  SIMILAR (119)..(211): 671254mologous to Homo sapiens Human secreted protein, SEQ ID NO: 4343,accession number G00262,Smith-Waterman Score=95.

SEQ ID NO: 13364 - DNA, 1198 bp, Homo sapiens
  SIMILAR (588)..(4): 941254mologous to Cloning vector pBACe3.6 levansucrase,accession number U80929,Smith-Waterman Score=949.
atgctccgactggccattgaaactgttgctcatgactatgatgtcatagttattgacagcgcgcctaacctgggtatcgggccgattaaatgtcgaatgtgctgctgatgtgctgattgttcccacgcctgctgagttgtttgactacacttccgcactgcagtttttcgatatgtttcgtgatctgctcaagaacgttgatcttaaagggttcgagcctgatgtacgtattttgcttaccaaatacagcaatagtaatggctctcagtccccgtggatggaggagcaaattcgggatgcctggggaagcatggttctaaaaaatgttgtacgtgaaacggatgaagttggtaaaggtcagatccggatgagaactgtttttgaacaggccattgatcaacgctcttcaactgaagaggatgccggcgatgaaaaaggctatgaatcttttcgttggtttatcaaacgtgcgcacagtccatccagagggctttacagtgtacatatcaacccatatctcattcctttctttatcgggttacagaaccggtttacgcagtttcggcttagtgaaacaaaagaaatcaccaatctgtatgccatgcgtttatacgaatccctgtgtcagtatcgtaagccggatggctcaggcatcgtctctctgaaaatcgagtggatcatagagcgttaccagctgcctcagagttaccagtgtatgcgtgacttccgccgccgcttcctgcagctccacacttgttgtctggtgggtaattcatcaccaagctctctgtgcttgattagagaacgcatcctagagtcttatattgttcttgaggagaaggagggcagtggaaaagagagggaaggtatggaaggactcttgtccaaacggaacaacactcaccctatctggggctatctttttatttataagggattttgccgatttcggaacccccatcacacaggattttcgcctgctggggcaaaccagcgtggaccgcttgctgcatctctctcagggccaggcggtaaagggcaatcagctgttgcccgtctcactggtgaaaagaaaaaccaccctggcgcccaatacgcaaaccgcctctccccgcgcgttggccgattcattaatgcagctggcacgacaggtttcccgactggaaagcggacagtgagcgcaacgcaattaatgtga

SEQ ID NO: 13365 - DNA, 2710 bp, Homo sapiens
  SIMILAR (1)..(228): 941254mologous to Homo sapiens Alzheimer's disease protein encoded by DNA from plasmid pGCS2232,accession number W21578,Smith- Waterman Score=392.
atgaagcgtgcgcctgttattccaaaacatacgctcaatactcaaccggttgaagatacttcgttatcgacaccagctgccccgatggtggattcgttaattgcgcgcgtaggagtaatggctcgcggtaatgccattactttgcctgtatgtggtcgggatgtgaagtttactcttgaagtgctccggggtgatagtgttgagaagacctctcgggtatggtcaggtaatgaacgtgaccaggagctgcttactgaggacgcactggatgatctcatcccttcttttctactgactggtcaacagacaccggcgttcggtcgaagagtatctggtgtcatagaaattgccgatgggagtcgccgtcgtaaagctgctgcacttaccgaaagtgattatcgtgttctggttggcgagctggatgatgagcagatggctgcattatccagattgggtaacgattatcgcccaacaagtgcttatgaacgtggtcagcgttatgcaagccgattgcagaatgaatttgctggaaatatttctgcgctggctgatgcggattttgccgatttcggaaccaccatcaaacaggattttcgcctgctggggcaaaccagcgtggaccgcttgctgcaactctctcagggccaggcgggttttacagacagccctcattacagtgatcacttgaatgacagtcgattaggagcccatgaaggcttgtccccaacacctttcatgaactcaaatctgatggtggactcttgttccaaactggaacaacactcaaccctatctcgggctattcttttgatttataagggattttgccgatttcggaaccaccatcaaacaggattttcgcctgctggggcaaaccagcgtggaccgcttgctgcaactctctcagggccaggcggtgaagggcaatcagctgttgcccgtctcactggtgaaaagaaaaaccaccctggcgcccaatacgcaaaccgcctctccccgcgcgttggccgattcattaatgcagctggcacgacaggtttcccgactggaaagcgggcagtgagcgcaacgcaattaattcaggcaccgtgtatgaaatctaacaatgcgctcatcgtcatcctcgggcaccgtcacctgggatgtggtaggcataggcttggttatgccggtacgccgggccttcttgcgggatatcgtccattccgacagcatcgccagtcactatggcgtgctgctagcgctatatgcgttgatgcaatttctatgcgcacccgttctcggagcactgtccgaccgctttggccgccgcccagtcctgctcgcttcgctacttggagccactatcgactacgcgatcatggcgaccacacccgtcctgtggatctacccactattgactgtcagctgtccttgctccaggatgctgtttttgacaacggatgttttattgcctttgatgttcattaagaagcttggcgcaaatgttgcctttttatcctcgaagcaagcctctgtttgtcatgtagcttgtgataaccccactgttgcctttggcttgcggcactgcgaagtgagaaaacacaaagccattgttcaaaatctggaaagtccagaaaacggtggttcggaaagtggcacttactcatctccccccctggagacaaccgtgcccccccctgccccagggctcccccgggcccctggccagggcttctttgttgttcaccggctggggtatgggccaggtctttgtaagcagaaacacactccctccctaatgtcggtggagccagaacaattttgcctacacctggtttcaaaggctctcgacggagagtacaagttgcagcgcctcaaacgctcggaattgaactggaccctctggcaaaagaacaaaaaccattttgttcactttgccattcctgtgtacctggtattccaggatctggctctcaacgggctacgtgctttgctcgtgcaaggtaacgacccccagggatcagcctcaatgtatcacggatgggtaccagattttcatattcatgcagaagacactctcctgcctttctatcctggggaaaaggacgatgtcacttatgcaataaagcccacttgctggcccgggcttgacattattccttcctgtctggctctgcaccgtattgaaactgagttactgggcaaatttgatgaaggtaaactgcccacccatccacacctgatgctccgactggccattgaaactgttgctcatgactatgatgtcatagttattgacagcgcgcctaacctgggtatcggcacgattaatgtctccttagaagaagtgtgtgacctgctgcacgcggctcctttccagaacatcttgccgcgagtccatgtgaaagtgaaaaactggacaggacgtatggatcagctgttttcagactcggaccttttgctgaggggacggaagcaagtgagggattttgccgatttcggaaccaccatcaaacaggattttcgcctgctggggcaaaccagcgtggaccgcttgctgcaactctctcagggccaggcggtgaagggcaatcagctgttgcccgtctcactggtgaaaagaaaaaccaccctggcgcccaatacgcaaaccgcctctccccgcgcgttggccgattcattaatgcagctggcacgacaggtttcccgactggaaagcgggcagtga

SEQ ID NO: 13366 - DNA, 2937 bp, Homo sapiens
  SIMILAR (2065)..(2157): 1001254mologous to Homo sapiens Human secreted protein, SEQ ID NO: 6811,accession number G02730,Smith-Waterman Score=166.
atgaagcgtgcgcctgttattccaaaacatacgctcaatactcaaccggttgaagatacttcgttatcgacaccagctgccccgatggtggattcgttaattgcgcgcgtaggagtaatggctcgcggtaatgccattactttgcctgtatgtggtcgggatgtgaagtttactcttgaagtgctccggggtgatagtgttgagaagacctctcgggtatggtcaggtaatgaacgtgaccaggagctgcttactgaggacgcactggatgatctcatcccttcttttctactgactggtcaacagacaccggcgttcggtcgaagagtatctggtgtcatagaaattgccgatgggagtcgccgtcgtaaagctgctgcacttaccgaaagtgattatcgtgttctggttggcgagctggatgatgagcagatggctgcattatccagattgggtaacgattatcgcccaacaagtgcttatgaacgtggtcagcgttatgcaagccgattgcagaatgaatttgctggaaatatttctgcgctggctgatgcggaaaatatttcacgtaagattattacccgctgtatcaacaccgccaaattgcctaaatcagttgttgctcttttttctcacccctgggattttgccgatttcggaaccaccatcaaacaggattttcgcctgctggggcaaaccagcgtggaccgcttgctgcaactctctcagggccaggcggtgaagggcaatcagctgttgcccgtctcactggtgaaaagaaaaaccaccctggcgcccaatacgcaaaccgcctctccccgcgcgttggccgattcattaatgcagctggcacgacaggtttcccgactggaaagcgggcaggattttgccgatttcggaaccaccatcaaacaggattttcgcctgctggggcaaaccagcgtggaccgcttgctgcaactctctcagggccaggcggtgaagggcaatcagctgttgcccgtctcactggtgaaaagaaaaaccaccctggcgcccaatacgcaaaccgcctctccccgcgcgttggccgattcattaatgcagctggcacgacaggtttcccgactggaaagcgggcaaagcagggttcatagccattcactgggccctctcccaacaaccacgactgggagcttgattaaccaaaaaaaagggggtgtttctggagggccgggttccaaggaacaggcagaaatcagttgtcttaaagaaaggaaagatctgggtttgggtatcctaggttccacagttggaattctgaaggtaaaacatcagggtgcatctaccaaacagggtcattctcaggatttgattaagattttgctatcggatacttcgttatcgacaccagctgccccgatggtggattcgttaattgcgcgcgtaggagtaatggctcgcggtaatgccattactttgcctgtatgtggtcgggatgtgaagtttactcttgaagtgctccggggtgatagtgttgagaagacctctcgggtatggtcaggtaatgaacgtgaccaggagctgcttactgaggacgcactggatgatctcatcccttcttttctactgactggtcaacagacaccggcgttcggtcgaagagtatctggtgtcatagaaattgccgatgggagtcgccgtcgtaaagctgctgcacttaccgaaagtgattatcgtgttctggttggcgagctggatgatgagcagatggctgcattatccagattgggtaacgattatcgcccaacaagtgcttatgaacgtggtcagcgttatgcaagccgattgcagtatatgaatttgctgcccatatttctgcgctggctgatgcggaaaatatttcacgatgaacatggagtgcctcaggaccagcaggaggaagagccaatttctgaaaccataatagaagaagaaattcccagtatcaactctgatttaggaaatgaattgtattttgttaaactacccaagtttctcagtatagaacccaaggattttgccgatttcggaaccaccatcaaacaggattttcgcctgctggggcaaaccagcgtggaccgcttgctgcaactctctcagggccaggcggtgaagggcaatcagctgttgcccgtctcactggtgaaaagaaaaaccaccctggcgcccaatacgcaaaccgcctctccccgcgcgttggccgattcattaatgcagctggcacgacaggtttcccgactggaaagcgggcaacctcactctacggacagtgccacacatagaaagatgactctgtcacttgcagataggtgttcaaagacacagaagattagaatcttgccaatggctggtcgtgatcctgaatgccaacgcacagaaatgattaagagttcggacctcatggcagagataattcaggaacacaaagaagatcagctccctgaattggaacagctagagcacattggactgttcagtcatgcagagattaaggctatcattaagaaggcttctgatctacagtacagaatccaggaaagagcccttttcaaggacgactttatcaattatgttttacatgaaattcctcttttcgaacagatccagagaagaacacgcattggatattcattaaagcacggtatacgtgctgtcaaagcaaccatagtacgcgccctgtacgggcgcattaagcccgcgggtgtggtggttacgcgcagcgtgcccgctacacttgccagcgccctagcgcccgctcctttcgctttcttcctttcttttctcgccacgttcgccggctttcccgtcaagtttaaatcgggggctcctttagggttccgatttagtgctttacggcacctcgaccccaaaaaacttgatttgggtgatggttcacgtagtgggccatcgccctga

SEQ ID NO: 13367 - DNA, 5889 bp, Homo sapiens
  SIMILAR (34)..(345): 281254mologous to Globodera tabacum solanacearum beta-1,4- endoglucanase 2 precursor,accession number AF182393,Smith-Waterman Score=102.
atgaaactcatggaaacacttaaccagtgcataaacgctggtcatgaaatgacgaaggctatcgccattgcacagtttaatgatgacagcccggaagcgaggaaaataacccggcgctggagaataggtgaagcagcggatttagttggggtttcttctcaggctatcagagatgccgagaaagcagggcgactaccgcacccggatatggaaattcgaggacgggttgagcaacgtgttggttatacaattgaacaaattaatcatatgcgtgatgtgtttggtacgcgattgcgacgtgctgaagacgtatttccaccggtgatcggggttgctgcccataaaggtggcgtttacaaaacctcagtttctgttcatcttgctcaggatctggctctgaaggggctacgtgttttgctcgtggaagtttctgttcatcttgctcaggatctggctctgaaggggctacgtgttttgctcgtggaaggtaacgacccccagggaacagcctcaatgtatcacggatgggtaccagatcttcatattcatgcagaagacactctcctgcctttctatcttggggaaaaggacgatgtcacttatgcaataaagcccacttgctggccggggcttgacattattccttcctgtctggctctgcaccgtattgaaactgagttaatgggcaaatttgatgaaggtaaactgcccaccgatccacacctgatgctccgactggccattgaaactgttgctcatgactatgatgtcatagttattgacagcgcgcctaacctgggtatcggcacgattaatgtcgtatgtgctgctgatgtgctgattgttcccacgcctgctgagttgtttgactacacctccgcactgcagtttttcgatatgcttcgtgatctgctcaagaacgttgatcttaaagggttcgagcctgatgtacgtattttgcttaccaaatacagcaatattgatggcctgctggcctgccggggctgccgggattttgccgatttcggaaccaccatcaaacaggattttcgcctgctggggcaaaccagcgtggaccgcttgctgcaactctctcagggccaggcggtgaagggcaatcagctgttgcccgtctcactggtgaaaagaaaaaccaccctggcgcccaatacgcaaaccgcctctccccgcgcgttggccgattcattaatgcagctggcacgacaggtttcccgactggaaagcgggcaagtaaaactgggggcatgcaacaagatcacttttaggactgcacttctggcaggaggagcgactcaagccttcgcgaaagaaaataaccaaaaagcatacaaagaaacgtacggcgtctctcatattacacgccatgatatgctgcagatccctaaacagcagcaaaacgaaaaataccaagtgcctcaattcgatcaatcaacgattaaaaatattgagtctgcaaaaggacttgatgtgtgggacagctggccgctgcaaaacgctgacggaacagtagctgaatacaacggctatcacgttgtgtttgctcttgcgggaagcccgaaagacgctgatgacacatcaatctacatgttttatcaaaaggtcggcgacaactcaatcgacagctggaaaaacgcgggccgtgtctttaaagacagcgataagttcgacgccaacgatccgatcctgaaagatcagacgcaagaatggtccggttctgcaacctttacatctgacggaaaaatccgtttattctacactgactattccggtaaacattacggcaaacaaagcctgacaacagcgcaggtaaatgtgtcaaaatctgatgacacactcaaaatcaacggagtggaagatcacaaaacgatttttgacggagacggaaagggagtctttagagtcccccaatggattaaagacttaaatgtaggggggtctttagagtcgccctacgagcatgcaagtctgagtccgaatgaaatggattccgtgagcatccttggtggtattttggcagaggagcctcaccacgtggccactgccaccacaagcccacaggtagtactgccagtctactgccagtgttcccttaaggcccaagaaatacaaactaccatcagagaatactacaaacacctctacgcaaataaactagaaaatctagaagaaatggataaattcctcgacacatacactctcccaagactaaaccaggaagaagttgaatctctgaatagaccaaaaacaggatctgaaattgtggcaataatcaatagtttaccaaccaaaaagagtccaggaccagatggattcacagccgaattctaccagagggattttgccgatttcggaaccaccatcaaacaggattttcgcctgctggggcaaaccagcgtggaccgcttgctgcaactctctcagggccaggcggtgaagggcaatcagctgttgcccgtctcactggtgaaaagaaaaaccaccctggcgcccaatacgcaaaccgcctctccccgcgcgttggccgattcattaatgcagctggcacgacaggtttcccgactggaaagcgggcaggattttgccgatttcggaaccaccatcaaacaggattttcgcctgctggggcaaaccagcgtggaccgcttgctgcaactctctcagggccaggcggtgaagggcaatcagctgttgcccgtctcactggtgaaaagaaaaaccaccctggcgcccaatacgcaaaccgcctctccccgcgcgttggccgattcattaatgcagctggcacgacaggtttcccgactggaaagcgggcactggccgctgcaaaacgctgacggaacagtagctgaatacaacggctatcacgttgtgtttgctcttgcggaaagcccgaaagacgctgatgacacatcaatctacatgttttatcaaaaggtcggcgacaactcaatcgacagctggaaaaacgcgggccgtgtctttaaagacagcgataagttcgacgccaacgatccgatcctgaaagatcagacgcaagaatggtccggttcttgcaccctttacatttgacggaaaaatccgtttattttacattgactattccggtaaacattccggcaaccaaagcctgacatcagcgcaggtaaatgtgtcaaaatctgatgacacactcaaaatcaacggagtggaagatcacaaaacgatttttgacggagacggaaaaacatatcagaacgttcagcagtttatcgatgaaggcaattatacatccggcgacaaccatacgctgagagaccctcactacgttgaagacaaaggccataaatgccttgtattcgaagccaacacgggaacagaaaacggataccaaggcgaagaatctttatttaacaaagcgtactacggcggcggcacgaacttcttccgtaaagaaagccagaagcttcagcagagcgctaaaaaacgcgatgctgagttagcgaacggcgccctcggtatcatagagttaaataatgattacacattgaaaaaagtaatgaagccgctgatcacttcaaacacggtaactgatgaaatcgagcgcgcgaatgttttcaaaatgaacggcaaatggtacttgttcactgattcacgcggttcaaaaatgacgatcgatgggccaaatattatacgcaaggggaacaaggtgtttatgtcgctggcgattcaggttcatcatgccgtttgtgatggattccatgtcggcagaatgcttaatatattacaacagtatgatgatgagtggcaggtggactcttgttccaaactggaacaacactcaaccctatctcgggctattcttttgatttataagggattttgccgatttcggaaccaccatcaaacaggattttcgcctgctggggcaaaccagcgtggaccgcttgctgcaactctctcagggccaggcggtgaagggcaatcagctgttgcccgtctcactggtgaaaagaaaaaccaccctggcgcccaatacgcaaaccgcctctccccgcgcgttggccgattcattaatgcagctggcacgacaggtttcccgactggaaagcggccaagtgagcgcaacgcaattaatcatcatgaagtgtgatattgacatcaggaaggacctctatgctaacaatgtcttatcagggggcaccactatgtaccctggcattgccgaccgaatgcagaaggagatcacggccctagcacccagcaccatgaagatcaagaaaaagttagctgctatgcctgaccatacagatgtttccctaagcccagaagagcgagtccgtgccctaagcaagcttggttgtaatatcaccatcagtgaagacatcactccacgacgttactttagaattttgttaggcacaatcttagttaaagagttaccagaaatggggcttggtctttccttaactataaatatggtaacttacaagttgaaggaagtcccgtcatcaaaaattaaatctctaagagacaaacggggaggggcaaggacacgggggaaggggccgccaaaaacgagcctagaaggggggggggggacagggaaagagcccgaaaggaccaatgccagcagaggcggctgccggccggtcattatcatcatcatcatcatcatcaaatcatttcatcaccatcagaaatgcttatacattatcctgatgtataccaaagctactgtttggaaagaaactaaaataaaagtccagaaggctatcgccattgcacagtttaatgatgacagcccgaaagcgaggaaaataccccggcgctggagaataggtgaagcagcggatttagttggggtttcttctcaggctatcagagatgccgagaaagcagggcgactaccgcacccggatatggaaattcgaggacgggttgagcaacgtgttggttatacaattgaacaaattaatcatatgcgtgatgtgtttggtacgcgattgcgacgtgctgaagacgtatttccaccggtgatcggggttgctgcccataaaggtggcgtttacaaaacctcagtttctgttcatcttgctcaggatctggctctgaaggggctacgtgttttgctccgtggaagggattttgccgatttcggaaccaccatcaaacaggattttcgcctgtggggcaaaccagcgtggaccgcttgctgcaactctctcagggccaggcggtgaagggcaatcagctgttgcccgtctcactggtgaaaagaaaaaccaccctggcgcccaatacgcaaaccgcctctccccgcgcgttggccgattcattaatgcagctggcacgacaggtttcccgactggaaagcgggcacagcaaaacgaaaaataccaagtgcctcaattcgatcaatcaacgattaaaaatattgagtctgcaaaaggacttgatgtgtgggacagctggccgctgcaaaacgctgacggaacagtagctgaatacaacggctatcacgttgtgtttgctcttgcgggaagcccgaaagacgctgatgacacatcaatctacatgttttatcaaaaggtcggcgacaactcaatcgacagctggaaaaacgcgggccgtgtctttaaagacagcgataagttcgacgccaacgatccgatcctgaaagatcagacgcaagaatggtccggttctgcaacctttacatctgacggaaaaatccgtttattctacactgactattccggtaaacattacggcaaacaaagcctgacaacagcgcaggtaaatgtgtcaaaatctgatgacacactcacaatcaacggagtggaagatcacaaaacgatttttgacggagacggaaaggggatcttctag

SEQ ID NO: 13368 - DNA, 6890 bp, Homo sapiens
  SIMILAR (784)..(960): 831254mologous to Homo sapiens reverse transcriptase homolog= pol {retroviral element},accession number S61069,Smith-Waterman Score=239.
tcactgcccgctttccagtcgggaaacctgtcgtgccagctgcattaatgaatcggccaacgcgcggggagaggcggtttgcgtattgggcgccagggtggtttttcttttcaccagtgagacgggcaacagctgattgcccttcaccgcctggccctgagagagttgcagcaagcggtccacgctggtttgccccagcaggcgaaaatcctgtttgatggtggttccgaaatcggcaaaatcctgcccgctttccagtcgggaaacctgtcgtgccagctgcattaatgaatcggccaacgcgcggggagaggcggtttgcgtattgggcgccagggtggtttttcttttcaccagtgagacgggcaacagctgattgcccttcaccgcctggccctgagagagttgcagcaagcggtccacgctggtttgccccagcaggcgaaaatcctgtgtgatggtggttccgaaatccggaaaatccggcgtatttgcatcttcagcgcacatccattcaccccagtcgctccctgcattcacattgttgcctttggcttgcggcactgcgaagtgagagtaagtgaatgtcacatcgtttggatcaagacccatttgcagcacaagccctgttttgttcagcggcttgtaagggccggttaaagagtttgatacataaccaagcatgtaaatatcgtttgagttaataccatcgatcgtcatttttgaaccgcgtgaatcagtgaacaagtaccatttgccgttcattttgaaaacattcgcgcgctcgatttcatcagttaccgtgtttgaagtgatcagcggcttcattacttttttcaatgtgtaatcattatttaactctatgataccgagggcgccgttcgctaactcagcatcgcgttttttagcgctctgctgaagcttctggctttctttacggaagaagttcgtgccgccgccgtagtacgctttgttaaataaagattcttcgccttggtatccgttttctgttcccgtgttggcttcgaatacaaggtatttatggcctttgtcttcaacgtagtgagggtctctcagcgtttgggtgtccgccggtgtattattgccttcatcgataaactggcggaccgttctgatttgtttttttcgtccgccgtcaaaaaatcggtttggggaatcttcacctccctgcccgctttccagtcgggaaacctgtcgtgccagctgcattaatgaatcggccaacgcgcggggagaggcggtttgcgtattgggcgccagggtggtttttcttttcaccagtgagacgggcaacagctgattgcccttcaccgcctggccctgagagagttgcagcaagcggtccacgctggtttgccccagcaggcgaaaatcctgtttgatggtggttccgaaatcggcaaaatccctctagttctttctctttcatatccagttctcgtttctttttatttaaggtatccaagtgttctttttgtttttcttcataatgtcgtttccctcgtttttggttatccacttcagaatcagcaaggtttaattcatcctgaatcgccagcggcatcagcaccttgtcgccttgcgtataatatttgcccatggtgaaaacgggggcgaagaagttgtccatattggccacgtttaaatcaaaactggtgaaactcacccagggattggctgagacgaaaaacatattctcaataaaccctttagggaaataggccaggttttcaccgtaacacgccacatcttgcgaatatatgtgtagaaactgccggaaatcgtgcgggtattcacgtctctcattggccatacggacttcgggagagcattcatccagcgggtcaagaatgtggaagaaaggcgggttaaaactcagggctaatattctttcagggcttttataaagccggaaaaaccagccgacggtcttggtaaagggctttgtagcacctgcttttttcaatgtgtaatcattatttaactctatgataccgagggcgccgttcgctaactcagcatcgcgttttttagcgctctgctgaagcttctggctttctttacggaagaagttcgtgccgccgccgtagtacgctttgttaaataaagattcttcgccttggtatccgttttctgttcccgtgttggcttcgaatacaaggtatttatggcctttgtcttcaacgtagtgagggtctctcagcgtatggttgtcgccggatgtataattgccttcatcgataaactgctgaacgttctgatatgtttttccgtctccgtcaaaaatcgttttgtgatcttccactccgttgattttgagtgtgtcatcagattttgacacatttacctgcgctgttgtcaggctttgtttgccgtaatgtttaccggaatagtcagtgtagaataaacggatttttccgtcagatgtaaaggttgcagaaccggaccattcttgcgtctgatctttcaggatcggatcgttggcgtcgaacttatcgctgtctttaaagacacggcccgcgtttttccagctgtcgattgagttgtcgccgaccttttgataaaacatgtagatggatgtgtcatcagcgtctttcgggtgcccgctttccagtcgggaaacctgtcgtgccagctgcattaatgaatcggccaacgcgcggggagaggcggtttgcgtattgggcgccagggtggtttttcttttcaccagtgagacgggcaacagctgattgcccttcaccgcctggccctgagagagttgcaacaagcggtccacgctggtttgccccagcaggcgaaaatcctgtttgatggtgggtccgaaatcggcaaaatccattaattgcgttgcgctcactgcccgctttccagtcgggaaacctgtcgtgccagctgcattaatgaatcggccaacgcgcggggagaggcggtttgcgtattgggcgccagggtggtttttcttttcaccagtgagacgggcaacagctgattgcccttcaccgcctggccctgagagagttgcagcaagcggtccacgctggtttgccccagcaggcgaaaatcctgtttgatggtggttccgaaatcggcaaaatcccgtaagcttgggtttggttccagaattggctactggagtggaagatgggaggtccgtggactcagtgtcagaagacaaatttactcgtgtctgatttactgaaatggtatctgctccactttcagatcctgattccagatctgcccgctttccagtcgggaaacctgtcgtgccagctgcattaatgaatcggccaacgcgcggggagaggcggtttgcgtattgggcgccagggtggtttttcttttcaccagtgagacgggcaacagctgattgcccttcaccgcctggccctgagagaattgcagcaagcggtccacgctggtttgccccagcaggcgaaaatcctgtttgatggggggttccgaaatcggcaaaatcctgcccgctttccagtcgggaaacctgtcgtgccagctgcattaatgaatcggccaacgcgcggggagaggcggtttgcgtattgggcgccagggtggtttttcttttcaccagtgagacgggcaacagctgattgcccttcaccgcctggccctgagagagttgcagcaagcggtccacgctggtttgccccagcaggcgaaaatcctgtttgatggtggttccgaaatcggcaaaatcctgcccgctttccagtcgggaaacctgtcgtgccagctgcattaatgaatcggccaaaatacgtacatcaggcggtttgcgtattgggcgccagggtggtttttcttttcaccagtgagacgggcaacagctgattgcccttcaccgcctggccctgagagagttgcagcaagcggtccacgctggtttgccccagcaggcgaaaatcgacattaatcgtgccgatacccaggttaggcgcgctgtcaataactatgacatcatagtcatgagcaacagtttcaatggccagtcggagcatcaggtgtggatcggtgggcagtttaccttcatcaaatttgcccattaactcagtttcaatacggtgcagagccagacaggaaggaataatgtcaagccccggccagcaagtgggctttattgcataagtgacatcgtccttttccccaagatagaaaggcaggagagtgtcttctgcatgaatatgaagatctggtacccatccgtgatacattgaggctgttccctgggggtcgttaccttccacgagcaaaacaccgtaacccctccccatgggtccctcccacaacacgtgggcattctggaagatacaattcaagttgagatttggtggggacacagctaaccatatcacaggcccggaggcattaattggcgttgcgctcactgcccgcttttcagtcgggaaacctgtcgtgccagctgcattaatgaatcggcccacgcgcggggagaaggcgtttgcgtatttggcgccacggtgggtttttcttttcaccagtgagacgggcaacagctgattgcccttcaccgcctggccctgagagagttgcagcaagcggtccacgctggtttgccccagcaggcgaaaatcctgtttgatggtggttccgaaatcggcaaaatccctgcaggaagcggcggcggaagtcaggcatacgctggtaactttgaggcagctggtaacgctctatgatccagtcgattttcagagagacgatgcctgagccatccggcttacgatactgacacagggattcgtataaacgcatggcatacggattggtgatttcttttgtttcactaagccgaaactgcgtaaaccggtttgcccgctttccagtcgggaaacctgtcgtgccagctgcattaatgaatcggccaacgcgcggggagaggcggtttgcgtattgggcgccagggtggtttttcttttcaccagtgagacgggcaacagctgattgcccttcaccgcctggccctgagagagttgcagcaagcggtccacgctggtttgccccagcaggcgaaaatcctgtttgatggtggttccgaaatcggcaaaatcccttataaatcaaaagaatagcccgagatagggttgagtgttgttccagtttggaacaagagtccaagtggaagtgacctctctgcttttcagagtgaattaatcctgaattggctaaggaaactataatagctttccccgaagcagttgtcatgtaagacaaaggtgattttcttctggacaggctatgaccatccttctttgcttctaggcctctaactaatctgaattctatacagggccctttctctagattttgtggtgtatatttcccagccctgttcatattgggaacaggcttggctgttcccaatatgggcttggctgcatcattgattgcctgatggaatgtcattggatgtgacatgagcagaggcttgatgatcacttctgttattttttctgctctcttgaattcattaattgcgttgcgctcactgcccgctttccagtcgggaaacctgtcgtgccagctggcattaatgaatcggccaacgcgcggggagaggcggtttgcgtattgggcgccagggtggtttttcttttcaccagtgagacgggcaacagctgattgcccttcaccgcctggccctgagagagttgcagcaagcggtccacgctggtttgccccagcaggcgaaaatcctgtttgatggtggttccgaaatcggcaaaatcccttgtagcattctgaggacaggtctgatttctaagaggggaaagtggtaaaactattgtccagtcctttttaagttggtggctgagcttggtgaggtgtgtttttaaaagacctttagtccgttctacttttcctgaagatggaggaccgttagggatataaaggtttgactgaatactaagagcctgaaaaactgcttggctgatttgactaataaaggctggtctgttatcagatgttgctagtctctggagcctctcaacaccattatcaatgccctctgtatatagtgtcctcattaaatctcttgaataatcttttcggattctgtcttttgcaccagtcttttctgtgtatttattcctttttctagcttttgcccttgaagcaggccataagataattctctgaccttcctctaaagtagaccataataccttcattccagcagtgccctcgttatacctgttcactctgatggttgtttcttttgctgtgcagaagctctttagtttaattagatcccatttgtcaattttggcttttggtgttttagacatgaagtccttgcccatgcctatgtcctgaatagtattgcctaggttttcttctagggtttttatggttttaggtctaacgtttaagtctttaatccatcttgaattgatttttgtataaggtttaaggaagggatccagcttcagctttctacatatggctagccagttttcccagcaccatttattaaatagggaatcctttccccattgcttgtttttctcaggtttgtcaaagatcagatagttgtagatacgcggcattatttctgagggctctgttctgttccattgatctatatctctgttttggtaccagtaccatgctgttttggttactgtagccttgtagtatagtttgaagtcaggtagtgtgatgcctccagctttgttcttttggcttaggattgacttggcgatgcgggctcttttttggttccatatgaactttaaagtatttttttccaattctgtgaagaaaggcattggtagcttgatggggatgccattgaatctgtaaattaccttgggcagtatggccat

SEQ ID NO: 13369 - DNA, 5440 bp, Homo sapiens
  SIMILAR (1122)..(997): 881254mologous to Homo sapiens Human secreted protein, SEQ ID NO: 7217,accession number G03136,Smith-Waterman Score=187.
atgaacatgaacatcaaaaaaattgtaaaacaagccacagttctgacttttacgactgcacttctggcaggaggagcgactcaagccttcgcgaaagaaaataaccaaaaagcatacaaagaaacgtacggcgtctctcatattacacgccatgatatgctgcagatccctaaacagcagcaaaacgaaaaataccaagtgcctcaattcgatcaatcaacgattaaaaatattgagtctgcaaaaggacttgatgtgtgggacagctggccgctgcaaaacgctgacggaacagtagctgaatacaacggctatcacgttgtgtttgctcttgcgggaagcccgaaagacgctgatgacacatcaatctacatgttttatcaaaagggattttgccgatttcggaaccaccatcaaacaggattttcgcctgctggggcaaaccagcgtggaccgcttgctgcaactctctcagggccaggcggtgaagggcaatcagctgttgcccgtctcactggtgaaaagaaaaaccaccctggcgcccaatacgcaaaccgcctctccccgcgcgttggccgattcattaatgcagctggcacgacaggtttcccgactggaaagcgggcagtgagcgcaacgcaattaataaccagtgccaaaagagaaaagaagaagaggggacagacaagaacaccaacaaccatgcaggaacaccgagggcacggccctgagggtgtgggccgcacgggatcaaactctttaaccggccctgacgagccgctgaacaaaacagggcttgtgctgcaaatgggtcttgatccaaacgatgtgacaaacaattactctcacttcgcagtgccgcaagccaaaggcaacaataaaaaaatcacaagaaacatgacaaacagaggcttcttcgaggataaaaaggcaacatttgcgccaagcttcttaatgaacatcaaaggcaataaaacatccgttgtcaaaaacagcatcctggagcaaaacactggggttgggggcggggtgccggagaggggggccaacggccctgaaaagacgggtgattccgcccctgggccgtgggaagaccgcggttctttgaatagtggactccttgttccagagactggacaaaaccaccgaaccctatcccggggctattctgtggaaataataaggattatgcccgatttcggaaccaccatcaaacaggattttcgcctgcgggggcaaaccagcgtggaccgcttgctgcaactctctcagggccaggcggtgaagggcaatcagctgttgcccgtctcactggtgaaaagaaaaaccaccctggcgcccaatacgcaaaccgcctctccccgcgcgttggccgattcattaatgcagctggcacgacaggtttcccgactggaaagcgggcaggattttgccgatttcggaaccaccatcaaacaggattttcgcctgctggggcaaaccagcgtggaccgcttgctgcaactctctcagggccaggcggtgaagggcaatcagctgttgcccgtctcactggtgaaaagaaaaaccaccctggcgcccaatacgcaaaccgcctctccccgcgcgttggccgattcattaatgcagctggcacgacaggtttcccgactggaaagcgggcagtgagcgcaacactggggggcactctaagtcaaggtacgttgtgactcttgctgacgctcagatacacagctatggtaaatttggggaaaataagagcaaatttcatggttcccagcttttgttacagagggcctactcaagaactcaggacaatagagaatgtcagaaaggtgagagggcatcgcagacatgggattttgccgatttcggaaccaccatcaaacaggattttcgcctgctggggcaaaccagcgtggaccgcttgctgcaactctctcagggccaggcggtgaagggcaatcagctgttgcccgtctcactggtgaaaagaaaaaccaccctggcgcccaatacgcaaaccgcctctccccgcgcgttggccgattcattaatgcagctggcacgacaggtttcccgactggaaagcgggcacaacagcagctcctgcccgacacctgggggcgggcacctcaatgggtacccggtgcctccctacgccttcttcttcccccctatgctgggtggactctccccgccaggcggtgaagggcaatcagctgttgcccgtctcactggtgaaaagaaaaaccaccctggcgcccagccaagctggatgcctctccccgcgcgttggccgattcattaatgcagctggcacgacaggtttcccgactggaaagcgggcagtgagcgcaacgcaattaatggatttttccgatttcgggaaccacccatcaaacaagcattttcgcctgctggggcaaacccagcgtggaccgcttgctgcaactctctcagggccaggcggtgaagggcaatcagctgttgcccgtctcactggtgaaaagaaaaaccaccctggcgcccaatacgcaaaccgcctctccccgcgcgttggccgattcattaatgcagctggcacgacaggtttcccgactggaaagcgggcagtgagcgcaacgcaattaatggattttgccgatttcgaaaccaccatcaaacaggattttccgctgctggggcaaaccagcgtggaccgcttgctgcaactctctcagggccagggggtgaagggcaatcagctgttgcccgtctcactggtgaaaagaaaaaccaccctggcgccccaatacgcaaaccgcctctccccgcgcgttggccgattcattaatgcagctggcacgacaggtttcccgactggaaagcgggcagaagtgggccatcgccctgatagagggtttttcgccctttgacgtggtagtccacgtttctttaatagtggatccttgttccaaactggaacaacactcaaccctatctggggctattcttttgatttataagggattttgccgatttcggaaccaccatcaaacaggattttcgcctgctggggcaaaccagcgtggaccgcttgctgcaactctctcagggccaggcggtgaagggcaatcagctgttgcccgtctcactggtgaaaagaaaaaccaccctggcgcccaatacgcaaaccgcctctccccgcgcgttggccgattcattaaatgcagctggcacgacaggtttcccgactggaaagcgggcagtgagcgcaacgcaattaatggggtcctctagagtagtacctgcaggggtgccagaaggaatagagagtgatgaagaaattaggcatttggatgaagaaataaagaaactgaatgaatccaaccttaaaattgaagcagatatgatgaaacttcagacccagaagactgcaggtgtccccgaagattgtgaagtttactctttgaattgttccgggggtgatagtgttaaaaagacctctccgggtaatgaacgtgaccagaagctgcttactgaggacgcatgggatgatttcatcctttcttttctactgattggtcacaagacacgggcgttcggtcgaagagtatctggtgtcatagaaattgccgatgggagtcgccgtcgtaaagctgctgcacttaccgaaagtgattatcgtgttctggttggcgagctggatgatgagcagatggctgcattatccagattgggtaacgattatcgcccaacaagtgcttatgaacgtggtcagcgttatgcaagccgattgcagaatgaatttgctggaaatatttctgcgctggctgatgcggaaaatatttcacgtaagattattacccgctgtatcaacaccgccaaattgcctaaatcagttgttgctcttttttctcaccccggtgaactatctgcccggtcaggtgatgcacttcaaaaagcctttacagataaagaggaattacttaagcagcaggcatctaaccttcatgagcagaaaaaagctggggtgatatttgaagctgaagaagttatcactcttttaacttctgtgcttaaaacgtcatctgcatcaagaactagtttaagctcacgacatcagtttgctcctggagcgacagtattgtataagggcgataaaatggtgcttaacctggacagtctgggcccccgtccccactggtgtggccggtctaataagcggtctggaaccacggtcccactggattgtcgatcagactaccagcgtgatgcacttcaaaaagcctttacagataaagaggaattacttaagcagcaggcatcgaaccttcatgagcagaaaaaagatagggtgatatttgaagctgaaggcagaccttcatactccaagtggcgccttaacccaaggcaaagaaggcatagtcaatggaatggggaaattcaagattccccttttcctggtttaagaaataggttctctcgcaaggccattataaatcagctctttgatctttggcagcattgcagcctcccagtttgtgtgggctctgtcaggttcactgctgcagatggaagctctggaatgcctccttcagggacttctggaaagcacagatcaagccaggcactgaagtgtgcattcatgtctcctcttagtgctctctcagtttcccagttgttgcttcttccatacaatggcagtattgaaagtacctgcatccaagatgattgtaagggtcgctacaaatgtctatataaagctctcagcacatgggattttgccgatttcggaaccaccatcaaacaggattttcgcctgctggggcaaaccagcgtggaccgcttgctgcaactctctcagggccaggcggtgaagggcaatcagctgttgcccgtctcactggtgaaaagaaaaaccaccctggcgcccaatacgcaaaccgcctctccccgcgcgttggccgattcattaatgcagctggcacgacaggtttcccgactggaaagcgggcagcagtcttccaaacagaagaaggccattcaaactgctatccgcaaaaataaagaggcaaacgcagtgctggctcggctgaacagtgagctccagcagcagctcaagggatttgccgattttcgggaaccacccatcaaacaggattttcgcctgctggggcaaaccagcgtggaccgcttgctgcaactctctcagggccaggcgatcacagaactgtgtggtgcaaagcgggttggttattttggtccaacacagttttacattgccctgaaattaattgctgcagcacaatctggcctcccggtacggatagagagtattaaatgtggaaacagctatgaccatgattacgaattcgagctcggtaccctggtgcttcctcgctcactcgagggcttcgccctgtcgctcaactgcggcgagcactactggctgtaa

SEQ ID NO: 13370 - DNA, 6014 bp, Homo sapiens
  SIMILAR (1796)..(2482): 941254mologous to Homo sapiens putative p150,accession number U93563,Smith-Waterman Score=1131.
  misc_feature (1)...(6014): n = a,t,c or g
atgaaaattcgaggacgggttgagcaacgtgttggttatacaattgaacaaattaatcatatgcgtgatgtgtttggtacgcgattgcgacgtgctgaagacgtatttccaccggtgatcggggttgctgcccataaaggtggcgtttacaaaacctcagtttctgttcatcttgctcaggatctggctctgaaggggctacgtgttttgctcgtggaaggtaacgacccccagggaacagcctcaatgtatcacggatgggtaccagatcttcatattcatgcagaagacactctcatgcctttctatcttggggaaaaggacgatgtcacttatgcaataaagcccacttgctggccggggcttgacattattccttcctgtctggctctgcaccgtattgaaactgagttaatgggcaaatttgatgaaggtaaactgcccaccgatccacacctgatgctccgactggccattgaaactgttgctcatgactatgatgtcatagttattgacagcgcgcctaacctgggtatcggcacgattaatgtcgtatgtgctgctgatgtgctgattgttcccacgcctgctgagttgtttgactacacctccgcactgcagtttttcgatatgcttcgtgatctgctcaagaacgttgatcttaaaggggattttgccgatttcggaaccaccatcaaacaggattttcgcctgctggggcaaaccagcgtggaccgcttgctgcaactctctcagggccaggcggtgaagggcaatcagctgttgcccgtctcactggtgaaaagaaaaaccaccctggcgcccaatacgcaaaccgcctctccccgcgcgttggccgattcattaatgcagctggcacgacaggtttcccgactggaaagcgggcaggattttgccgatttcggaaccaccatcaaacaggattttcgcctgctggggcaaaccagcgtggaccgcttgctgcaactctctcagggccaggcggtgaagggcaatcagctgttgcccgtctcactggtgaaaagaaaaaccaccctggcgcccaatacgcaaaccgcctctccccgcgcgttggccgattcattaatgcagctggcacgacaggtttcccgactggaaagcgggcactggaaaccaaaagcaagacgcagcaccagcgctcacctccgccgcctgccgcctgccgccagccgccgggtctggctcgccctgggctcctgccccttaccgctggagagctcgccggcgcacagggcctatgagcgaccgtcagcagtttatcgatgaaggcaattatacatccggcgacaaccatacgctgagagcgcgggtcggggtggccagggaaggggatcctctagagtcgaaccgggggtcagcacccaaaacagaaaccggataccaaggcgaagaatctttatttaacaaagcgtactacggcggcggcacgaacttcttccgtaaagaaagccagaagcttcagcagagcgctaaaaaacgcgatgctgagttagcgaacggcgccctcggtatcatagagttaaataatgattacacattgaaaaaagtaatgaagccgctgatcacttcaaacacggtaactgatgaaatcgagcgcgcgaatgttttcaaaatgaacggcaaatggtacttgttcactgattcacgcggttcaaaaatgacgatcgatggtattaactcaaacgatatttacatgcttggttatgtatcaaactctttaaccggcccttacaagccgctgaacaaaacagggcttgtgctgcaaatgggtcttgatccaaacgatgtgacattcacttactctcacttcgcagtgccgcaagccaaaggcaacaatgtggttatcacaagctacatgacaaacagaggcttcttcgaggataaaaaggcaacatttgcgccaagcttcttaatgaacatcaaaggcaataaaacgggggattttgccgatttcggaaccccccatcaaacaggattttcgcctgctggggcaaaccagcgtggaccgcttgctgcaactctctcagggccaggcggtgaagggcaatcagctgttgcccgtctcactggtgaaaagaaaaccacccctggcgcccaatacgcaaaccgcctctccccgcgcgttggccgattcattaatgcagctggcacgacaggtttcccgactggaaagcgggcaggattttgccgatttcggaaccaccatcaaacaggattttcgcctgctggggcaaaccagcgtggaccgcttgctgcaactctctcagggccaggcggtgaagggcaatcagctgttgcccgtctcactggtgaaaagaaaaaccaccctggcgcccaatacgcaaaccgcctctccccgcgcgttggccgattcattaatgcagctggcacgacaggtttcccgactggaaagcgggcaggattttgccgatttcggaaccaccatcaaacaggattttcgcctgctggggcaaaccagcgtggaccgcttgctgcaactctctcagggccaggcggtgaagggcaatcagctgttgcccgtctcactggaaaaggcagcaaagtggaaaaaccccgacggccacatggatgggctcactactaatggcgtcctggccgatgcatccacgagggggcttcaccgaggagtcccagcccggggtctggcgcgagatctctgtctgtggagatgtgtacaccttgcgagaaaccaggtcggcccagcaacgaggaaagctggattttcgcctgctggggcaaaccagcgtggaccgcttgctgcaactctctcagggccaggcggtgaagggcaatcagctgttgcccgtctcactggtgaaaagaaaaaccaccctggcgcccaatacgcaaaccgcctctccccgcgcgttggccgattcattaatgcagctggcacgacaggtttcccgactggaaagcgggcaggattttgccgatttcgaaaccacccatcaaacaggattttcgcctgctggggcaaaccagcgtggtaccgcttgctgcaaattctttccagggccagccggtgaaaggccaatcagctgttgcccgtttcactggtgaaaagaaaaaccaccctggcgcccaatacgcaaaccgcctctccccgcgcgttggccgattcattaatgcagctggcacgacaggtttcccgactggaaagcgggcacgtttttcgccctatcgacgttggagtccaccgttctcaaaaagtgaatcctggttccaaactgaaacatcacctcacccctattcggggttatcttttaatttataaggacttttgcgattttgtaaccaccatcaaacaggaatttcggcctgctgcggcaaaccagcgtggaccgcttgctgcaattctctcagggccaggcggtgaagggcaatcagctgttgcccgtctcactggtgaaaagaaaaaccaaccctggcgcccaatacgcaaaccgcctctccccgcgcgttggccgattcattaatgcagctggcacgacaggttttcccgactggaaagcgggcaagaataaaatacctaggaatccaacttacaagggatgtgaaggacctcttcaaggagaactacaaaccactgctcaaggaaataaaagaggatacaaacaaatggaagaacattccatgctcatgggtaggaagaatcaatatcgtgaaaatggccatactgccacagtgcttacggcaccctcgacccaaaaactttgatttgggtgagggttcacgaagtgggccatcgcccttatagacggtttttcgcccttgacgtttggagtccacgttctttaatagtggactcttgttccaaactggaacaacactcaaccctatctcgggctattcttttgatttataagggattttgccgatttcggaaccaccatcaaacaggattttcgcctgctggggcaaaccagcgtggaccgcttgctgcaactctctcagggccaggcggtgaagggcaatcagctgttgcccgtctcactggtgaaaagaaaaaccaccctggcgcccaatacgcaaaccgcctctccccgcgcgttggccgattcattaatgcagctggcacgacaggtttcccgactggaaagcgggcagtgagcgcaacgcaattaatagctctcctgtgccagaaatgcattattcctgccctgtcctccccctcgcagcctccaaaggctggcaaattgtcccccacggtccctgttttcaaaaatgcagctggctgtagacagtgtgacaatctaaaaacttgtcacacttcacatggatctgtcatggcggaaacagcggttatcaatcacaagaaacgtaaaaatagcccgcgaatcgtccagtcaaacgacctcactgaggcggcatatagtctctcccgggatcaaaaacgtatgctgtatctgttcgttgaccagatcagaaaatctgatggcaccctacaggaacatgacggtatctgcgagatccatgttgctaaatatgctgaaatattcggattgacctctgcggaagccagtaaggatatacggcaggcattgaagagtttcgcggggaaggaagtggttttttatcgccctgaagaggatgccggcgatgaaaaaggctatgaatcttttccttggtttatcaaacttcaagagctgtttagtctcatggccatttgggcagcagttaagatgatagcaggtagtgagaccaaagtttctggactagaacctacgtttcaggtgcatgggattgaattcaaaagattgggatttgggctaagaaatggcccttcccctaaaaccggtttttcgccctttgccgttgaagtccaccgtcctttaatagtggaattcttggtcccaactggaacaacactcaacctatcctcgggctatcttttgatttataagggattttgccgatttcggacccaccatcaaacaggattttcgcctgctggggcaaaccagcgtggaccgcttgctgcaactctctcagggccaggcggtgaagggcaatcagctgttgcccgtctcactggtgaaaagaaaaaccaccctggcgcccaatacgcaaaccgcctctccccgcgcgttggccgattcattaatgcagctggcacgacaggtttcccgactggaaagcgggcagtgagcgcaacgcaattaatcctgccaggttatctgacgctgccgtcagaaaaacaggttgatttgcagtcgtatctggaagcgaacacgccgaaagcgacgctggctgatcaggtgaactactggagcaactatccgaagttcttcgttagcctgatgaaatctttctatggcgatgccgcgcagaaagagaacaactggggctatgactggctgccgaagtgggaccagacctacgacgtcatcaagtatttcaacatgatggatgaaggcaaagtcaccggttatttctgccagggctttaacccggttgcgtccttcccggacaaaaacaaagtggtgagctgcctgagcaagctgaagtacatggtggttatcgatccgctggtgactgaaacctctaccttctggcagaaccacggtgagtcgaacgatgtcgatccggcgtctattcagactgaagtattccgtctgccttcgacctgctttgctgaagaagatggttctatcgctaactccggtcgctggttgcagtggcactggaaaggtcaggacgcgccgggcgaagcgcgtaacgacggtgaaattctggcgggtatctaccatcatctgcgcgagctgtaccagtccgaaggtggtaaaggcgtagaaccgctgatgaagatgagctggaactacaagcagccgcacgaaccgcaatctgacgaagtggctaaagagaacaacggctacgcgctggaagatctctatgacgctaatgggggatnctttagagtccaacaaagcaggcattgcaagtcctga

SEQ ID NO: 13371 - DNA, 1042 bp, Homo sapiens; identical to SEQ ID NO: 13191
  SIMILAR (533)..(895): 981254mologous to unidentified cloning vector 29kD protein essential for the replication of mini F plasmid,accession number AB015619,Smith-Waterman Score=629.

SEQ ID NO: 13372 - DNA, 1180 bp, Homo sapiens
  SIMILAR (1)..(1362): 1001254mologous to Homo sapiens YAP65 (Yes-associated protein of 65kDa MW),accession number X80507,Smith-Waterman Score=2366.
ttaagattcaaggagtccagtaactgtgcggcaaggcatactgggacagttgcctgacacctggcatcctgggttgtggccctcgtccttcactggggatgtgtttgggttactgcagaatcttccacgagcaaaacacgtagccccttcagagccagatcctggattggggaggcggttgccgccgctgctgctgacggtgtgacgttctctgttccggtcacaccacatacgttccgccattcctatgcgatgcacatgctgtatgccggtataccgctgaaagttcttgcaaagcctgatgggacataagtccatcagttcaacgggggtaccgagctcgaattcgtaatcatggtcatagctgtttcctgtatcgaagagcagacccttgcccagcacctgctccaggccactcttagggctgctgggggcaggggcatcaggaggcctggagcctgtggcctcttcctgcccgtgctctctgaggcctgtgaagggccagctagtgtgaatcactaggaattcaagtttggcagcctgcgctgttgtcaggctttgtttgccgtaatgtttaccggaatagtcagtgtagaataaacggatttttccgtcagatgtaaaggttgcagaaccggaccattcttgcgtctgatctttcaggatcggatcgttggcgtcgaacttatgcgctgtctttaaagacacggcccgcgtttttccagccttttgataaaacatgtagattgatgtgtcatcagcgtctttcgggcttcccgcaagagcaaacacaacgtgatagccgttgtattcagctactgttccgtcagcgttttgcagcggccagctgtcccacacatcaagtccttttgcagactcaatatttttaatcgttgattgatcgaattgaggcacttggtatttttcgttttgctgcagtgagacgggcaacagctgattgcccttcaccgcctggccctgagagagttgcagcaagcggtccacgctggtttgccccagcaggcgaaaatcctgtttgatggtggttccgaaatcggcaaaatcccccaaatcaattacatcagaaatctgggagtgctggggaggtttctgagttttggaagtgccccagtggcacttgagtgccagatgactcccatgggcagccacgtctaatttc

SEQ ID NO: 13373 - DNA, 1293 bp, Homo sapiens; identical to SEQ ID NO: 13196
  SIMILAR (1)..(432): 1001254mologous to Cloning vector pZC320 SopA,accession number U26464,Smith-Waterman Score=733.

SEQ ID NO: 13374 - DNA, 1341 bp, Homo sapiens; identical to SEQ ID NO: 4997
  SIMILAR (466)..(1335): 951254mologous to Homo sapiens putative p150,accession number U93572,Smith-Waterman Score=1501.
  misc_feature (1)...(1341): n = a,t,c or g

SEQ ID NO: 13375 - DNA, 735 bp, Homo sapiens; identical to SEQ ID NO: 5002
  SIMILAR (403)..(1218): 891254mologous to Homo sapiens putative p150,accession number U93569,Smith-Waterman Score=1216.

SEQ ID NO: 13376 - DNA, 1350 bp, Homo sapiens; identical to SEQ ID NO: 4998
  SIMILAR (1)..(567): 961254mologous to Cloning vector pZC320 SopB,accession number U26464,Smith-Waterman Score=911.
  misc_feature (1)...(1350): n = a,t,c or g

SEQ ID NO: 13377 - DNA, 1749 bp, Homo sapiens; identical to SEQ ID NO: 10646
  SIMILAR (1)..(561): 991254mologous to Cloning vector pZC320 SopB,accession number U26464,Smith-Waterman Score=931.

SEQ ID NO: 13378 - DNA, 783 bp, Homo sapiens; identical to SEQ ID NO: 4999
  SIMILAR (403)..(780): 921254mologous to Plasmid F Protein D,accession number M12987,Smith-Waterman Score=586.

SEQ ID NO: 13379 - DNA, 396 bp, Homo sapiens
  SIMILAR (178)..(396): 981254mologous to Plasmid ColBM-Cl139 D protein,accession number J03312,Smith-Waterman Score=368.
atggtgaaagttggaacctcttacgtgccgatcaacgtctcattttcgccaaaagttggcccagggcttcccggtatcaacagggacaccaggatttatttattctgcgaagtgatcttccgtcacaggaaggacagagaaagcgcggatctgggaagtgacggacagaacggtcccagaccctggattggggaggcggttgccgccgctgctgctgacggtgtgacgttctctgttccggtcacaccacatacgttccgccattcctatgcgatgcacatgctgtatgccggtataccgctgaaagttctgcaaagcctgatgggacataagtccatcagttcaacggaagtctacacgaaggtttttgcgctggatgtggctgcccggcaccgg

SEQ ID NO: 13380 - DNA, 515 bp, Homo sapiens
  SIMILAR (15)..(296): 1001254mologous to Cloning vector pZC320 SopA,accession number U26464,Smith-Waterman Score=485.
cgcgcctaacctggggtatcggcacgattaatgtcgtatgtgctgctgatgtgctgattgttcccacgcctgctgagttgtttgactacacctccgcactgcagtttttcgatatgcttcgtgatctgctcaagaacgttgatcttaaagggttcgagcctgatgtacgtattttgcttaccaaatacagcaatagtaatggctctcagtccccgtggatggaggagcaaattcgggatgcctggggaagcatggttctaaaaaatgttgtacgtgaaacggatgaagttggtaaagaacccccgtccaccaatacgttccgccattcctatgcgatgcacatgctgtatgccggtataccgctgaaagttctgcaaagcctgatgggacataagtccatcagttcaacggaagtctacacgaaggtttttgcgctggatgtggctgcccggcaccgggtgcagtttgcgatgccggagtctgatgcggttgcgatgctgaaacaattatcctga

SEQ ID NO: 13381 - DNA, 547 bp, Homo sapiens; identical to SEQ ID NO: 5001
  SIMILAR (1)..(603): 991254mologous to unidentified cloning vector 29kD protein essential for the replication of mini F plasmid,accession number AB015619,Smith-Waterman Score=1045.

SEQ ID NO: 13382 - DNA, 1113 bp, Homo sapiens; identical to SEQ ID NO: 5003
  SIMILAR (670)..(1098): 891254mologous to unidentified cloning vector 29kD protein essential for the replication of mini F plasmid,accession number AB015619,Smith-Waterman Score=664.

SEQ ID NO: 13383 - DNA, 873 bp, Homo sapiens; identical to SEQ ID NO: 5005
  SIMILAR (82)..(324): 1001254mologous to Plasmid F Protein D,accession number M12987,Smith-Waterman Score=407.

SEQ ID NO: 13384 - DNA, 1425 bp, Homo sapiens; identical to SEQ ID NO: 5017
  SIMILAR (106)..(8): 361254mologous to Neisseria meningitidis MC58 hypothetical protein,accession number AE002387,Smith-Waterman Score=58.

SEQ ID NO: 13385 - DNA, 1602 bp, Homo sapiens; identical to SEQ ID NO: 13207
  SIMILAR (1)..(1083): 861254mologous to Cloning vector pZC320 SopA,accession number U26464,Smith-Waterman Score=1578.

SEQ ID NO: 13386 - DNA, 1239 bp, Homo sapiens; identical to SEQ ID NO: 5007
  SIMILAR (160)..(852): 991254mologous to Homo sapiens protein-tyrosine- phosphatase,accession number X93920,Smith-Waterman Score=1193.

SEQ ID NO: 13387 - DNA, 1026 bp, Homo sapiens; identical to SEQ ID NO: 10668
  SIMILAR (1078)..(1422): 1001254mologous to Plasmid F Protein D,accession number M12987,Smith-Waterman Score=584.

SEQ ID NO: 13388 - DNA, 702 bp, Homo sapiens
  SIMILAR (355)..(699): 971254mologous to Plasmid F Protein D,accession number M12987,Smith-Waterman Score=566.
atgcctgattcagggctctctctggtttctgcagattatgtggatgatgacatgtttttccaagtcattaacctgggcacagctttggggccaaatgagaagctacatccaaaccatttaagagtctgggtgattggtgggactgacaaaggaaagaccctctgtcattgcccacggacccctagcgggggggagggtggaaggggcctgcttgtggacctactcggggctgttatcgacaatgtgcttttccgcccccaggaggacgagcaaggggatgagaataaggcccgagggaactggtccagcaaactggacttcatcctgtccatggtatttattcgagataagctcatggagcggcgtaaccgtcgcacaggaaggacagagaaagcgcggatctgggaagtgacggacagaacggtcaggacctggattggggaggcggttgccgccgctgctgctgacggtgtgattttctctgttccggtcacaccacatgcggtccgccattcctatgcgatgcacatgctgtatgccggtataccgctgaaagttctgcaaagcctgatgggacataagtccatcagttcaacggaagtctacacgaaggtttttgcgctggatgtggctgcccggcaccgggtgcagtttgcgatgccggagtctgatgcggttgcgatgctgaaacaattatcctga

SEQ ID NO: 13389 - DNA, 1281 bp, Homo sapiens; identical to SEQ ID NO: 5008
  SIMILAR (91)..(8): 751254mologous to Homo sapiens PRO0644,accession number AF090940,Smith-Waterman Score=125.

SEQ ID NO: 13390 - DNA, 751 bp, Homo sapiens
  SIMILAR (404)..(748): 1001254mologous to Plasmid F Protein D,accession number M12987,Smith-Waterman Score=584.
tcgttcatcacgcttgtttagtcgcttgcaagagctgtttgctactggcgagggtattgtttttatctcgcataagctgccggaaattcgccagattgccgatcgaattagcgtgatgcgcgacggaaccatcgccttaagcggcaaaaccagcgaactgtctaccgacgacattattcaggccatcaccccagcggtacgggaaaaatcgctctctgccagccaaaaattatggctggagttacctgggggggagactgaagccagcgtgcacgcgagcgtgggccggcaagcaaccgatgcgtcgtttgaactcaagagtgagttgcggcctaatgcagcacaactctgcatgaacgtacgggcatatggccaacgtactgtatttattcgcgataagctcatggagcggcgtaaccgtcgcacaggaaggacagagaaagcgcggatctgggaagtgacggacagaacggtcaggacctggattggggaggcggttgccgccgctgctgctgacggtgtgacgttctctgttccggtcacaccacatacgttccgccattcctatgcgatgcacatgctgtatgccggtataccgctgaaagttctgcaaagcctgatgggacataagtccatcagttcaacggaagtctacacgaaggtttttgcgctggatgtggctgcccggcaccgggtgcagtttgcgatgccggagtctgatgcggttgcgatgctgaaacaattatcctga

SEQ ID NO: 13391 - DNA, 708 bp, Homo sapiens; identical to SEQ ID NO: 13213
  SIMILAR (805)..(1557): 1001254mologous to unidentified cloning vector 29kD protein essential for the replication of mini F plasmid,accession number AB015619,Smith-Waterman Score=1309.

SEQ ID NO: 13392 - DNA, 895 bp, Homo sapiens; identical to SEQ ID NO: 5009
  SIMILAR (548)..(892): 1001254mologous to Plasmid F Protein D,accession number M12987,Smith-Waterman Score=584.

SEQ ID NO: 13393 - DNA, 840 bp, Homo sapiens
  SIMILAR (493)..(837): 1001254mologous to Plasmid F Protein D,accession number M12987,Smith-Waterman Score=584.
atgcccacctttggcaaacgatgcttaaacctttgcacgtggcttcaaaaattacctggctgggaacgcgtagctctggcggggcactctgcctccaagccaaaagggggcagtggactcacagagccgctgctcggccctccgatccctccaccccaccctgggaacgtcacgacctcctctcgccgcttctccccgttgctaatgcgcaggcgctggcgggatagcgcgccgccgagccgagaaagagaaagctctctccgccgtgaatctcgatcccacatcccgtcggctttcttcaacctctcttcccggagcgccccccaatccacgagtggcagccgcgggactgtcgcgtcggcgcccgacgccggagtcagcagggcgcaaaagcgccgttggcccagggcttcccggtatcaacagggacaccaggatttatttattctgcgaagtgatcttccgtcacaggtatttattcgcgataagctcatggagcggcgtaaccgtcgcacaggaaggacagagaaagcgcggatctgggaagtgacggacagaacggtcaggacctggattggggaggcggttgccgccgctgctgctgacggtgtgacgttctctgttccggtcacaccacatacgttccgccattcctatgcgatgcacatgctgtatgccggtataccgctgaaagttctgcaaagcctgatgggacataagtccatcagttcaacggaagtctacacgaaggtttttgcgctggatgtggctgcccggcaccgggtgcagtttgcgatgccggagtctgatgcggttgcgatgctgaaacaattatcctga

SEQ ID NO: 13394 - DNA, 1419 bp, Homo sapiens; identical to SEQ ID NO: 3349
  SIMILAR (715)..(957): 811254mologous to Mus musculus Pro-Pol-dUTPase polyprotein,accession number Y12713,Smith-Waterman Score=375.

SEQ ID NO: 13395 - DNA, 768 bp, Homo sapiens; identical to SEQ ID NO: 5011
  SIMILAR (421)..(765): 1001254mologous to Plasmid F Protein D,accession number M12987,Smith-Waterman Score=584.

SEQ ID NO: 13396 - DNA, 519 bp, Homo sapiens
  SIMILAR (1)..(201): 941254mologous to Homo sapiens putative p150,accession number U93574,Smith-Waterman Score=335.
atgagtgaactcccattcacaattgctttaaagagaataaaatacctaggaatccaacttacaagggatgtgaaggacctcttcaaggagaactacaaaccactgctcaacgaaataaaagaagacacaaacaaatgggagaacattccatgctcatggataggaagaatcaatatcgtgaaaatggccatactgcccaagaattggaaaaaactaaagttcatatggaaccaaaaaagagcccgcgttgccaagacaatcctcagccaaaagaacaaagctggaggcaccacgctacctgacttcaaactatactacaaggctacagtaaccaaaacagcatggtcgactctagaggatcccctatgcgatgcacatgctgtatgccggtataccgctgaaagttctgcaaacctgatgggacataagtccatcagttcaacggaagtctacacgaaggtttttgcgctggatgtggctgcccggcaccgggtgctagtttgcgatgccggagtctga

SEQ ID NO: 13397 - DNA, 2787 bp, Homo sapiens; identical to SEQ ID NO: 13217
  SIMILAR (841)..(1989): 741254mologous to Homo sapiens TRIP protein,accession number AJ223075,Smith-Waterman Score=1408.

SEQ ID NO: 13398 - DNA, 627 bp, Homo sapiens
  SIMILAR (280)..(624): 1001254mologous to Plasmid F Protein D,accession number M12987,Smith-Waterman Score=584.
atgtccctctgggtgcggggtccgcatgcccgcgccctccccgcagctgccggcgtccccattaatcacgcggcgctgacggcgctgatctgcgtgctggcggccacggagatccagtctgaactagcacaaggagcaagtgctgggaacagcgtccgggtacttagccccacctcaggcaccacggagccagcagggaaggacaggcctggcaagggcaagaacgcagctctcatcctactgggaaggcacattccagtatttattcgcgataagctcatggagcggcgtaaccgtcgcacaggaaggacagagaaagcgcggatctgggaagtgacggacagaacggtcaggacctggattggggaggcggttgccgccgctgctgctgacggtgtgacgttctctgttccggtcacaccacatacgttccgccattcctatgcgatgcacatgctgtatgccggtataccgctgaaagttctgcaaagcctgatgggacataagtccatcagttcaacggaagtctacacgaaggtttttgcgctggatgtggctgcccggcaccgggtgcagtttgcgatgccggagtctgatgcggttgcgatgctgaaacaattatcctga

SEQ ID NO: 13399 - DNA, 2457 bp, Homo sapiens
  SIMILAR (13)..(2082): 761254mologous to Rattus norvegicus dendrin,accession number X96589,Smith-Waterman Score=2703.
  misc_feature (1)...(2457): n = a,t,c or g
atgctggatggcccactgttctccgaggggcctgacagcccccgggagctccaggatgaggagtctggcagctgcctctgggtgcagaagtccaagctattggtgatagaagtgaagactatttcctgtcattatagtcgccgcgccccttctcgacagcccatggacttccaggccagccactgggctcgcgggttccagaaccgcacgtgtgggccgcgcccgggatccccacagccgccgccccgccggccctgggcctccagggtgctgcaggaggcgaccaactggcgggcggggcccctggccgaggtccgagctcgggagcaagagaaaaggaaagcggcgtcgcaggagcgggaggccaaggagaccgagcgaaaaaggcgcaaggctggtggggcccgacggagccccccgggtcgaccccgcccggagccccgcaacgcccctcgggtggcccagctggcagggctccctgctcccttgcggccggagcgcctggcgcctgtggggcgagcgccccgtccatccgcgcagccgcagagcgacccagggtcggcgtgggcggggccctggggaggtcggcggcccgggcccccaagctacgaggctcacctgctgctgagaggttctgccgggaccgccccacgacgccgctgggaccggccgccaccctacgtggctccaccttcttacgaaggcccccataggaccttggggactaagagaggccccgggaactctcaggtgcccacttcatcagccccagctgcgactccagccaggacagacggagggcgcacaaagaagaggctggatcctcggatctaccgggacgtcctcggggcttggggtctccgacaggggcaaggtctcttggggggatccccaggctgtggagcggccagagcaaggccagagcccggcaagggggtcgtggagaaaagcctggggctggctgctgctgacctgaacagtggtagcgacagccatccccaagccaaagctacagggagcgcaggcaccgagatagctcctgcggggtctgcaactgcggctccctgtgccccgcatcccgctcccagatccaggcaccacctcaagggctcgagggaagggaaagaaggagaacagatctggtttcccaaatgctggattccctcccctaaaaagcagccgccccgccatagccagacactccccagaccctgggctcccggaggcaccggatggagagaatctctgggtcttggagagggggcaggaccggagaccctggagggttggaaggcgacccgccgtgcccacaccttgccccgcagttcccagggcctgtcccgtggggaaggcgtctttgtcattgacgccacgtgcgtagtgatacgatcccaatatgttccaaccccccgaacccagcaggtgcagcttttgccctctggggtgacacgcgtggtgggggattcccccagccaatcgaagcccggcaaggaggagggtgaaggggccacggtctttccttccccttgtcaaaagcggctgtcgagcagtcgccttttacaccagcccggcgggggccgcgggggcgaagctgagggcgggaggccgggggactccacactggaggagcgcactttccgcatcttggggctcccggcccccgaagtaaacctgcgggacgcccccacgcagccaggtagcccagagcaccaagccttaggcccagcagcttcgggagcccagggcagagccgaggggtcggaagtggcggtggtccagcggcgcgccggccggggctgggcgcggaccccagggccctacgccggggccctgcgagaagccgtgtcccgtatccgccgccacacagcccctgactcggacacggacgaagctgaggagctcagcgtccatagcggctcctctgatggaagcgacacagaagccccgggcgcctcctggcggaatgagaggaccctgcccgaggttggaaacagttcgccagaggaagatgggaagacagcggaactgagcgacagtgtcggggagatcctagatgtcataagccaaaccgaggaggtcctcttcggngtatttattcgcgataagctcatggagcggcgtaaccgtcgcacaggaaggacagagaaagcgcggatctgggaagtgacggacagaacggtcaggacctggattggggaggcggttgccgccgctgctgctgacggtgtgacgttctctgttccggtcacaccacatacgttccgccattcctatgcgatgcacatgctgtatgccggtataccgctgaaagttctgcaaagcctgatgggacataagtccatcagttcaacggaagtctacacgaaggtttttgcgctggatgtggctgcccggcaccgggtgcagtttgcgatgccggagtctgatgcggttgcgatgctgaaacaattatcctga

SEQ ID NO: 13400 - DNA, 1434 bp, Homo sapiens; identical to SEQ ID NO: 5015
  SIMILAR (64)..(1065): 981254mologous to Homo sapiens Net,accession number Z36715,Smith-Waterman Score=1668.

SEQ ID NO: 13401 - DNA, 2311 bp, Homo sapiens
  SIMILAR (263)..(1942): 1001254mologous to Homo sapiens apoptotic protease activating factor 1,accession number AJ243048,Smith-Waterman Score=3016.
aaacaaaaaaaacatcacgaatctttcccgcttagttgtccgcccccacacagatgctgtttaccatgcctgcttttctgaggatggtcagagaatagcttcttgtggagctgataaaaccttacagctgcaggctcgggcctccggctccacagagcaggcaggaccccttccccctggtgcagctgtagctgcccaagcggtggctgcagactcaggcatccctgtactcttgggggacctggaaggaccccctgcccttgtgttcaaagctgaaacaggagagaaacttctagaaatcaaggctcatgaggatgaagtgctttgttgtgcattctctacagatgacagatttatagcaacctgctcagtggataaaaaagtgaagatttggaattctatgactggggaactagtacacacctatgatgagcactcagagcaagtcaattgctgccatttcaccaacagtagtcatcatcttctcttagccactgggtcaagtgactgcttcctcaaactttgggatttgaatcaaaaagaatgtcgaaataccatgtttggtcatacaaattcagtcaatcactgcagattttcaccagatgataagcttttggctagttgttcagctgatggaaccttaaagctttgggatgcgacatcagcaaatgagaggaaaagcattaatgtgaaacagttcttcctaaatttggaggaccctcaagaggatatggaagtgatagtgaagtgttgttcgtggtctgctgatggtgcaaggataatggtggcagcaaaaaataaaatctttctttttgacattcatactagtggcctattgggagaaatccacacgggccatcacagcaccatccagtactgtgacttctccccacaaaaccatttggcagtggttgctttgtcccagtactgtgtagagttgtggaatacagactcacgttcaaaggtggctgattgcagaggacatttaagttgggttcatggtgtgatgttttctcctgatggatcatcatttttgacatcttctgatgaccagacaatcaggctctgggagacaaagaaagtatgtaagaactctgctgtaatgttaaagcaagaagtagatgttgtgtttcaagaaaatgaagtgatggtccttgcagttgaccatataagacgtctgcaactcattaatggaagaacaggtcagattgattatctgactgaagctcaagttagctgctgttgcttaagtccacatcttcagtacattgcatttggagatgaaaatggagccattgagattttagaacttgtaaacaatagaatcttccagtccaggtttcagcacaagaaaactgtatggcacatccagttcacagccgatgagaagactcttatttcaagttctgatgatgctgaaattcaggtatggaattggcaattggacaaatgtatctttctacgaggccatcaggaaacagtgaaagactttagactcttgaaaaattcaagactgctttcttggtcatttgatggaacagtgaaggtatggaatattattactggaaataaagaaaaagactttgtctgtcaccagggtacagtactttcttgtgacatttctcacgatgctaccaagttttcatctacctctgctgacaagactgcaaagatctggagttttgatctccttttgccacttcatgaattgaggggccacaacggctgtgtgcgctgctctgccttctctgtggacagtaccctgctggcaacgggagatgacaatggagaaatcaggatatggaatgtctcaaacggtgagcttcttcatttgtgtgctccgctttcagaagaaggagctgctacccatggaggctgggtgactgacctttgcttttctccagatggcaaaatgcttatctctgctggaggatatattaaggtatttattcgcgataagctcatggagcggcgtaaccgtcgcacaggaaggacagagaaagcgcggatctgggaagtgacggacagaacggtcaggacctggattggggaggcggttgccgccgctgctgctgacggtgtgacgttctctgttccggtcacaccacatacgttccgccattcctatgcgatgcacatgctgtatgccggtataccgctgaaagttctgcaaagcctgatgggacataagtccatcagttcaacggaagtctacacgaaggtttttgcgctggatgtggctgcccggcaccgggtgcagtttgcgatgccggagtctgatgcggttgcgatgctgaaacaattatcctga

SEQ ID NO: 13402 - DNA, 606 bp, Homo sapiens
  SIMILAR (415)..(603): 1001254mologous to Plasmid F Protein D,accession number M12987,Smith-Waterman Score=313.
atggaagcgccgacagcggcggcccgggcccctgccctccccgcgcctgcgacgcggtcgcccctggggcgcccgccgggcggacagcccgtgaggcccggcaacctgggcgccgcctgggagcgaggggcccggcaggccgcgcataaaccatgctgtgatgtcacagctaccatagaactccagggtagtgttgggctggcccatgtgggctcaggggttgtagaaggtgatttagctgccatagaagcatacaagtcatcaggaggagacattgcacgtcagctcaccgcagatgaagtacgcttgctgaatcgtccttctgcctttgatgttggctatactcttgtacacttggctatacgttttcagaggcaggatatgctagcaatattgcttacagaggggaagacccattcctatgcgatgcacatgctgtatgccggtataccgctgaaagttctgcaaagcctgatgggacataagtccatcagttcaacggaagtctacacgaaggtttttgcgctggatgtggctgcccggcaccgggtgcagtttgcgatgccggagtctgatgcggttgcgatgctgaaacaattatcctga

SEQ ID NO: 13403 - DNA, 765 bp, Homo sapiens
  SIMILAR (235)..(762): 711254mologous to Plasmid F resolvase,accession number AP001918,Smith-Waterman Score=590.
atggtgccacactcaacaggcaaatcttggaacggctgtgacccaacatctgctacactggatcagctggtcactgtcttcttcatgaaactctttagcattggggatgccagaattccctgtctgggaccacggtcccactcgtatcgtcggtctgattattattctgggaccacgatccactcgtgttgtcgggctgattattggtctgggaccacggcccacttgtattgtcgatcagactatcaccctgtgccttccttcatcctggtgacctccactaccaaccaccagcctcttaaaccaagcatctcagaggcctcgtggaatcccctctttgcctccctccccacttgcagctcattactgagtcgtgttatgtccctggctaccactgtatttattcgcgataagctcatggagcggcgtaaccgtcgcacaggaaggacagagaaagcgcggatctgggaagtgacggacagaacggtcaggacctggattggggaggcggttgccgccgctgctgctgacggtgtgacgttctctgttccggtcacaccacatacgttccgccattcctatgcgatgcacatgctgtatgccggtataccgctgaaagttctgcaaagcctgatgggacataagtccatcagttcaacggaagtctacacgaaggtttttgcgctggatgtggctgcccggcaccgggtgcagtttgcgatgccggagtctgatgcggttgcgatgctgaaacaattatcctga

SEQ ID NO: 13404 - DNA, 765 bp, Homo sapiens
  SIMILAR (418)..(762): 1001254mologous to Plasmid F Protein D,accession number M12987,Smith-Waterman Score=584.
atgtggaagcgactttggagctgggtaacaggcagaggttggaacagtttggaggactcagaagaagacaagaaaatgtgggaaagtttggaacctcctagagacttgttgaatggctttgacaaaaatgctgatagtgatatgaacaataaggtccaggctgaagtagtctcagatgtaggtgaggaacttgttgggaactggagcaaagaattggttccttccattatgagcaacttgttgaattcagatgccattttctcaaacaatgaaatgagcctgtcagacattgaaatctatggcttcgattatgattacaccttggtgttttattcaaagcacctccacacgctgatatttaatgctgcacgggaccttctcatcaatgaacaccgggtatttattcgcgataagctcatggagcggcgtaaccgtcgcacaggaaggacagagaaagcgcggatctgggaagtgacggacagaacggtcaggacctggattggggaggcggttgccgccgctgctgctgacggtgtgacgttctctgttccggtcacaccacatacgttccgccattcctatgcgatgcacatgctgtatgccggtataccgctgaaagttctgcaaagcctgatgggacataagtccatcagttcaacggaagtctacacgaaggtttttgcgctggatgtggctgcccggcaccgggtgcagtttgcgatgccggagtctgatgcggttgcgatgctgaaacaattatcctga

SEQ ID NO: 13405 - DNA, 618 bp, Homo sapiens
  SIMILAR (271)..(615): 1001254mologous to Plasmid F Protein D,accession number M12987,Smith-Waterman Score=584.
atgggttacggtaaaacgttcctctccgtcctgcgccagcaatgttcctttctcaaacggcataaaattcagcgtgtcacttgccatatgcatttcgaaggacggcgagtggcgaatagcagcgcagcaattgcgcttgcagttactgcaaactggcgaagatcgttttgcccaaaggtcaacgctttgccaagttccagcgtacaggccagcgcgccaaaatgtctggcgcttgaaatgttcggacccgtatttattcgcgataagctcatggagcggcgtaaccgtcgcacaggaaggacagagaaagcgcggatctgggaagtgacggacagaacggtcaggacctggattggggaggcggttgccgccgctgctgctgacggtgtgacgttctctgttccggtcacaccacatacgttccgccattcctatgcgatgcacatgctgtatgccggtataccgctgaaagttctgcaaagcctgatgggacataagtccatcagttcaacggaagtctacacgaaggtttttgcgctggatgtggctgcccggcaccgggtgcagtttgcgatgccggagtctgatgcggttgcgatgctgaaacaattatcctga

SEQ ID NO: 13406 - DNA, 1206 bp, Homo sapiens; identical to SEQ ID NO: 5014
  SIMILAR (1)..(357): 891254mologous to Homo sapiens pot. ORF I,accession number X03145,Smith-Waterman Score=563.

SEQ ID NO: 13407 - DNA, 858 bp, Homo sapiens; identical to SEQ ID NO: 13220
  SIMILAR (1)..(438): 1001254mologous to Cloning vector pSacBII SacB,accession number U09128,Smith-Waterman Score=782.

SEQ ID NO: 13408 - DNA, 930 bp, Homo sapiens
  SIMILAR (583)..(927): 1001254mologous to Plasmid F Protein D,accession number M12987,Smith-Waterman Score=584.
atgatcatctcaacagactctgaaaaagcgtttcacaaaatccagcatccctttgtgattaaaaccctctgcaaaatcagcatacaagggacatacctaactgtaataaaagccatctgtgacaaacccacagccaacattatactgaatggggaaaagttgaaagctttccccctgagaactggaacaagacaaggatgcccactttcaccacttctattcaacgtagtactggaagtcctagccagagcaatcaaacaagagaaagaagtaaagggcatccaaatcagtaaagaggattcaaactgctactgtttgctgatttgctgctgttttctagagctagaaaaaataatcctaaaatttgtatggaaccaaaaaaggccctgcatagccaaagcaagactaagcaaaaagaacaaatctggaggcatcacattatccaagttcaaactatactacaaggctatcgttaccaaaacagcatgttggcccagggcttcccggtatcaacagggacaccaggatttatttattctgcgaagtgatcttccgtcacaggtatttattcgcgataagctcatggagcggcgtaaccgtcgcacaggaaggacagagaaagcgcggatctgggaagtgacggacagaacggtcaggacctggattggggaggcggttgccgccgctgctgctgacggtgtgacgttctctgttccggtcacaccacatacgttccgccattcctatgcgatgcacatgctgtatgccggtataccgctgaaagttctgcaaagcctgatgggacataagtccatcagttcaacggaagtctacacgaaggtttttgcgctggatgtggctgcccggcaccgggtgcagtttgcgatgccggagtctgatgcggttgcgatgctgaaacaattatcctga

SEQ ID NO: 13409 - DNA, 924 bp, Homo sapiens
  SIMILAR (463)..(921): 811254mologous to Plasmid F Protein D,accession number M12987,Smith-Waterman Score=586.
atgtctcctcagtggagtgccaagttagggtatggacctttaaccacgcatcaagcagtcactgaatgtgggctgccccagggaaaggcacatgaccttgagggaaaaggctcagaagctgaggactgtcagccagtagcacagccagccatgctttcttcaccctctctcctaacaaagcttcctggcaggagtccccttatccagtggagctggcccctcagggaccagagaaggtctgtcacagggttggatggggcattattagtggatgaatcaaccttcatcacagtgggtgagggtaacagccacctcctccttgatggtcggagccagacaacctccaccataaagcatcttgaatatatgcattcggctcggcatttagaagatgactatttggcttctgaacgttcttctgctattacatattccaaagctgtacagaaagtgtattcacaaggaagatggaaagccaagaggaaaacagttgcaatgcagcctatgccctgtgctctagcctcaaactcaccaggacttggtgttctaggacctgtatttattcgcgataagctcatggagcggcgtaaccgtcgcacaggaaggacagagaaagcgcggatctgggaagtgacggacagaacggtcaggacctggattggggaggcggttgccgccgctgctgctgacggtgtgacgttctctgttccggtcacaccacatacgttccgccattcctatgcgatgcacatgctgtatgccggtataccgctgaaagttctgcaaagcctgatgggacataagtccatcagttcaacggaagtctacacgaaggtttttgcgctggatgtggctgcccggcaccgggtgcagtttgcgatgccggagtctgatgcggttgcgatgctgaaacaattatcctga

SEQ ID NO: 13410 - DNA, 3219 bp, Homo sapiens
  SIMILAR (1)..(1080): 841254mologous to Cloning vector pZC320 SopA,accession number U26464,Smith-Waterman Score=1554.
atgaaactcatggaaacacttaaccagtgcataaacgctggtcatgaaatgacgaaggctatcgccattgcacagtttaatgatgacagcccggaagcgaggaaaataacccggcgctggagaataggtgaagcagcggatttagttggggtttcttctcaggctatcagagatgccgagaaagcagggcgactaccgcacccggatatggaaattcgaggacgggttgagcaacgtgttggttatacaattgaacaaattaatcatatgcgtgatgtgtttggtacgcgattgcgacgtgctgaagacgtatttccaccggtgatcggggttgctgcccataaaggtggcgtttacaaaacctcagtttctgttcatcttgctcaggatctggctctgaaggggctacgtgttttgctcgtggaaggtaacgacccccagggaacagcctcaatgtatcacggatgggtaccagatcttcatattcatgcagaagacactctcctgcctttctatcttggggaaaaggacgatgtcacttatgcaataaagcccacttgctggccggggcttgacattattccttcctgtctggctctgcaccgtattgaaactgagttaatgggcaaatttgatgaaggtaaactgcccaccgatccacacctgatgctccgactggccattgaaactgttgctcatgactatgatgtcatagttattgacagcgcgcctaacctgggtatcggcacgattaatgtcgtatgtgctgctgatgtgctgattgttcccacgcctgctgagttgtttgactacacctccgcactgcagtttttcgatatgcttcgtgatctgctcaagaacgttgatcttaaagggttcgagcctgatctctccagcttcgctaagcaggccctgtcccaggcccagaagtctattgacagggttctggacatccaggaagaggagccgagcatctgggccgagaccattccgtatggagagccgggtatttattcgcgatttttcatggagcggcgtaaccgtcgcacaggaaggacagagaaagcgcggatctgggaagtgacggacagaacggtcaggacctggattggggaggcggttgccgccgctgctgctgacggtgtgacgttctctgttccggtcacaccacatacgttccgccattcctatgcgatgcacatgctgtatgccggtataccgctgaaagttctgcaaagcctgatgggacataagtccatcagttcaacggaagtctacacgaaggtttttgcgctggatgtggctgcccggcaccggtgtgacaatctaaaaacttgtcacacttcacatggatctgtcatggcggaaacagcggttatcaatcacaaaaaaagtaaaaatagcccgcgaatcgtccagtcaaacgacctcactgaggcggcatatagtctctcccgggatcaaaaacgtatgctgtatctgttcgttgaccagatcagaaaatctgatggcaccctacaggaacatgacggtatctgcgagatccatgttgctaaatatgctgaaatattcggattgacctctgcggaagccagtaaggatatacggcaggcattgaagagttacgcggcgaaggaagtggttctttatcgccctgaagaggatgccggcgatgaagaaggctatgaatcttttccttggtttatcaaacgtgcgcacagtccatccagagggctttacagtgtacatatcaacccatatctcattcccttctttatcgggttacagaaccggtttacgcagtttcggcttagtgaaacaaaagaaatcaccaatccgtatgccatgcgtttatacgaatccctgtgtcagtatcgtaagccggatggctcaggcatcgtctctctgaaaatcgactggatcatagagcgttaccagctgcctcaaagttaccagcgtatgcctgacttccgccgccgcttcctgcagtgcataaacgctggtcatgaaatgacgaaggctatcgccattgcacagtttaatgatgacagcccggaagcgaggaaaataacccggcgctggagaataggtgaagcagcggatttagttggggtttcttctcaggctatcagagatgccgagaaagcagggcgactaccgcacccggatatggaaattcgaggacgggttgagcaacgtgttggttatacaattgaacaaattaatcatatgcgtgatgtgtttggtacgcgattgcgacgtgctgaagacgtatttccaccggtgatcggggttgctgcccataaaggtggcgtttacaaaacctcagtttctgttcatcttgctcaggatctggctctgaaggggctacgtgttttgctcgtggaaggtaacgacccccagggaacagcctcaatgtatcacggatgggtaccagatcttcatattcatgcagaagacactctcctgcctttctatcttggggaaaaggacgatgtcacttatgcaataaagcccacttgctggccggggcttgacattattccttcctgtctggctctgcaccgtattgaaactgagttaatgggcaaatttgatgaaggtaaactgcccaccgatccacacctgatgctccgactggccattgaaactgttgctcatgactatgatgtcatagttattgacagcgcgcctaacctgggtatcggcacgattaatgtcgtatgtgctgctgatgtgctgattgttcccacgcctgctgagttgtttgactacacctccgcactgcagtttttcgatatgcttcgtgatctgctcaagaacgttgatcttaaagggttcgagcctgatgtatttattcgcgataagctcatggagcggcgtaaccgtcgcacaggaaggacagagaaagcgcggatctgggaagtgacggacagaacggtcaggacctggattggggaggcggttgccgccgctgctgctgacggtgtgacgttctctgttccggtcacaccacatacgttccgccattcctatgcgatgcacatgctgtatgccggtataccgctgaaagttctgcaaagcctgatgggacataagtccatcagttcaacggaagtctacacgaaggtttttgcgctggatgtggctgcccggcaccgggtgcagtttgcgatgccggagtctgatgcggttgcgatgctgaaacaattatcctga

SEQ ID NO: 13411 - DNA, 1977 bp, Homo sapiens
  SIMILAR (2518)..(3291): 961254mologous to Homo sapiens FX,accession number U58766,Smith-Waterman Score=1326.
atgaaagagctgagctccacgattgccctaacttactgcctggctacagtttacaggatgcagtatgggaaacgggaatccaggcagtgtctagcagtctccatgaggtctgtcccgcagattctggccgaaatgagtactcagacacagaggccagagagcagccctgagaagctagagctccttgcttttattcagtgcaggcacaatgccaaaaacctggggccaacacaacctgtagggaatgtcatgcatggagatgatcaaagggacacgcatgaaatttggtgccatgactcggatcagggcacctcccttgggagatcaatcccttgtcctcctgctctttgctcggtgagaaagatccacctacgacctcaggtcctcagaccaaccagcccaagaaacatcacaccaatttcaaatccgagacaaaggagacacattttatccgtggacccaaaactctggcgccggtcatggactgggaaggcagccttcccttggtgtttcatcattgcagggacgcctctgattattcacccatgtttcagaggtgtcagaccatgcagggacacctggcttggtccttcacccttagcggcaagtcctgcttttctgggggaggggcaaagaataaaatacctaggaatccagcttatgagggatgtgaaggacctcttcaaggagaactacaaaccactgctcaatgaaataaaagtggacaaacacaaatggaaaaacattccatgctcatggataggaagaatcaatatcatgaaaatggccacagtgcccaaggtatttattcgcgataagctcatggagcggcgtaaccgtcgcacaggaaggacagagaaagcgcggatctgggaagtgacggacagaacggtcaggacctggattggggaggcggttgccgccgctgctgctgacggtgtgacgttctctgttccggtcacaccacatacgttccgccattcctatgcgatgcacatgctgtatgccggtataccgctgaaagttctgcaaagcctgatgggacataagtccatcagttcaacggaagtctacacgaaggtttttgcgctggatgtggctgcccggcaccggatcagaaaatctgatggcaccctacaggaacatgacggtatctgcgagatccatgttgctaaatatgctgaaatattcggattgacctctgcggaagccagtaaggatatacggcaggcattgaagagtttcgcggggaaggaagtggttttttatcgccctgaagaggatgccggcgatgaaaaaggctatgaatcttttccttggtttatcaaacgtgcgcacagtccatccagagggctttacagtgtacatatcaacccatatctcattcccttctttatcgggttacagaaccggtttacgcagtttcggcttagtgaaacaaaagaaatcaccaatccgtatgccatgcgtttatacgaatccctgtgtcagtatcgtaagccggatggctcaggcatcgtctctctgaaaatcgactggatcatagagcgttaccagctgcctcaaagttaccagcgtatgcctgacttccggcgccgcttcctgcaggtatttattcgcgataagctcatggagcggcgtaaccgtcgcacaggaaggacagagaaagcgcggatctgggaagtgacggacagaacggtcaggacctggattggggaggcggttgccgccgctgctgctgacggtgtgacgttctctgttccggtcacaccacatacgttccgccattcctatgcgatgcacatgctgtatgccggtataccgctgaaagttctgcaaagcctgatgggacataagtccatcagttcaacggaagtctacacgaaggtttttgcgctggatgtggctgcccggcaccgggtgcagtttgcgatgccggagtctgatgcggttgcgatgctgaaacaattatcctga

SEQ ID NO: 13412 - DNA, 1224 bp, Homo sapiens
  SIMILAR (945)..(1508): 981254mologous to Escherichia coli genF peptide,accession number M27058,Smith-Waterman Score=935.
atgcatgcggaagtcctagctccaacactggatggaaatgcagatgaaaaagttaggaccactcgtctaaaaccatcctgtgtccacttggctccttcccaaatgacggccaaaattctgtccctgattgagatgcaaggggaaataaagcgtgtctttattcgggtccaggctgccttggacaccctgctccagcttgagccaaggcagacacagatgcttattgagcaaggttctccctatgttcccgacacaccacactggagcctggggaccctcaagaatgcaagtccagccatcggagtccagagcgtgaaggtatttattcgcgataagctcatggagcggcgtaaccgtcgcacaggaaggacagagaaagcgcggatctgggaagtgacggacagaacggtcaggacctggattggggaggcggttgccgccgctgctgctgacggtgtgacgttctctgttccggtcacaccacatacgttccgccattcctatgcgatgcacatgctgtatgccggtataccgctgaaagttctgcaaagcctgatgggacataagtccatcagttcaacggaagtctacacgaaggtttttgcgctggatgtggctgcccggcaccgggaacatgacggtatctgcgagatccatgttgctaaatatgctgaaatattcggattgacctctgcggaagccagtaaggatatacggcaggcattgaagagtttcgcggggaaggaagtggttttttatcgccctgaagaggatgccggcgatgaaaaaggctatgaatcttttccttggtttatcaaacgtgcgcacagtccatccagagggctttacagtgtacatatcaacccatatctcattcccttctttatcgggttacagaaccggtttacgcagtttcggcttagtgaaacaaaagaaatcaccaatccgtatgccatgcgtttatacgaatccctgtgtcagtatcgtaagccggatggctcaggcatcgtctctctgaaaatcgactggatcatagagcgttaccagctgcctcaaagttaccagcgtatgcctgacttccgccgccgcttcctgcaggtctgtgttaatgagatcaacagcagaactccaatgcgcctctcatacattgagaaaaagaaaggccgccagacgactcatatcgtattttccttccgcgatatcacttccatgacgacaggatag

SEQ ID NO: 13413 - DNA, 2337 bp, Homo sapiens
  SIMILAR (1)..(918): 981254mologous to Escherichia coli genF peptide,accession number M27058,Smith-Waterman Score=1523.
atgaacatgaacatcaaaaaaattgtaaaacaagccacagttctgacttttacgactgcacttctggcaggaggagcgactcaagccttcgcgaaagaaaataaccaaaaagcatacaaagaaacgtacggcgtctctcatattacacgccatgatatgctgcagatccctaaacagcagcaaaacgaaaaataccaagtgcctcaattcgatcaatcaacgattaaaaatattgagtctgcaaaaggacttgatgtgtgggacagctggccgctgcaaaacgctgacggaacagtagctgaatacaacggctatcacgttgtgtttgctcttgcgggaagcccgaaagacgctgatgacacatcaatctacatgttttatcaaaaggtcggcgacaactcaatcgacagctggaaaaacgcgggccgtgtctttaaagacagcgataagttcgacgccaacgatccgatcctgaaagatcagacgcaagaatggtccggttctgcaacctttacatctgacggaaaaatccgtttattctacactgactattccggtaaacattacggcaaacaaagcctgacaacagcgcaggtaaatgtgtcaaaatctgatgacacactcaaaatcaacggagtggaagatcacaaaacgatttttgacggagacggaaaaacatatcagaacgttcagcagtttatcgatgaaggcaattatacatccggcgacaaccatacgctgagagaccctcactacgttgaagacaaaggccataaataccttgtattcgaagccaacacgggaacagaaaacggataccaaggcgaagaatctttatttaacaaagcgtactacggcggcggcacgaacttcttccgtaaagaaagccagaagcttcagcagagcgctaaaaaacgcgatgctgagttagcgaacggcgccctcggtatcatagagttaaataatgattacacattgaaaaaagtaatgaagccgctgatcacttcaaacacggtaactgatgaaatcgagcgcgcgaatgttttcaacatgaacggcaaatggtacttgttcactgatttcacgcggttcaaaatgacgatcgatggtattaactcaaacgatatttacatgcttggttatgtatcaaactctttaaccggcccttacaagccgctgaacaaaacaggggctgtgctgcaaatgggtcttgatcaacgatgtgacattccttactctcacttcgcaagcagtgtctcactggtaatttattacagcctgctgcatccaaaatccacagacatctggcagggctgcctaaggaagtcctgtggcattgcaggaggtgataaaacagagagaagagattctccccgggccacagatctagctgggaagagaaccgagagctcaggctcatgccaaggggcaagttatgaaccaaccattttagggaagccccctacccctgagcaggtccccccagaggctgggctggggacccaggttgctgtggaggactctttcctcagtcatcaccactggctgtgggtgaaacttgccctaaaaacaggaaatgtgtctaagatcaatgccgcctttggagataacagtcctgcctattgtccacctgcatgggggttgagtcaacaggactacctgcagagaaaggccttgtctgcccagcaagagctcccatcctcatcccgtgacccctcaaccttagagaacagctctgcgtttgaaggtgtccctaaagcagaggccgacccattggaaacctcaagttacgtatcttttgccagcgatcagcaggatgaagcacctacccagaacccagcagccacgcaggggggagggcacccaaaggaaggagctgacgctgtttctgggacacaggggaaggggacagtcaacaacagacccctgactgcagacgatgactccatcctctcgggagggacctgggggactcagcttgagaaaccagaaaagccacaaggaggctcctaccacatggtgctttgctttgccctcaaaggacagaaggacagagaaagcgcggatctgggaagtgacggacagaacggtcaggacctggattggggaggcggttgcgcgactgctgctgacggtgtgacgttctctgttccggtcacaccacatacgttccgccattcctatgcgatgcacatgctgtatgccggtataccgctgaaagttctgcaaagcctgatgggacataagtgcatcagttcaacggaagtctacacgaaggtttttgcgctggatgtggctgcccggcaccgggtgcacgtttgcgatgccggagtctga

SEQ ID NO: 13414 - DNA, 1291 bp, Homo sapiens
  SIMILAR (64)..(264): 441254mologous to Homo sapiens Human secreted protein fragment encoded from gene 42,accession number Y07785,Smith- Waterman Score=106.
atgacaaaggactctcagaacaaatgggaagtgaatcagaggaaaattaggagttcggtgatagaaaagcccagggaagtaagtgttttgagaaggaagtggttgactgtgtgggctgatgctgatcatcaggtcaaaatagatgagaacaaagaatgggccttcagtctgacacacagagctgcatggagtcttggcagaacagccactcaggcatgcatggaggcccaggacactcaggcatgcatggaggcccaggagctttacctactgtggcactgggctttccggcaaaatgactgccactctgtaagggttcagaaccggggtgaggctgagatggctgaaatgacagaagtagaattcagaatgtggataaacacaatcttcactgatcttaaggagcacattgtaacccaatgcaggaaagctaaaaatcataaaatattgcaggaagtgacagacaaaatagccagtatagagaagaatgtaatgaacctgatggagctgaaaaacacaatacaagaatttcataatgcaatcacaagtattaatagcagaaaagaccaagtggaggaaagaatctcagagtttgaggactgtgtttctgaaataaggcagacagacaagaatagagaaaaaagaatgaaaaggaacgaacaaaacctccaagaaatatgggattgtgtaaagagactggatctacaactaattggtgtgcctgaaagagatgttggcccagggcttctggatcaacagggacaccaggatttatttattctgcgaagtgatcttccgtcacaggtatttattcgcgataagctcatggagcggcgtaaccgtcgcacaggaaggacagagaaagcgcggatctgggaagtgacggacagaacggtcaggacctggattggggaggcggttgccgccgctgctgctgacggtgtgacgttctctgttccggtcacaccacatacgttccgccattcctatgcgatgcacatgctgtatgccggtataccgctgaaagttctgcaaagcctgatgggacataagtccatcagttcaacggaagtctacacgaaggtttttgcgctggatgtggctgcccggcaccgggtgcagtttgcgatgccggagtctgatgcggttgcgatgactctcggagtcttccaacatccttgtggtctcctgcacttcaggggcactgggaacaaccactggcataggaggccggctcttcctagagtcccgatggaggctgtcttcactgagtgaatgtgatggttcagag

SEQ ID NO: 13415 - DNA, 1254 bp, Homo sapiens
  SIMILAR (847)..(1077): 571254mologous to Homo sapiens Human secreted protein bi129_2,accession number W79088,Smith-Waterman Score=142.
atgagaactagtgaccgcagatcgactgatctgcggtacagtagttcatcaaatctgctttccattgccaaggcactactgctaaagcaatacagtatcaagcaccctcccagtaggcccatggactatcacagaaggggtgggcacatgagatttcaggcaccgtgtatgaaatctaacaatgcgctcatcgtcatcctcggcaccgtcaccctggatgctgtaggcataggcttggttatgccggtactgccgggcctcttgcgggatatcgtccattccgacagcatcgccagtcactatggcgtgctgctagcgctatatgcgttgatgcaatttctatgcgcacccgttctcggagcactgtccgaccgctttggccgccgcccagtcctgctcgcttcgctacttggagccactatcgactacgcgatcatggcgaccacacccgtcctgtggatctacccactagtctctacagcggaacaatgtcgttcttcccccaaaagcatgatttgctgcaataaaaaatccctatatcttccacaagaaatgtcagctgtctatatagaattcacagaatattactatccagatggaaaggattttccaagaaataaaaagaactcaactacaaattacaggggcacagcagaaagtgtgaatgctggtgcaaacctacagaattatggtgaaacttctccagatgccatcagtacaaattcagagggtgctcaggaaaatcatgatgacctggtatttattcgcgataagctcatggagcggcgtaaccgtcgcacaggaaggacagagaaagcgcggatctgggaagtgacggacagaacggtcaggacctggattggggaggcggttgccgccgctgctgctgacggtgtgacgttctctgttccggtcacaccacatacgttccgccattcctatgcgatgcacatgctgtatgccggtataccgctgaaagttctgcaaagcctgatgggacataagtccatcagttcaacggaagtctacacgaaggtttttgcgctggatgtggctgcccggcaccgggacactgaatcttcgtcggtgtacgttaagtggaccggattagtccacatggacagacacctaatgaacacagaccaagatgtggctgtcctttacaccagtaatctcgcgcagttgaccacagggcaacttcgattgaccgaggagcacagggacagccctatatatatgctacaagattcctga

SEQ ID NO: 13416 - DNA, 3240 bp, Homo sapiens
  SIMILAR (1)..(351): 951254mologous to Escherichia coli similar to voltage-gated chloride channel protein,accession number U70214,Smith-Waterman Score=565.
  misc_feature (1)...(3240): n = a,t,c or g
atgtcatatcaggccacaaaaataacaattcatgaaaataccactagttcttcaaactggagttcatcaggattcttaagaaatctggtgcagatcccctttgtggaggtgataatgaaggggaagaaggaagggggagcaggagttgacccagctgctgaggttggttgtgtagagcgccacccagagggggatgggccgagaaccgctggggaggtagcagccagaggtggtcctctccgacccactactctgtcgatcatcactggggaggtggaaagacaaggcaagatcctcattttgttgcctgctcaggcctgtgcgcacttactctccatggacacgacggtgagcgtggagcagcccgcggtctcgctgcccccttcactcccggacccccagcctccccagagtggaggggcaagcacacattggcccagggcttcccggtatcaacagggacaccaggatttatttattctgcgaagtgatcttccgtcacaggtatttattcgcgataagctcatggagcggcgtaaccgtcgcacaggaaggacagagaaagcgcggatctgggaagtgacggacagaacggtcaggacctggattggggaggcggttgccgccgctgctgctgacggtgtgacgttctctgttccggtcacaccacatacgttccgccattcctatgcgatgcacatgctgtatgccggtataccgctgaaagttctgcaaagcctgatgggacataagtccatcagttcaacggaagtctacacgaaggtttttgcgctggatgtggctgccccggcccggatccctaaacagcagcaaaacgaaaaataccaagtgcctcaattcgatcaatcaacgattaaaaatattgagtctgcaaaaggacttgatgtgtgggacagctggccgctgcaaaacgctgacggaacagtagctgaatacaacggctatcacgttgtgtttgctcttgcgggaagcccgaaagacgctgatgacacatcaatctacatgttttatcaaaaggtcggcgacaactcaatcgacagctggaaaaacgcgggccgtgtctttaaagacagcgataagttcgacgccaacgatccgatcctgaaagatcagacgcaagaatggtccggttctgcaacctttacatctgacggaaaaatccgtttattctacactgactattccggtaaacattacggcaaacaaagcctgacaacagcgcaggtaaatgtgtcaaaatctgatgacacactcaaaatcaacggagtggaagatcacaaaacgatttttgacggagacggaaaaacatatcagaacgttcagcagtttatcgatgaaaggcattatacatccggcgacaaccatacgctgagagaccctcactacgttgaagacggagggcataaataccttgtattcgaagccaacacgggaacagaaaacggataccaaggcgaagaatctttatttaacaaagcgtactacggcggcggcacgaacttcttccgtaaagaaagccagaagcttcagcagagcgctaaaaaacgcgatgctgagttagcgaacggcgccctcggtgtcatagagttaaataatgattacgcattgaaaaaagtaatgaagccgctgatcacttcaaacacggtaactgatgaaatcgagcgcgcgattgttttcaaaatgaacgggaaatggtacttgttcactgattcacgcggttcaaaaatgacgatcggatggtgtaaactcaaacgatatttacatgcctgggtatttattcgcgataagctcatggagcggcgtaaccgtcgcacaggaaggacagagaaagcgcggatctgggaagtgacggacagaacggtcaggacctggattggggaggcggttgccgccgctgctgctgacggtgtgacgttctctgttccggtcacaccacatacgttccgccattcctatgcgatgcacatgctgtatgnccgtataccgctgaaagttctgcaaagcctgatgggacataagtccatcagttcaacggaagtctacacgaaggtttttgcgctggatgtggctgccccgcaccgggtgcagtttgcgatgccggagtctgatgccgcgtactacgggggcggcacgaacttcttccgtaaagaaagccagaagcttcagcagagcgctaaaaaacgcgatgctgagttagcgaacggcgccctcggtatcatagagttaaataatgattacacattgaaaaaagtaatgaagccgctgatcacttcaaacacggtaggtggtgaaatcgagcgcgcgaatgttttcaaaatgaacggcaaatgggacttgttcactgattcacgcggttcaaaaatgacgatcgatggtattaactcaaacgatatttacatgcttggttatgtatcaaactctttaaccggcccttacaagccgctgaacaaaacagggcttgtgctgcaaatgggtcttgatccaaacgatgtgacattcacttactctcacttcgcagtgccgcaagccaaaggcaacaatgtggttatcacaagctacatgacaaacagaggcttcttcgaggataaaaaggcaacatttgcgccaagcttcttaatgaacatcaaaggcaataaaacatccgttgtcaaaaacagcatcctggagcaaggacagctgacatggctccaagtagcgaagcgagcaggactgggcggcggccaaagcggtcggacagtgctccgagaacgggtgcgcatagaaattgcatcaacgcatatagcgctagcagcacgccatagtgactggcgatgctgtcggaatggacgatatcccgcaagaggcccggcagtatttattcgcgataagctcatggagcggcgtaaccgtcgcacaggaaggacagagaaagcgcggatctgggaagtgacggacagaacggtcaggacctggattggggaggcggttgccgccgctgctgctgacggtgtgacgttctctgttccggtcacaccacatacgttccgccattcctatgcgatgcacatgctgtatgccggtataccgctgaaagttctgcaaagcctgatgggacataagtccatcagttcaacggaagtctacacgaaggtttttgcgctggatgtggctgcccggcaccgggtgcagtttgcgatgccggagtctgatgcggttgcgatgctgaaacaattatcctga

SEQ ID NO: 13417 - DNA, 1776 bp, Homo sapiens; identical to SEQ ID NO: 13245
  SIMILAR (1077)..(553): 991254mologous to Escherichia coli rhamnulose-1-phosphate aldolase,accession number L19201,Smith-Waterman Score=941.

SEQ ID NO: 13418 - DNA, 710 bp, Homo sapiens
  SIMILAR (211)..(408): 981254mologous to Plasmid F Protein D,accession number M12987,Smith-Waterman Score=339.
gcgcaggcgctgatcgccacctacggccgtgatcgtgatcctggccggccgttgtggttggggtcggtcaagtcgaacatcggtcatacgcaagcggcggcgggtgtggctggtgtgatcaagatggtgatggcgatgcggcacgggcagctgccacgcacgttgcacgtggaatcgccgtcgccggaggtatttattcgcgataagctcatggagcggcgtaaccgtcgcacaggaaggacagagaaagcgcggatctgggaagtgacggacagaacggtcaggacctggattggggaggcggttgccgccgctgctgctgacggtgtgacgttctctgttccggtcacaccacatacgttccgcttttcctatgcgatgcacatgctgtatgccggtataccgctgtatagttctgcaaagcctgatgggacataagtccatcagttcaacggaagtctacacgaaggtttttgcgctggatgtggctgcccggcaccgggtgcagtttgcgatgccggagtctgatgcgggtgggcccggcacctgtgcctgctcccagcaggggtgcaggctccgtggcagcagcgtttctccaggcaggcagcacccccagcctcatgtccgcgtctaacttctggtattgcatgttctgggcagggaagcgagggcgtcgcagcagtgcgggatcgctagagagcaatgtggaa

SEQ ID NO: 13419 - DNA, 1943 bp, Homo sapiens
  SIMILAR (1)..(585): 851254mologous to Escherichia coli xprB,accession number M54884,Smith-Waterman Score=793.
tcaggataattgtttcagcatcgcaaccgcatcagactccggcatcgcaaactgcacccggtgccgggcagccacatccagcgcaaaaaccttcgtgtagacttccgttgaactgatggacttatgtcccatcaggctttgcaagaactttcagcggtataccggcatacagcatgtgcatcgcataggaatggcggaacgtatgtggtgtgaccggaacagagaacgtcacaccgtcagcagcagcggcggcaaccgcctccccaatccaggtcctgaccgttctgtccgtcacttcccagatccgcgctttctctgtccttcctgtgcgacggttacgccgctccatgagcttatcgcgaataaatacctgaatcgccagcggcatcagcaccttgtcgccttgcgtataatatttgcccatggtgaaaacgggggcgaagaagttgtccatattggccacgtatttattcgcgataagctcatggagcggcgtaaccgtcgcacaggaaggacagagaaagcgcggatctgggaagtgacggacagaacggtcaggacctggattggggaggcggttgccgccgctgctgctgacggtgtgacgttctctgttccggtcacaccacatacgttccgccattcctatgcgatgcacatgctgtatgccggtataccgctgaaagttctgcaaagcctgatgggacataagtccatcagttcaacggaagtctacacgaaggtttttgcgctggatgtggctgcccggcaccgggtgcagtttgcgatgccggagtctgatgcggttgcgatgctgaaacaattggcggagagcatcccgggggacagctcttcaatgcccatgtgcactaggcagagagcatcctgggcgcagctcttcaatgcacgtgtgcaccaggatcacctggagagtggagcaaagctcaagctcccggaccaccttagaactcgcatgggatggagtgccccatgggaacgactccctgtatgggaacggctcctgcatggaatggacccccccgccatggttcagggcctccctgaagcagcactctgccttctcctctggcagcatcctggctcctacacggagcaggtatttattcgcgataagctcatggagcggcgtaaccgtcgcacaggaaggacagagaaagcgcgggtgtgggaagtgacggacagaacggtcaggacctggattggggaggcggttgccgccgctgctgctgacggtgtgacgttctctgttccggtcacaccacatacgttccgccattcctatgcgatgcacatgctgtatgccggtataccgctgaaagttctgcaaagcctgatgggacataagtccatcagttcaacggaagtctacacgaaggtttttgcgctggatgtggctgcccggcaccgggagcacgccaagatgtcccttgtgactgtccccttctaccagaagagacataggcacttcgaccagtcctaccgtaatattcaaacacggtacctgctggacgaatatgcgtcaaaaaagagggcaggcgagacggtcactctcaagtgcaccatgctggtgacgccggacctgaagcgggtgcagccgcgcgccgagtggtaccgcgatggggccgggaatgcacagattcatcttgtcaatggacagcctcccgtgatcctggtgcacacgtgcattgaagagctgcgcccaggatgctctctggctaatgcacatggggtaccgagcctcgaatcccgaatcatgggcataggctggttccctggggggaaaaatggtatccgggtggacggcttgacggaaggctcactctacgagttcaaaatcgccgccgtcaacctggccggcatcggggagccctcagatcccagtgagcacttcaagtgtgaggcctggaccatgccggagcccg

SEQ ID NO: 13420 - DNA, 3926 bp, Homo sapiens
  SIMILAR (2916)..(3644): 881254mologous to Cloning vector pSacBII SacB,accession number U09128,Smith-Waterman Score=1117.
  misc_feature (1)...(3926): n = a,t,c or g
atggagtatctgcgaatgacttgctggatttggctctcccgggacttcctctggcttccaggagtgatgtatacccgggttttctaccggtttggggagcatttattaatggtgctctgctgcttgttcgaggcagttatcaatgggacgggcactcggcttggtgatccgatcgaggcgcaggcgctgatcgccacctacggccgtgatcgtgatcctggccggccgttgtggttggggtcggtcaagtcgaacatcggtcatacgcaagcggcggcgggtgtggctggtgtgatcaagatggtgatggcgatgcggcacgggcagctgccacgcacgttgcacgtggaatcgccgtcgccggaggtggattggtcggcggggacggttcaactccttacggagaacacgccctggcccaggagtggtcgtgttcgtcgggtgggggtgtcgtcgttcgggatcagtggtactaacgcgcacgtcatcctcgaacagcccccgggagtgccgagtcagtctgcggggccgggttcgggttctgtcgtggatgttccggtggtgccgtggatggtgtcgggcaaaacacccgaagcgctatccgcgcaggcaacggcgttgatgacctatctggacgagcgacctgatgtctcctcgctggatgttgggtactcgctggcgttgacacggtcggcgctggatgagcgagcggtggtgctgtggtcggaccgtgaaacgttgttgtgcggcaaggacacaagaagatggctgtctacaagccaggaaaagattctgcaccaggaactggatcaactggcaccttgatcttggacttcccagcctccagaactatgagatgagaaataagtgtctattgtttaagcctcccagtctatggtattttgttatagcaacccaagatgacaaagacaacaagcctaaaatgaaaaatggcaaagtaaccaagatgtccttcaagagagaacaggaagctaaggtgtttatctacctgcttccgcctcccaccagtggagctttgccccccgggactgtccatgtccctgcacttctggggctgcacaggtggaacaagcgctacaaaaagccaaagccctggggcacaaggcagaaagttgaggtgacaccgctctcgttaatatatggaggaagatctcagatgctccactttcccgagttccagggagctgacctgtatgctcttgagcaggggcagggtgtttgtgatctccgcaacctaactacttacagagttgttcataaagtgagccttggaagtctggtttacatgacatcaaacactggcagaaccatgatgcctggggatgtggccggggacggcggtgggttgggggaagctgtgtttctcagcttccgttacagccagggctgccatgacaaggtaccacaatgggagtggataaaaacacagttctggaatgtgaaagtccaagatcaagatgtcatgctccttttgaaggtcttgcttcaagtgacatactcacaagttccacccagtatggagtacagagagctgaaaggaggagaattgggggttgtaccagaaccagagaaagagaggtgtgtggcaactctccaggagacagtgtccctccaagaagagggcttcgtggagaaaagtagtgactttgagtccaaggacacaaccagaccaaggagtgatgccaggcaagccatttcattttacctctgcattcagggacatcgtgttggtagcttgaagacagccatgctgggaatagttacaccatgggaactgccaaacagtacacaacagagaaatgcctccagcatggaaatttccacacaaggactgagctgtagccaggtaggttcttttcaaatgggcaatagatgtccagttgtcaatcttctgaagaggaaaaagggccctagaattgtggaagcagctgggatgaaaaagccacattctgaaactgttcctgactggacagaccctgggaagaacaccactatcaccattatcaccccaatcatcatatataatcgtcatcattcccatcatcaccattttcaccaacattatcatgccatcatcaccatcaacatcaccatcatcctcatcatcaactccattaccatcatccatattctagagaagaattggaaaacaggatttgggatccgtgaatctggtttcaaaatctggctgttttttcttggttggattcccaaatctttgaaaacaacatctctagcatcttcgaagacagaaggcagtgaatatcggtgctgtttaaaggcccatgtgattatgctgctgccaattcgccaatgctgcaaagatcaaatgggcaaatttagggaacatcagctgcacaactacttggcatctgcacttagcattgctttgatacctgatgaccaactctctgaaaagaaggtatttattcgcgataagctcatggagcggcgtaaccgtcgcacaggaaggacagagaaagcgcggatctgggaagtgacggacagaacggtcaggacctggattggggaggcggttgccgccgctgctgctgacggtgtgacgttctctgttccggtcacaccacatacgttccgccattcctatgcgatgcacatgctgtatgccggtataccgctgaaagttctgcaaagcctgatgggacataagtccctcagggatcttctggacccaccttacgtgcagcagctccgggaggtggcaggatatgagctgactatgaaaggggctgccaaagggcgctcccgaagaatggagaaactagcatcccagtgtcccagagtccaaggcaagcatcaagaagacatgatgtatacccacctgaaatccataagggagtgcatgtttgggcctgaagacagcaggtcactagagcccgaaagacgctgatgacacatcaatctacatgttttatcaaaaggtcggcgacaactcaatcgacagctggaaaaacgcgggccgtgtctttaaagacagcgataagttcgacgccaacgatccgatcctgaaagatcagacgcaagaatggtccggttctgcaacctttacatctgacggaaaaatccgtttattctacactgactattccggtaaacattacggcaaacaaagcctgacaacagcgcaggtaaatgtgtcaaaatctgatgacacactcaaaatcaacggagtggaagatcacaaaacgatttttgacggagacggaaaaacatatcagaacgttcagcagtttatcgatgaaggcaattatacatccggcgacaaccatacgctgagagaccctcactacgttgaagacaaaggccataaataccttgtattcgaagccaacacgggaacagaaaacggataccaaggcgaagaatctttatttaacaaagcgtactacggcggcggcacgaacttcttccgtaaagaaagccagaagcttcagcagagcgctanaaaacgcgatgctgagttagcgaacggcgccctcggtatcatagagttaaatatgattaccattgaaaaagtatttattcgcgataagctcatggagcggcgtaaccgtcgcacaggaaggacagagaaagcgcggatctgggaagtgacggacagaacggtcaggacctggattggggaggcggttgccgccgctgctgctgacggtgtgacgttctctgttccggtcacaccacatacgttccgccattcctatgcgatgcacatgctgtatgccggtataccgctgaaagttctgcaaagcctgatgggacataagtccatcagttcaacggaagtctacacgaaggtttttgcgctggatgtggctgcccggcaccgggtgcagtttgcgatgccggagtctgatgcggttgcgatgctgaaacaattatcctga

SEQ ID NO: 13421 - DNA, 3212 bp, Homo sapiens
  SIMILAR (52)..(1023): 1001254mologous to Homo sapiens Contains C3HC4 type zinc finger signature,accession number D87451,Smith-Waterman Score=1744.
atgctgggcatggtggctcatgcctgtaatcccagtactttgggaggccgagatggaaagaactccagtggatccaagcgttataatcgcaaacgtgaactttcctaccccaaaaatgaaagttttaacaaccagtcccgtcgctccagttcacagaaaagcaagacttttaacaagatgcctcctcaaaggggcggcggcagcagcaaactctttagctcttcttttaatggtggaagacgagatgaggtagcagaggctcaacgggcagagtttagccctgcccagttctctggtcctaagaagatcaacctgaaccacttgttgaatttcacttttgaaccccgtggccagacgggtcactttgaaggcagtggacatggtagctggggaaagaggaacaagtggggacataagccttttaacaaggaactctttttacaggccaactgccaatttgtggtgtctgaagaccaagactacacagctcattttgctgatcctgatacattagttaactgggactttgtggaacaagtgcgcatttgtagccatgaagtgccatcttgcccaatatgcctctatccacctactgcagccaagataacccgttgtggacacatcttctgctgggcatgcatcctgcactatctttcactgagtgagaagacgtggagtaaatgtcccatctgttacagttctgtgcataagaaggatctcaagagtgttgttgccacagagtcacatcagtatgttgttggtgataccattacgatgcagctgatgaagagggagaaaggggtgttggtggctttgcccaaatccaaatggatgaatgtagaccatcccattcatctaggagatgaacagcacagccagtactccaagttgctgctggcctctaaggagcaggtgctgcaccgggtagttctggaggagaaagtagcactagagcagcagctggcagaggagaagcacactcccgagtcctgctttattgaggcagctatccaggagctcaaggtatttattcgcgataagctcatggagcggcgtaaccgtcgcacaggaaggacagagaaagcgcggatctgggaagtgacggacagaacggtcaggacctggattggggaggcggttgccgccgctgctgctgacggtgtgacgttctctgttccggtcacaccacatacgttccgccattcctatgcgatgcacatgctgtatgccggtataccgctgaaagttctgcaaagcctgatgggacataagtccatcagttcaacggaagtctacacgaaggtttttgcgctggatgtggctgcccggcaccgggtgcagtttgcgatgccggaggattttgccgatttcggaaccaccatcaaacaggattttcgcctgctggggcaaaccagcgtggaccgcttgctgcaactctctcagggccaggcggtgaagggcaatcagctgttgcccgtctcactggtgaaaagaaaaaccaccctggcgcccaatacgcaaaccgcctctccccgcgcgttggccgattcattaatgcagctggcacgacaggtttcccgactggaaagcgggcaaagagtatctggtgtcatagaaattgccgatggaagtcgccgtcgtaaagctgctgcacttaccgaaagtgattatcgtgttctggttggcgagctgaatgatgagcagatgcctgcattatccagattgggtaacgattatcgcccaacaagtgcttatgaacgtggtcagcgttatgcaagccgattgcagaatgaatttgctggaaatatttctgcgctggctgatgcggaaaaatatttacgtatcagtgataaacttgggaataatacagaaacatcaatgagccaaaagccttgcaaaatgaaaaggataattctagagaagagttggcagtttgaaaaatggatcatcatagtgatcttatttcattatggtgaaagttggaacctcttacgtgccgatcaacgtctcattttcgccaaaagttggcccaggggcttcccggtatcaacagggacaccaggatttatttattctgcgaagtgatcttccgtcacaggtatttattcgcgataagctcatggagcggcgtaaccgtcgcacaggaaggacagagaaagcgcggatctgggaagtggacggacagaacggtcaggacctggattggggaggcggttgccgccgctgctgctgacggtgtgacgttctctgttccggtcacaccacatacgttccgccattcctatgcgatgcacatggtgttatgccggtataccgctgaaagttctgcaaagcctgatgggacataagtccatcagtttaaacggaagtctacacgaaaggtttttgcgctggatgtggctgcccggcaccggtgtgacaatctaaaaacttgtcacacttcacatggatctgtcatggcggaaacagcggttatcaatcacaagaaacgtaaaaatagcccgcgaatcgtccagtcaaacgacctcactgaggcggcatatagtctctcccgggatcaaaaacgtatgctgtatctgttcgttgaccagatcagaaaatctgatggcaccctacaggaacatgacggtatctgcgagatccatgttgctaaatatgctgaaatattcggattgacctctgcggaagccagtaaggatatacggcaggcattgaagagtttcgcggggaaggaagtggttttttatcgccctgaagaggatgccggcgatgaaaaaggctatgaatcttttccttggtttatcaaacgtgcgcacagtccatccagagggctttacagtgtacatatcaacccatatctcattcccttctttatcgggttacagaaccggtttacgcagtttcggcttagtgaaacaaaagaaatcaccaatccgtatgccatgcgtttatacgaatccctgtgtcagtatcgtaagccggatggctcaggcatcgtctctctgaaaatcgactggatcatagagcgttaccagctgcctcaaagttaccagcgtatgcctgacttccgccgccgcttcctgcaggtctgtgttaatgagatcaacagcagaactccaatgcgcctctcatacattgagaaaaagaaaggccgccagacgactcatatcgtattttccttccgcgatatcacttccatgacgacaggatag

SEQ ID NO: 13422 - DNA, 834 bp, Homo sapiens
  SIMILAR (834)..(400): 991254mologous to Escherichia coli PutA,accession number U05212,Smith-Waterman Score=723.
gtgcgttggtggatccagccagtcatcaagccttccgccgccgggaagaatttgcagatgaccataaaacagcacaatgacgcccagcccaagccagaacgcaggtgtggagattccggtaatggccattattcgcaccagatgatccagccagcgatttcgccagactgcagagagtatgcccagcgggatgccaatcaggagtgccagcagcagggcaccaaaagccagctccagcgtcgccgggaaaaatatacgcaactcttccagcaccggacgcccggtacgaatggatgttcccaggtcaccatgaaacaggtcgctgacgtagcggtaaaactgtacatacagtggctggtccagtcccagttgctggcgaatattttccacgatagcatcgcctggaaccatacctgcgcgaccactggcatttttttgattacgcagtttatcggccagctgatacgccagtttgtgcgcctgttcagcaaccggctgcggcaggcgggcttgttccagcagcatagaaaccgcttcggtttccgggcggcgataggccgcggtgatcgcggcgcgggaaaccgactggggcaatatttgctcggcaaagtcgaggaatggctggtgtggttcctctgccggagtcggtgcttcatcgctctcattggccgcgccagaaagcagcgcaggtagctccggcagagtatcgctgttttccagttgttcgagataagaaaaaatcgcctgcttaattaaccagtgtggtgtgcgatcgatacgtgtcgcggcagacttaatacgctcacgcgtcgcgtcgtccagcttaacccccat

SEQ ID NO: 13423 - DNA, 1105 bp, Homo sapiens
  SIMILAR (424)..(1074): 991254mologous to Escherichia coli matches PS00017: ATP/GTP- binding site motif A,accession number U00006,Smith-Waterman Score= 1120.
atgggggttaagctggacgacgcgacgcgtgagcgtattaagtctgccgcgacacgtatcgatcgcacaccacactggttaattaagcaggcgattttttcttatctcgaacaactggaaaacagcgatactctgccggagctacctgcgctgctttctggcgcggccaatgagagcgatgaagcaccgactccggcagaggaaccacaccagccattcctcgactttgccgagcaaatattgccccagtcggtttcccgcgccgcgatcaccgcggcctatcgccgcccggaaaccgaagcggtttctatgctgctggaacaagcccgcctgccgcagccagttgctgaacaggcgcacaaactggcgtatcagctggccgataaactgcgtaatcaaaaaaatgccatgtcgcgcaggtcctttgccggactggtcggttccggacgtactgaactgatgaattgtctgtttggcgtggataaacgcgctggcggagaaatccgtcttaatggcaaagatatctctccacgttcacccctggatgccgtgaaaaaagggatggcttacatcactgaaagccgccgggataacggttttttccccaacttttccatcgctcagaacatggcgatcagccgcagtctgaaagacggcggctataaaggcgcgatgggcttgtttcatgaagttgacgagcaacgtaccgctgaaaatcaacgcgaactgctggcgctgaaatgtcattcggtaaaccagaatatcaccgaactctccgggggaaatcagcagaaagtcctgatctccaaatggctgtgctgttgcccggaagtgattattttcgatgaacctacccgcggcatcgacgttggcgcgaaagccgaaatttacaaagtgatgcgccaactggcggacgacggaaaagtcatcctgatggtgtcatctgaactacctgaaattatcaccgtgtgcgaccgcatcgccgtgttctgcgaaggacgactgacgcaaatcctgacgaatcgcgatgacatgagcgaagaggagattatggcatgggctttcccacaagagtaaaaagcgaagcgagcgagaagaaaccgtt

SEQ ID NO: 13424 - DNA, 360 bp, Homo sapiens
  SIMILAR (1)..(357): 961254mologous to Escherichia coli K12 putative resistance protein,accession number AE000278,Smith-Waterman Score=589.
atgcaactcatcaaagaccgttggcgacaccaggctattcaggcgctgatgcgtttttcctggtgcaagcattttgcggtgatcggcgtactggcaagcggcgtgcttaatgcattgttgattaccggatttccccccacgctaacgacttactggggccaactcttattgctcaaagccatcctggtgatgattatagaggtcattgcgctggctaatcgttatgttcttgtaccgcgcatgaggcaggatgaagatcgtgcggcaccctggtttgtgtggatgactaaactcgaatgggcgataggtgcggtagtgctggtgatcatcagcctgcttgcgactctcgaacctttttga

SEQ ID NO: 13425 - DNA, 1494 bp, Homo sapiens
  SIMILAR (523)..(1491): 991254mologous to Cloning vector pZC320 SopB,accession number U26464,Smith-Waterman Score=1594.
  misc_feature (1)...(1494): n = a,t,c or g
atggaaattcgaggacgggttgagcaacgtgttggttatacaattgaacaaattaatcatatgcgtgatgtgtttggtacgcgattggcacgtgctgaagacgtatttccaccggtgatcggggttgctgcccataaaggtggcgtttacaaaacctcagtttctgttcatcttgctcaggatctggctctgaaggggctacgtgttttgctcgtggaaggtaaactgcccaccgatccacacctgatgctccgactggccattgaaactgttgctcatgactatgatgtcatagttattgacagcgcgcctaacctgggtatcggcacgattaatgtctttttcgatatgcttcgtgatctgctcaagaacgttgatcttaaagggttcgagcctgatgtacgtattttgcttaccaaatacagcaatagtaatggctctcagtccccgtggatggaggagcaaattcgggatgcctggggaagcatggttctaaaaaatgttgtacgtcgaaacggnataatgaagcgtgcgcctgttattccaaaacatacgctcaatactcaaccggttgaagatacttcgttatcgacaccagctgccccgatggtggattcgttaattgcgcgcgtaggagtaatggctcgcggtaatgccattactttgcctgtatgtggtcgggatgtgaagtttactcttgaagtgctccggggtgatagtgttgagaagacctctcgggtatggtcaggtaatgaacgtgaccaggngctgcttactgaggacgcactggatgatctcatcccttcttttctactgactggtcaacagacaccggctttcggtcgaagagtatctggtgtcatagaaattgccgatgggagtcgccgtcgtaaagctgctgcacttaccgaaagtaattatcgtgttctggttggcgagctggatgatgagcagatggctgcattatccagattgggtaacgattatcgcccaacaagtgcttatgaacgtggtcagcgttatgcaagccgattgcagaatgaatttgctggaaatatttctgcgctggctgatgcggaaaatatttcacgtaagattattacccgctgtatcaacaccgccaaattgcctaaatcagttgttgctcttttttctcaccccggtgaactatctgcccggtcaggtgatgcacttcaaaaagcctttacagataaagaggaattacttaagcagcaggcatctaaccttcatgagcagaaaaaagctggggtgatatttgaagctgaagaagttatcactcttttaacttctgtgcttaaaacgtcatctgcatcaagaactagtttaagctcacgacatcagtttgctcctggagcgacagtattgtataagggcgataaaatggtgcttaacctggacaggtctcgtgttccaactgagtgtatagagaaaattgaggccattcttaaggaacttgaaaagccagcaccctga

SEQ ID NO: 13426 - DNA, 1086 bp, Homo sapiens
  SIMILAR (4291)..(4734): 801254mologous to Pan troglodytes prot GOR,accession number D10017,Smith-Waterman Score=617.
ttaggcaatttggcaagagttgatacagcgggggataatcttacgtgaaatattttccgcatcagccagcgcagaaatatttccagcaaattcattctgcaatcggcttgcataacgctgaccacgttcataagcacttgttgggcgataatcgttacccaatctggataatgcagccatctgctcatcatccagctcgccaaccagaacacgataatcactttcggtaagtgcagcagctttacgacggcgactcccatcggcaatttctatgacaccagatactcttcgaccgaacgccggtgtctgttgaccagtcagtagaaaagaagggatgagatcatccaatgcgtcctccataagcagctcctggtcacgttcattacctgaccatacccgaaaagtcttctcaacactatcaaccccgagcacttcaagaagtaaattcacatcccgaacccgtgaaatattttccgcatcagccagcgcagaaatatttccagcaaattcattctgcaatcggcttgcataacgtcttttctgggggtgagcacttgttgggcgataatcgttacccaatctggataatgggggcatctgctcatcatacagctcgccaaccagaacacgataatcactttcggtaagtgcagcagctttacgacggcgacttccatcggcaatttctatgacaccagatactcttctacccaacgccggtgtctgttgaccagtcagtagaaaagaagggatgagatcattcagtgcgttctcagtaagcagcttctggtcacgttcattacccgaccatacccgagaggtgtttttaacactatcacccccgggcacgcctttcattgccatacggaactccggatgagcattcatcaggcgggcaagaatgtgaataaaggccggataaaacttgtgcttatttttctttacggtctttaaaaaggccgtaatatccagctgaactgtttggttttttgtacattgagcaggtgactgaaatgcctcaaaatgttctttacgatgccattgggatatatcaacggtggtatatccagtgatttttttctccat

SEQ ID NO: 13427 - DNA, 1575 bp, Homo sapiens
  SIMILAR (121)..(456): 651254mologous to Homo sapiens similar to ribosomal protein L23a; similar to P29316 (PID:g132848),accession number AC004908,Smith-Waterman Score=327.
ttaatccattgtcgtgtgaggaaaaaccacaagacgggtgtggtcgccatgatcgcgtagtcgatagtggctccaagtagcgaagtgccagggactgggcggcggcaaatacgatcggacagtgctccgagaacgggtgcgcatagaaattgcatcaacgcatatagcgctagagacacgccatagtggctggcgatgctgtcggaatggacgatatcccgcaagaggcccggcagtaccggcataaccaagcctatgcctacagcatccagggtgacggtgccgaggatgacagatgagcgcattgttagatttcatacaacggtgcctgattgcatcggatgcagcccggttaacgtgaccggcaccgctgggtaagcaggtaattttgtccacataaccgtgcgcaaaatgttgtggataaggcgggaccagcagcaatccacaagcaggacatacaaacggcacaccgaagttactccgttctaaagggttacaacgacatgtactatggttggccctgttgcaaggtgaatgaaatttccggacaactggcttcagaacctgcctagtcgctagttttacctgcggcgggatgacaggctcctgcctctggtagcccatggctgagcggtggtcctcagcaggtggaagatgctggggctgggtacggattcgcacccggccagcctcctccgccacctcgcacacagccgaggtccgcgtgtagccgcagagctgcagggagccagttccacgggcgccccctgctccctcggcaggccgcgaaggctcgagcaccaagatctctaggctgtggcagcctggggcgcttttccaccggagttcgcccagacaaatgtatttttcctccggagacggagaatgctgcaggatgtttctgatccgggcagccctgtctccccgcctccccccttcacacccccgcctccttttcttggatctagaggatcccccatcggcaatttctatgacaccagatactcttcgaccgaacgccggtgtctgttgaccagtcagtagaaaagaagggatgagatcatccagtgcgtcctcagtaagcagctcctggtcacgttcattacctgaccatacccgagaggtcttctcaacactatcaccccggagcacttcaagagtaaacttcacatcccgaccacatacaggcaaagtaatggcattaccgcgagccattactcctacgcgcgcaattaacgaatccaccatcggggcagctggtgtcgataacgaagtatcttcaaccggttgagtattgagcgtatgttttggaataacaggcgcaccttcattatcagttgaagagcgttgatcaatggcctgttcaaaaacagttctcatccggatctgacctttaccaacttcatccgtttcacgtacaacattttttagaaccatgcttccccaggcatcccgaatttgctcctccatccacggggactgagagccattactattgctgtatttggtaagcaaaatacgtacatcaggctcgaaccctttaagatcaacgttcttgagcagatcacgaagcat

SEQ ID NO: 13428 - DNA, 1494 bp, Homo sapiens
  SIMILAR (3)..(185): 901254mologous to Homo sapiens IGF-II mRNA-binding protein 3,accession number AF117108,Smith-Waterman Score=283.
atggagaacaaaatcactggatataccaccgttgatatatcccaatggcatcgtaaagaacattttgaggcatctcagtcagttgctcaatgtacctataaccagaccgttcagctggatattacggcctttttaaagaccgtaaagaaaaataagcacaagttttatccggcctttattcacattcttgcccgcctgatgaatgctcatccggagttccgtatggcaatgaaagacggtgagctggtgatatgggatagtgttcacccttgttacaccgttttccatgagcaaactgaaacgttttcatcgctctggagtgaataccacgacgatttccggcagtttctacacatatattcgcaagatgtggcgtgttacggtgaaaacctggcctatttccctaaagggtttattgagaatatgtttttcgtctcagccaatccctgggtgagtttcaccagttttgatttaaacgtggccaatatggacaacttcttcgcccccgttttcaccatgggcaaatattatacgcaaggcgacaaggtgctgatgccgctggcgattcaggttcatcatgccgtttgtgatggcttccatgtcggcagaatgcttaatgaattacaacagtactgcgatgagtggcagggcggggcccaagaggaacctccaaagttctgtatgttccagataaatgccctgtcctctgctttagtcagcactggcaggggtgcctacaccaaagccttttcccagaaaggagactgtattgacttgcaccttcagtttctttggaacctgtccaaggttcatcattggagcggcgtaaccgtcgcacaggaaggacagagaaagcgggatctgggaagtgacggacagacggtcaggacctggattggggaggcggttgccgcgctgctgctgacgtgtgacaatctaaaaacttgtcacacttcacatggatctgtcatggcggaaacagcggttatcaatcacaagaaacgtaaaaatagcccgcgaatcgtccagtcaaacgacctcactgaggcggcatatagtctctcccgggatcaaaaacgtatgctgtatctgttcgttgaccagatcagaaaatctgatggcaccctacaggaacatgacggtatctgcgagatccatgttgctaaatatgctgaaatattcggattgacctctgcggaagccaaaatcaccaatccgtatgccatgcgtttatacgaatccctgtgtcagtatcgtaagccggatggctcaggcatcgtctctctgaaaatcgactggatcatagagcgttaccagctgcctcaaagttaccagcgtatgcctgacttccgccgccgcttcctgcaggtctgtgttaatgagatcaacagcagaactccaatgcgcctctcatacattgagaaaaagaaaggccgccagacgactcatatcgtattttccttccgcgatatcacttccatgacgacaggatag

SEQ ID NO: 13429 - DNA, 1746 bp, Homo sapiens; identical to SEQ ID NO: 7106
  SIMILAR (65)..(3): 771254mologous to Homo sapiens Human secreted protein, SEQ ID NO: 7678,accession number G03597,Smith-Waterman Score=70.

SEQ ID NO: 13430 - DNA, 3216 bp, Homo sapiens; identical to SEQ ID NO: 13193
  SIMILAR (1)..(327): 451254mologous to Mus musculus Gag polyprotein,accession number Y12713,Smith-Waterman Score=268.

SEQ ID NO: 13431 - DNA, 813 bp, Homo sapiens
  SIMILAR (91)..(810): 931254mologous to unidentified cloning vector 29kD protein essential for the replication of mini F plasmid,accession number AB015619,Smith-Waterman Score=1167.
atgtcccatcaggctttgcagaactttcagcggtataccggcatacagcatgtgcatcgcataggaatggcggaacgtatgtggtgtgaccggaacagagaacgtcacaccgtcagcagcagcgcggcaaccgcctccccaaccagtctctcccgggatcaaaaacgtatgctgtatctgttcgttgaccagatcagaaaatctgatggcaccctacaggaacatgacggtatctgcgagatccatgttgctaaatatgctgaaatattcggattgacctctgcggaagccagtaaggatatacggcaggcattgaagagtttcgcggggaaggaagtggttttttatcgccctgaagaggatgccggcgatgaaaaaggctatgaatcttttccttggtttatcaaacgtgcgcacagtccatccagagggctttacagtgtacatatcaacccatatctcattcccttctttatcgggttacagaaccggtttacgcagtttcggcttagtgaaacaaaagaaatcaccaatccgtatgccatgcgtttatacgaatccctgtgtcagtatcgtaagccggatggctcaggcatcgtctctctgaaaatcgactggatcatagagcgttaccagctgcctcaaagttaccagcgtatgcctgacttccgccgccgcttcctgcaggtctgtgttaatgagatcaacagcagaactccaatgcgcctctcatacattgagaaaaagaaaggccgccagacgactcatatcgtagtttccttccgcgatatcacttccatgacgacaggatag

SEQ ID NO: 13432 - DNA, 1299 bp, Homo sapiens; identical to SEQ ID NO: 13361
  SIMILAR (65)..(319): 481254mologous to Homo sapiens unnamed protein product,accession number AX061654,Smith-Waterman Score=194.

SEQ ID NO: 13433 - DNA, 1410 bp, Homo sapiens
  SIMILAR (580)..(891): 881254mologous to Rattus norvegicus B-regulatory subunit of protein phosphatase 2A,accession number D38261,Smith-Waterman Score =474.
  misc_feature (1)...(1410): n = a,t,c or g
gtcgcgctggcgctgatcgccacctacggccgtgatcgtgatcctggccggccgttgtggttggggtcggtcaagtcgaacatcggtcatacgcaagcggcggcgggtgtggctggtgtgatcaagatggtgatggcgatgcggcacgggcagctgccacgcacgttgcacgtggaatcgccgtcgccggaggtggattggtcggcggggacggttcaactccttacggagaacacgccctggcccaggagtggtcgtgttcgtcgggtgggggtgtcgtcgttcgggatcagtggtactaacgcgcacgtcatcctcgaacagcccccgggagtgccgagtcagtctgcggggccgggttcgggttctgtcgtggatgttccggtggtgccgtggatggtgtcgggcaaaacacccgaagcgctatccgcgcaggcaacggcgttgatgacctatctggacgagcgacctgatgtctcctcgctggatgttgggtactcgctggcgttgacacggtcggcgctggatgagcgagcggtggtgctggggtcggaccgtgaaacgtttgtgtgcggtgtgaaagcgctgtctgccggtcatgaggcttctggntgtgacaatctaaaaacttgtcacacttcacatggatctgtcatggcggaaacagcggttatcaatcacaagaaacgtaaaaatagcccgcgaatcgtccagtcaaacgacctcactgaggcggcatatagtctctcccgggatcaaaaacgtatgctgtatctgttcgttgaccagatcagaaaatctgatggcaccctacaggaacatgacggtatctgcgagatccatgttgctaaatatgctgaaatattcggattgacctctgcggaagccagtaaggatatacggcaggcattgaagagtttcgcggggaaggaagtggttttttatcgccctgaagaggatgccggcgatgaaaaaggctatgaatcttttccttggtttatcaaacgtgcgcacagtccatccagagggctttacagtgtacatatcaacccatatctcattcccttctttatcgggttacagaaccggtttacgcagtttcggcttagtgaaacaaaagaaatcaccaatccgtatgccatgcgtttatacgaatccctgtgtcagtatcgtaagccggatggctcaggcatcgtctctctgaaaatcgactggatcatagagcgttaccagctgcctcaaagttaccagcgtatgcctgacttccgccgccgcttcctgcaggtctgtgttaatgagatcaacagcagaactccaatgcgcctctcatacattgagaaaaagaaaggccgccagacgactcatatcgtattttccttccgcgatatcacttccatgacgacaggatag

SEQ ID NO: 13434 - DNA, 3384 bp, Homo sapiens
  SIMILAR (1)..(969): 1001254mologous to Homo sapiens 20-NOV-1998 Human brain- specific transmembrane glycoprotein encoding cDNA,accession number A40083_cd1,Smith-Waterman Score=1657.
atggaggtgattcctgaagggtacaggctttccgagttgaaaaaatgttctaaatggattgtggtgatggttgcacggctctatgaatatactaaaaaccaacaaattatacatttaaaatgggtgaatcatatgctgggatgcctactggaccgcaacgacccgctccgggatgtcgatgaggcagccgtgcctgtgctgtgtatctgcagtgctgacgaccccgtgtgtggacccccagaccacactctgacaactgaactcttccacagcaacccctacttcttcctcctgctcagtcgccacggaggccactgtggcttcctgcgccaggagcccttgccagcctggagccatgaggtcatcttggagtccttccgggccttgactgagttcttccgaacggaggagaggattaaagggctgagcaggcacagagcttccttccttgggggccgtcgtcgtgggggagccttgcagaggcgggaagtctcttcctcttccaacctggaggagatctttaactggaagcgatcatacacaaggttgatggcagcggcagctggggctgcagcggcgccgggctctagagagccgcaggatcggccagagtgcggagctggacacccgggtcccagatactacagacacccggagaggtggctccttcgccctgaagccttcctcggccccctacgcactcgggccccttccgcagaggattcgcagcgtgagcgccccgcagcccgctcaggaccagagatgcgagttcggtatcctgtggtggctgcagtcttggccccatacctggctttaagccaagatccaatggtcaagtcttctgcttctggacagggtgcctctgggagctacaaccacgtccgtgaagagatgctcatcaaggctggcggtgctatgagcagacgtgtggttcggcaaagcaagttccgccatgtgtttgggcaggcagcaaaggccgaccaggcctacgaggacatccgtgtgtccaaggtcacatgggacagctccttctgtgccgtcaaccccaaattcctggccattattgtggaggctggaggcggggtgccttcatcgtcctgcctctggccaaggtggtggctagcaggctaccgttgtgttccagcacacactgtggatgacgtctgggtgcatatcatccaggctcagcagcacctccccggtgcccacattccagatgatgatcacattgtcaccacctgcccagagtggccaggcatggtagcagggaatccaatggccccagacttctctttgaactcatttgctccacccttcgccaatggccttccccggaacgttctccaggatcctccagagagccccaaagctttctccctcccttcactcaggctgctgctcaaatgtcacctccttagaaaagcccaccctgacagcccatctgaggaggtgaggggcgcctctgcccggccaccaccccgtctgggaggtgtacccaacagctcattgagaacgggccatgatgacaataggcggttttgtggaatagaaaggggggaaaggaggagcgactcaagcttcgcgaaagaaaataaccaaaaagcatacaaagaaacgtacggcgtctctcatattacacgccatgatatgctgcagatccctaaacagcagcaaaacgaaaaataccaagtgcctcaattcgatcaatcaacgattaaaaatattgagtctgcaaaaggacttgatgtgtgggacagctggccgctgcaaaacgctgacggaacagtagctgaatacaacggctatcacgttgtgtttgctcttgcgggaagcccgaaagacgctgatgacacatcaatctacatgtttatcaaaagtcgcgacaactcaatcgacaatgatgaactcaaccctggctgggcatccatcagcaggggtgtgctggtgtgtgacgagtgctgcagcgtgcaccggagcctgggacgccacatctccattgtcaagcaccttcgccacagcgcctggcctcccacgctgctgcaggctttgcagaactttcagcggtataccggcatacagcatgtgcatcgcataggaatggcggaacgtatgtggtgtgaccggaacagagaacgtcacaccgtcagcagcagcggcgcaaccgcctccccaatccagaccgttcagctggatattacggcctttttaaagaccgtaaagaaaaataagcacaagttttatccggcctttattcacattcttgcccgcctgatgaatgctcatccggagttccgtatggcaatgaaagacgggtttattgagaatatgtttttcgtctcagccaatccctgggtgagtttcaccagttttgatttaaacgtggccaatatggacaacttcttcgcccccgttttcaccatgggcaaatattatacgcaaggcgacaaggtgctgatgccgctggcgattcaggaatatggctggaatctggaccgagcctatgactatgtgaaagaaagacgaacggtaaccaagcccaacccaagcttcatgagacaactggaagagtatcaggggatcttgctggcaagcgttatcaatcacaagaaacgtaaaaatagcccgcgaatcgtccagtcaaacgacctcactgaggcggcatatagtctctcccgggatcaaaaacgtatgctgtatctgttcgttgaccagatcagaaaatctgatggcaccctacaggaacatgacggtatctgcgagatccatgttgctaaatatgctgaaatattcggattgacctctgcggaagccagtaaggatatacggcaggcattgaagagtttcgcggggaaggaagtggttttttatcgccctgaagaggatgccggcgatgaaaaaggctatgaatcttttccttggtttatcaaacgtgcgcacagtccatccagagggctttacagtgtacatatcaacccatatctcattcccttctttatcgggttacagaaccggtttacgcagtttcggcttagtgaaacaaaagaaatcaccaatccgtatgccatgcgtttatacgaatccctgtgtcagtatcgtaagccggatggctcaggcatcgtctctctgaaaatcgactggatcatagagcgttaccagctgcctcaaagttaccagcgtatgcctgacttccgccgccgcttcctgcagcacatatttgttcttcgggagcgccctgaaaccgtgttaatagatctcattcagaggacaaaggatgcagtaagagagctggacaatctgcagtatcgaaagatgaagaaactccttttccaggaggcacataatggaccagcagtagaagcacaggaagaagaagaggatgattga

SEQ ID NO: 13435 - DNA, 2787 bp, Homo sapiens
  SIMILAR (1603)..(2271): 991254mologous to Homo sapiens zinc-binding protein,accession number AJ272269,Smith-Waterman Score=1148.
atgaacatgaacatcaaaaaaattgtaaaacaagccacagttctgacttttacgactgcacttctggcaggaggagcgactcaagccttcgcgaaagaaaataaccaaaaagcatacaaagaaacgtacggcgtctctcatattacacgccatgatatgctgcagatccctaaacagcagcaaaacgaaaaataccaagtgcctcaattcgatcaatcaacgattaaaaatattgagtctgcaaaaggacttgatgtgtgggacaagtggccgcttgcaaacgctgacggaacagtagctgaatacaacggctataacgttgtcgataagttcgacgccaacgatccgatcctgaaagatcagacgcaagaatggtccggttctgcaacctttacatgtgacggaaaaatccgtttattctacactgactattccggtaaacattacggcaaacaaagcctgacaacagcgcaggtaaatgtgttaaaatctgatgacacactcaaaatcaacggagtggaagatcacaaagcgatttttgacggagacggaaaaacatatcagaacgttcagcagcttatcgatgaaggcaattatacatccggcgacaaccatacgctgagagaccctcactacgttgaagacaaaggccataaataccttgtattcgaagccaacacgggaacagaaaacggataccaaggcgaagaatctttatttaacaaagcgtactacggcggcggcacgaacttcttccgtaaagaaagccagaagcttcagcagagcgctaaaaaacgcgatgctgagttagcgaacggcgccctcggtatcatagagttaaataatgattacacattgaaaaaagtaatgaagccgctgatcacttcaaacacggtaactgatgaaatcgagcgcgcgaatgttttcaaaatgaacggcaaatggtacttgttcactgattcacgcggttcaaaaatgacgatcgatggtattaactcaaacgatatttacatgcttggttatgtatcaaactctttaaccggcccttacaagccgctgaacaaaacagggcttgtgctgcaaatgggtcttgatccaaacgatgtgacattcacttactctcacttcgcagtgccgcaagccaaaggcaacaatgtggttatcacaagctacatgacaaacagaggcttcttcgaggataaaaaggcaacatttgcgccaagcttcttaatgaacatcaaaggcaataaaacatccgttgtcaaaaacagcatcctggagcaaggacagctgacatggctccaagtagcgaagcgagcaggactgggcggcggccaaagcggtcggacagtgctccgagaacggcttccaaactacaaaaactttaaaggcacgattcaagaacttggtcaaaaccagtatgcagtcagtggtgaaatatttgtagtggacagaaacacagtagaaattacagagcttccagttagaacttggacacaggtatataaagaacaggttttagaacctatgctaaatggaacagataaaacaccagcattaatttctgattataaagaatatcatactgacacaactgtgaaatttgtggtgaaaatgactgaagagaaactagcacaagcagaagctgctggactgcataaagtttttaaacttcaaactactcttacttgtaattccatggtactttttgatcatatgggatgtctgaagaaatatgaaactgtgcaagacattctgaaagaattctttgatttacgattaagttattacggtttacgtaaggagtggcttgtgggaatgttgggagcagaatctacaaagcttaacaatcaagcccgtttcattttagagaagatacaagggaaaattactatagagaataggtcaaagaaagatttgattcaaatgttagtccagagaggttatgaatctgacccagtgaaagcctggaaagaagcacaagaaaagtgtgacaatctaaaaacttgtcacacttcacatggatctgtcatggcggaaacagcggttatcaatcacaagaaacgtaaaaatagcccgcgaatcgtccagtcaaacgacctcactgaggcggcatatagtctctcccgggatcaaaaacgtatgctgtatctgttcgttgaccagatcagaaaatctgatggcaccctacaggaacatgacggtatctgcgagatccatgttgctaaatatgctgaaatattcggattgacctctgcggaagccagtaaggatatacggcaggcattgaagagtttcgcggggaaggaagtggttttttatcgccctgaagaggatgccggcgatgaaaaaggctatgaatcttttccttggtttatcaaacgtgcgcacagtccatccagagggctttacagtgtacatatcaacccatatctcattcccttctttatcgggttacagaaccggtttacgcagtttcggcttagtgaaacaaaagaaatcaccaatccgtatgccatgcgtttatacgaatccctgtgtcagtatcgtaagccggatggctcaggcatcgtctctctgaaaatcgactggatcatagagcgttaccagctgcctcaaagttaccagcgtatgcctgacttccgccgccgcttcctgcaggtctgtgttaatgagatcaacagcagaactccaatgcgcctctcatacattgagaaaaagaaaggccgccagacgactcatatcgtattttccttccgcgatatcacttccatgacgacaggatag

SEQ ID NO: 13436 - DNA, 1470 bp, Homo sapiens
  SIMILAR (192)..(320): 441254mologous to Homo sapiens Human normal pancreas tissue derived protein 3,accession number Y59895,Smith-Waterman Score=77.
  misc_feature (1)...(1470): n = a,t,c or g
atggagaaaaaaatcactggatataccaccgttgataatacccaatggcatcgtaaagaacattttgaggcatttcagtcagttgctcaatgtacctataaccagaccgttcagctggatattacggcctttttaaagaccgtaaagaaaaataagcacaagttttatccggcctttattcacattcttgcccgcctgatgaatgctcatccggagttccgtatggcaatgaaagacggtgagctggtgatatgggatagtgttcacccttgttacaccgttttccatgagcaaactgaaacgttttcatcgctctggagtgaataccacgacgatttccggcagtttctacacatatattcgcaagatgtggcgtgttacggtgaaaacctggcctatttccctaaagggtttattgagaatatgtttttcgtctcagccaatccctgggtgagtttcaccagttttgatttaaacgtggccaatatggacaacttcttcgcccccgttttcaccatgggcaaatattatacgcaaggcgacaaggtgctgatgccgctggcgattcaggttcatcatgccgtttgtgatggcttccatgtcggcagaatgcttaatgaattacaacagtactgcgatgagtggcagggcggagaacacaagcatcttcagngtgacaatctaaaaacttgtcacacttcacatggatctgtcatggcggaaacagcggttatcaatcacaagaaacgtaaaaatagcccgcgaatcgtccagtcaaacgacctcactgaggcggcatatagtctctcccgggatcaaaaacgtatgctgtatctgttcgttgaccagatcagaaaatctgatggcaccctacaggaacatgacggtatctgcgagatccatgttgctaaatatgctgaaatattcggattgacctctgcggaagccagtaaggatatacggcaggcattgaagagtttcgcggggaaggaagtggttttttatcgccctgaagaggatgccggcgatgaaaaaggctatgaatcttttccttggtttatcaaacgtgcgcacagtccatccagagggctttacagtgtacatatcaacccatatctcattcccttctttatcgggttacagaaccggtttacgcagtttcggcttagtgaaacaaaagaaatcaccaatccgtatgccatgcgtttatacgaatccctgtgtcagtatcgtaagccggatggctcaggcatcgtctctctgaaaatcgaatggatcatagagcgttaccagctgcctcaaagttaccagcgtatgcctgacttccgccgccgcttcctgcaggtctgtgttaatgagatcaacagcagaactccaatgcgcctctcatacattgagaaaaagaaaggccgccagacgactcatatcgtattttccttccgcgatatcacttccatgacgacaggatag

SEQ ID NO: 13437 - DNA, 1890 bp, Homo sapiens
  SIMILAR (133)..(405): 561254mologous to multiple sclerosis associated retrovirus element gag polyprotein,accession number AF123881,Smith-Waterman Score=226.
atgaaactcatggaaacacttaaccagtgcataaacgctggtcatgaaatgacgaaggctatcgccattgcacagtttaatgatgacagcccggaagcgaggaaaataacccggcgctggagaataggtgaagcagcggatttagttggggtttcttctcaggctatcagagatgccgagaaagcagggcgactaccgcacccggatatggaaattcgaggacgggttgagcaacgtgttggttatacaattgaacaaattaatcatatgcgtgatgtgtttggtacgcgattgcgacgtgctgaagacgtatttccaccggtgatcggggttgctgcccataaaggtggcgtttacaaaacctcagtttctgttcatcttgctcaggatctggctctgaaggggctacgtgttttgctcgtggaaggtaacgacccccagggaacagcctcaatgtatcacggatgggtaccagatcttcatattcatgcagaagacactctcctgcctttctatcttggggaaaaggacgatgtcacttatgcaataaagcccacttgctggccggggcttgacattattccttcctgtctggctctgcaccgtattgaaactgagttaatgggcaaatttgatgaaggtaaactgcccaccgatccacacctgatgctccgactggccattgaaactgttgctcatgactatgatgtcatagttattgacagcgcgcctaacctgggtatcggcacgattaatgtcgtatgtgctgctgatgtgctgattgttcccacgcctgctgagttgtttgactacacctccgcactgcagtttttcgatatgcttcgtgatctgctcaagaacgttgatcttaaagggttcgagcctgatgtacgtattttgcttaccaaatacagcaatagtaatggctctcagtccccgtggatggaggagcaaattcgggatgcctggggaagcatggttctaaaaaaatgttctgccccgatggtggattcgttaattgcgcgcgtaggagtaatggctcgcggtaatgccattactttgcctgtatgtggtcgggatgtgaagtttactcttgaagtgctccggggtgatagtgttgagaagacctctcgggtatggtcaggtaatgaacgtgaccaggagctgcttactgaggacgcactggatgatctcatcccttcttttctactgactggtcaacagacaccggcgttcggtcgaagagtatctggtgtcatagaaattgccgatgggagtcgccgtcgtaaagctgctgcacttaccgaaagtgattatcgtgttctggttggcgagctggatgatgagcagatggctgcattatccagattgggtaacgattatcgcccaacaagtgcttatgaacgtggtcagcgttatgcaagccgattgcagaatgaatttgctggaaatatttctgcgctggctgatgcggaaaatatttcacgtaagattattacccgctgtatcaacaccgccaaattgcctaaatcagttgttgctcttttttctcaccccggtgaactatctgcccggtcaggtgatgcacttcaaaaagcctttacagataaagaggaattacttaagcagcaggcatctaaccttcatgagcagaaaaaagctggggtgatatttgaagctgaagaagttatcactcttttaacttctgtgcttaaaacgtcatctgcatcaagaactagtttaagctcacgacatcagtttgctcctggagcgacagtattgtataagggcgataaaatggtgcttaacctggacaggtctcgtgttccaactgagtgtatagagaaaattgaggccattcttaaggaacttgaaaagccagcaccctga

SEQ ID NO: 13438 - DNA, 831 bp, Homo sapiens; identical to SEQ ID NO: 7308
  SIMILAR (436)..(714): 861254mologous to unidentified cloning vector 29kD protein essential for the replication of mini F plasmid,accession number AB015619,Smith-Waterman Score=399.

SEQ ID NO: 13439 - DNA, 1554 bp, Homo sapiens
  SIMILAR (1554)..(1159): 871254mologous to unidentified cloning vector 29kD protein essential for the replication of mini F plasmid,accession number AB015619,Smith-Waterman Score=598.
  misc_feature (1)...(1554): n = a,t,c or g
ctatcctgtcgtcatggaagtgatatcgcggaaggaaaatacgatatgagtcgtctggcggcctttctttttctcaatgtatgagaggcgcattggagttctgctgttgatctcattaacacagacctgcaggaagcggcggcggaagtcaggcatacgctggtaactttgaggcagctggtaacgctctatgctccagtcgattttcagagagacgatgcctgagccatccggcttacgatactgacacagggattcgtataaacgcatggcatacggattggtgatttcttttgtttcactaagccgaaactgcgtaaaccggttgtgggtatcggcacgattaatgtcgtatgtgctgctgatgtgctgattgttcccacgcctgctgagttgtttgactacacctccgcactgcagtttttcgatatgcttcgtgatctgctcaagaacgttgatcttaaagggttcgagcctgatgtacgtattttgaacatttttaagaaccatgcttcccagcgcatccggaatttgctcctctatccacgggggctgagagccatcactattgctgtatttggtaagcaaaatacgtacatcaggctcgaaccctttaagatcaacgttcttgagcagatcacgaagcatatcgaaaaactgcagtgcggaggtgtagtcaaacaactcagcaggcgtgggaacaattagtacatcagcagcacatactaccctcatcgtgccgatacccaggttaggcgcgctgtcaataactaccccaccatagtcatgagcaacagtttcaatggccagtaggagcatcaagtgtggatcggtgggcagtttaccttcatcaaatttgcccattaactcagtttcaatacggtgcagagccagacaggaaggaataatgtcaagctctggccagcaagtgggcgctcctgcataagtgacatctgccccgccctgccactcatcgcagtactgttgtaattcattaagcattctgccgacatggaagccatcacaaacggcatgatgaacctgaatcgccagcggcatcagcaccttgtcgccttgcgtataatatttgcccatggtccacacgggggcgaagaagttgtccatattggccacgtttaaatcaaaactggtgaaactcacccagggattggctgagacgaaaaacatattctcaataaaccgtttgataaaccaaggaaaagattcatagcctttttcatcgccggcatcctcttcagggcgataaaaaaccacttccttccccgcgaaactcttcaatgcctgccgtatatccttactggcttccgcagaggtcaatccgaatatttcagcatatttagcaacatggatctcgcagataccgtcatgttcntgtagggtgccatcagattctctgatctggtcaacgaacagatacagcatacgtttttgatcccgcgacacactatatgccgcctcagtgaggtcgtttgactggacgattcgcgggctatttttacgtttcttgtgattgataaccgctgtttccgccat

SEQ ID NO: 13440 - DNA, 1980 bp, Homo sapiens; identical to SEQ ID NO: 5204
  SIMILAR (190)..(786): 951254mologous to Cloning vector pZC320 SopB,accession number U26464,Smith-Waterman Score=932.
  misc_feature (1)...(1980): n = a,t,c or g

SEQ ID NO: 13441 - DNA, 1350 bp, Homo sapiens
  SIMILAR (876)..(1628): 1001254mologous to Homo sapiens Human sphingosine kinase C,accession number Y96059,Smith-Waterman Score=1356.
  misc_feature (1)...(1350): n = a,t,c or g
tcaggataattgtttcagcatcgcaaccgcatcagactccggcatcgcaaactgcacccggtgccgggcagccacatccagcgcaaaaaccttcgtgtagacttccgttgaactgatggacttatgtcccatcaggctttgcagaactttcagcggtataccggcatacagcatgtgcatcgcataggaatggcggaacgtatgtggtgtgaccggaacagagaacgtcacaccgtcagcagcagcggcggcaaccgcctccccaatccaggtcctgaccgttctgtccgtcacttcccagatccgcgctttctctgtccttcctgtgcgacggttacgccgctccatgagcttatcgcgaataaatacntgaatcgccagcggcatcagcaccttgtcgccttgcgtataatatttgcccatggtgaaaacgggggcgaagaagttgtccacattggccacgtttaaatcaaaactggtgaaactcacccagggattggctgagacgaaaaacatattctcaataaacccatgattacgaattcgagctcggtacccgatggggatcctgttcgagttcggcatcgtcggcgcggcgctgatcctggcgatcccggtgcgcggtgtgtgggtgttccacacgctgcgccggatgcgcgacgacccgttcgtcgccgcgctggggggtcctctagagtccacatacagacattcaagctgcaggaagcggcggcggaagtcaggcatacgctggtaactttgaggcagctggtaacgctctatgatccagtcgattttcagagagacgatgcctgagccatccggcttacgatactcacacagggattcgtataaacgcatggcatacggattggtgatggagacctcccccatttcacacaggaaacagctatgaccatgattacgaattcgagctcggtacccgaaattgccgatgggagtcgccgtcgtaaagctgctgcacttaccgaaagtgattatcgtgttctggttggcgagctggatgatgagcagatggccagtgcataaacgcgggtcataaatgacgaaggctatcgccattgcacagtttaatgatgacagccggaaagcgaggaaaataaccgcgcgagcattttttatgtccatgcatccgcaggcatcggaatcttgctcatccattcgtggggtgtaagagccattactatttatgtatctggtaagatagatacgtacttcaggctggaaccctttaatatcatcgatcttgagcagatcacgaagcatatctaagtaccggtcctcgatttcccataccggggtgcggtagtcgccttgctttctcggcat

SEQ ID NO: 13442 - DNA, 1932 bp, Homo sapiens; identical to SEQ ID NO: 5205
  SIMILAR (695)..(1447): 1001254mologous to Homo sapiens Human sphingosine kinase C,accession number Y96059,Smith-Waterman Score=1356.
  misc_feature (1)...(1932): n = a,t,c or g

SEQ ID NO: 13443 - DNA, 1386 bp, Homo sapiens; identical to SEQ ID NO: 5206
  SIMILAR (109)..(588): 961254mologous to unidentified cloning vector 29kD protein essential for the replication of mini F plasmid,accession number AB015619,Smith-Waterman Score=792.
  misc_feature (1)...(1386): n = a,t,c or g

SEQ ID NO: 13444 - DNA, 1009 bp, Homo sapiens
  SIMILAR (371)..(1003): 941254mologous to unidentified cloning vector 29kD protein essential for the replication of mini F plasmid,accession number AB015619,Smith-Waterman Score=1051.
ctggccgctgcaaaacgctgacggaacagtagctgaatacaacggctatcacgttgtgtttgctcttgcgggaagcccgaaagacgctgatgacacatcaatctacatgttttatcaaaaggtcggcgacaactcaatcgacagctggaaaaacgcgggccgtgtctttaaagacagcgataagttcgacgccaacgatccgatcctgaaagatcagacgcaagaatggtccggttctgcaacctttacatctgacggaaaaatccgtttattctacactgactattccggtaaacattacggcaaacaaagcctgacaacagcgcagtgtgacaatctaaaaacttgtcacacttcacatggatctgtcatggcggaaacagcggttatcaatcacaagaaacgtaaaaatagcccgcgaatcgtccagtcaaacgacctcactgaggcggcatatagtctctcccgggatcaaaaacgtatgctgtatctgttcgttgaccagatcagaaaatctgatggcaccctacaggaacatgacggtatctgcgagatccatgttgctaaatatgctgaaatattcggattgacctctgcggaagccagtaaggatatacggcaggcattgaagagtttcgcggggaaagaagtggttttttatcgccctgaagaggatgccggcgatgaaaaaagctatgaatcttttccttggtttatcaaacgtgcgcacagtccatccagagggctttacagtgtacatatcaacccatatctcattcccttctttatcgggttacagaaccgggttacgcagtttcggcttagtgaaacaaaagaaattaccaatccgtatgccatgcgtttataccaatccctgtgtcagtatcgtaagccggatggctcaagcatcgtctctctggaaatcgactgggtcataaagcggtaccagctgcctcaaaattaccagcgtatgcctgacttcccccgccgcttctggagggtgtggtaa

SEQ ID NO: 13445 - DNA, 2040 bp, Homo sapiens
  SIMILAR (310)..(957): 401254mologous to Homo sapiens Human HE6 receptor,accession number B01247,Smith-Waterman Score=386.
  misc_feature (1)...(2040): n = a,t,c or g
atgggcacaggggattttatctgcatttccatgactggaggggcgccctgggggttcagattgcaaggtggcaaggagcagaagcagcccttacaagttgcaaagtgggccaatctaaaacctggtcccccttcacatggatctgtcatggcggaaacagcggttatcaatcacaagaaacgtaaaaatagcccgcgaatcgtccagtcaaacgacctcactgaggcggcatatagtctctcccgggatcaaaaacgtatgctgtatctgttcgttgaccagatcagaaaatctgatggcaccctacaggaacatgacggtatctgcgagatccatgttgctaaatatgctgaaatattcggattgacctctgcggaagccagtaaggatatacggcaggcattgaagagtttcgcggggaaggaagtggttttttatcgccctgaagaggatgccggcgatgaaaaaggctatgaatcttttccttggtttatcaaacgtgcgcacagtccatccagagggctttacagtgtacatatcaacccatatctcattcccttctttatcgggttacagaaccggtttacgcagtttcggcttagtgaaacaaaagaaatcaccaatccgtatgccatgcgtttatacgaatccctgtgtcagtatcgcatcgtctctctgaaaatcgactggatcatagagcgttaccagctgcctcaaagttaccagcgtatgcctgacttccgccgccgcttcctgcaggtacacagaaagagaaagaggctttctcatgagctcaactttttcagcattttacaatataggggagctcttacagtctatctgcgaggagttacagaaggtcccaaccctttggaaggccaagaagggcggttcacaagttcaggagatcaagcccttcctggtggggagacacaaaggcagccagacgtggagaggagcacatcagcggataaagatacaagcagctggacagcgagaggacgtggagggagaatgccagtggaagagcacactgacagacatgggaagaggcggagtttggccggggcagtcggagacccagggccactgagtgaggatgccggcgatgaaaaaggctatgaatcttttccttggtttatcaaacgtgcgcacagtccatccagagggctttacagtgtacatatcaacccatatctcattcccttctttatcgggttacagaaccggtttacgcagtttcggcttagtgaaacaaaagaaatcaccaatccgtatgccatgcgtttatacgaatccctntatcgtaagccggatggctcaggcatcgtctctctgaaaatcgactggatcatagagcgttaccagctgcctcaaagttaccagcgtatgcctgacttccgccgccgcttcctgcaggtctgtgttaatgagatcaacagcagaactccaatgcgcctctcatacattgagaaaaagaaaggccgccagacgactcatatcggcaatgaaaggcgggtaagctggttatatgggatagtggtcccccctggtacccccgttttccatgagcaaattgaacgttttcatcgctttggagtgaatcccacgacgatttccggcagtttctacacatatattcgcaagatgtggcgtgttacgcccaatccctgggtgagtttcaccagttttgatttaaacgtggccaatatggacaacttcttcgcccccgttttcaccatgggcaaatattatacgcaaggcgacaaggtgctgatgccgctggcgattcagggattttgcccgatttcggaaaccaccatcaaacaggattttcgcctgctggggcaaaccagcgtggaccgcttgctgcaactctctcagggccaggcggtgaagggcaatcagctgttgcccgtctcactggtgaaaagaaaaaccaccctggcgcccaatacgcaaaccgcctctccccgcgcgttggccgattcattaatgcagctggcacgacaggtttcccgactggaaagcgggcagtga

SEQ ID NO: 13446 - DNA, 657 bp, Homo sapiens
  SIMILAR (1)..(471): 911254mologous to Cloning vector pZC320 SopA,accession number U26464,Smith-Waterman Score=725.
  misc_feature (1)...(657): n = a,t,c or g
atgaagcgtgcgcctgttattccaaaacatacgctcaatactcaaccggttgaagatacttcgttatcgacaccagctgccccgatggtggattcgttaattgcgcgcgtaggagtaatggctcgcggtaatgccattactttgcctgtatgtggtcgggatgtgaagtttactcttgaagtgctccggggtgatagtgttgagaagacctctcgggtatggtcaggtaatgaacgtgaccaggagctgcttactgaggacgcactggatgatctcatcccttcttttctactgactggtcaacagacaccggcgttcggtcgaagagtatctggtgtcatagaaattgccgatgggagtcgccgtcgtaaagctgctgcacttaccgaaagtgattatcgtgttctcctcggcgagctgantagtgagcagaaaactgcattatccagattgggtaacgattatcgcccaacaagtgcttatgaacgtggtcagcgttatgcaagccgattgcagaatgaactcgctggaaatatttctgcgctggctgatgcggaaaatatgtcttccaacacgggaaacaaaaaacggataccaaggcgaagaatctttattgaacaaagggaactacggcggcggcaagaacttcttcggtaa

SEQ ID NO: 13447 - DNA, 783 bp, Homo sapiens
  SIMILAR (1)..(660): 981254mologous to Cloning vector pZC320 SopB,accession number U26464,Smith-Waterman Score=1079.
atgaagcgtgcgcctgttattccaaaacatacgctcaatactcaaccggttgaagatacttcgttatcgacaccagctgccccgatggtggattcgttaattgcgcgcgtaggagtaatggctcgcggtaatgccattactttgcctgtatgtggtcgggatgtgaagtttactcttgaagtgctccggggtgatagtgttgagaagacctctcgggtatggtcaggtaatgaacgtgaccaggagctgcttactgaggacgcactggatgatctcatcccttcttttctactgactggtcaacagacaccggcgttcggtcgaagagtatctggtgtcatagaaattgccgatgggagtcgccgtcgtaaagctgctgcacttaccgaaagtgattatcgtgttctggttggcgagctggatgatgagcagatggctgcattatccagattgggtaacgattatcgcccaacaagtgcttatgaacgtggtcagcgttatgcaagccgattgcagaatgaatttgctggaaatatttctgcgctggctgatgcggataatatttcacgtaagattattacccgctgtatcaacaccgacaaattgcctgaatcagttgttgctcttttttctcactccggtgaactatctgcccggtcagtctgggaccacggtcccactcgtatcgtcggtctgattattagtctgggaccacggtcccactcgtatcgtcggtctgataatcagactgggaccacggtcccactcgtatcgtcggtctga

SEQ ID NO: 13448 - DNA, 894 bp, Homo sapiens
  SIMILAR (1003)..(1347): 1001254mologous to Plasmid F Protein D,accession number M12987,Smith-Waterman Score=584.
atgaagcgtgcgcctgttattccaaaacatacgctcaatactcaaccggttgaagatacttcgttatcgacaccagctgccccgatggtggattcgttaattgcgcgcgtaggagtaatggctcgcggtaatgccattactttgcctgtatgtgggggggatgtgaagtttactcttgaagtgctccggggtgatagtgttgagaagacctctcgggtatggtcaggtaatgaacgtgaccaggagctgcttactgaggacgcactggatgatctcatcccttcttttctactgactggtcaacagacaccggcgttcggtcgaagagtatctggtgtcatagaaattgccgatgggagtcgccgtcgtaaagctgctgcacttaccgaaagtgattatcgtgttctggttggcgagctggatgatgagcagatggctgcattatccagattgggtaacgattatcgcccaacaagtgcttatgaacgtgggcagcgttatgccagccgattgcagaatgaatttgctggaaatatttctgcgctggctgatgcggaaaatttttacaaccggtttacgcagtttcggcttagtgaaacaaaagaaatcaccaatccgtatgccatgcgtttatacgaatccctgtgtcagtatcgtaagccggatgggtcaggcatcgtctctctgaaaatcgactggatcatagagcgttaccagctgcctcaaagttaccagcgtatgcctgacttccgccgccgcttcctgcaggtctgtgttaatgagatcaacagcagaactccaatgcgcctctcatacattgagaaaaagaaaggccgccagacgactcatatcgtattttccttccgcgatatcacttccatgacgacaggatag

SEQ ID NO: 13449 - DNA, 1053 bp, Homo sapiens; identical to SEQ ID NO: 4282
  SIMILAR (496)..(1050): 991254mologous to Cloning vector pZC320 SopB,accession number U26464,Smith-Waterman Score=920.

SEQ ID NO: 13450 - DNA, 1869 bp, Homo sapiens
  SIMILAR (1)..(360): 891254mologous to Homo sapiens 08-APR-1996 ATM mutant G9170C coding sequence,accession number T68784_cd1,Smith-Waterman Score= 558.
  misc_feature (1)...(1869): n = a,t,c or g
atggcggaaacagcggttatcaatcacaagaaacgtaaaaatagcccgcgaatcgtccagtcaaacgacctcactgaggcggcatatagtctctcccgggatcaaaaacgtatgctgtatctgttcgttgaccagatcagaaaatctgatggcaccctacaggaacatgacggtatctgcgagatccatgttgctaaatatgctgaaatattcggattgacctctgcggaagccagtaaggatatacggcaggcattgaagagtttcgcggggaaggaagtggttttttatcgccctgaagaggatgccggcgatgaaaaaggctatgaatcttttccttggtttatcaaacgtgcgcacagtccatccagagggctttacagtgtacatatcaacccatatctcattcccttctttatcgggttacagaaccggtttacgcagtttcggcttagtgaaacaaaagaaatcaccaatccgtatgccatgcgtttatacgaatccctgtgtcagtatcgtaagccggatggctcaggcatcgtctctctgaaaatcgactggatcatagagcgttaccagctgcctcaaagttaccagcgagtgtggaccccaggcatcaactgtccagagccctgtccaggagtgtggaccccaggcatcaactgtccaggggcctggggcatccatgggccacacggcagcgctgaaaacacagggcccttgcacccagggcagacctcagcacagttggagacatcactcctgccctccttgcgctcggcccgagagctagagcttgctcagctcagccccaggaggaagcagaaccgcagcctccagaacattggggtgaccccgtcgctgagggtcccctggcccaaggccagcaacgttcagcagtttatcgatgaaggcaattatacatccggcgacaaccatacgctgagagaccctcactacgttgaagacaaaggccataaataccttgtattcgaagccaacacgggaacagaaaacggataccaaggcgaagaatctttatttaacaaagcgtactacggcggcggcacgaacttcttccgtaaagaaagccagaagcttcagcagagcgctaaaaaacgcgatgctgagttagcgaacggcgccctcggtatcatagagttaaataatgattacacattgaaaaaagtaatgaagccgctgatcacttcaaacacggtaactgatgaaatcgagcgcgcgaatgttttcaaaatgaacggcaaatggtacttgttcactgattcacgcggttcaaaaatgacgatcgatgtgccgcaagccaaaagcaacaatgtgggtatcacaagctacatgacaaacagaagcttcttcgaggataaaaagccacatttgcgccaggcttcttatggaacatcaaagccattaaaacttcccnagatccccggcacgattaatgtcgtatgtgctgctgatgtgctgattgttcccacgcctgctgagttgtttgactacacctccgcactgcagtttttcgatatgcttcgtgatctgctcaagaacgttgatcttaaagggttcgagcctgatgtacgtattttgcttaccaaatacagcaatagtaatggctctcagtccccgtggatggaggagcaaattcgggatgcctggggaagcatggttctaaaaaatgttgtacgtgaaacggatgaagttggtaaaggtcagatccggatgagaactgtttttgaacaggccattgatcaacgctcttcaactggtgcctggagaaatgctctttctatttgggaacctgtctgcaatgaaattttcgatcgtctgattaaaccacgctgggagattagataa

SEQ ID NO: 13451 - DNA, 1101 bp, Homo sapiens
  SIMILAR (167)..(544): 921254mologous to Plasmid F Protein D,accession number M12987,Smith-Waterman Score=586.
atggtggattcgttaattgcgcgcgtaggagtaatggctcgcggtaatgccattactttgcctgtatgtggtcgggatgtgaagtttactcttgaagtgctccggggtgatagtgttgagaagacctctcggacaccggcgttcggtcgaagagtatctggtgtcatagaaattgccgatgggagtcgccgtcgtaaagctgctgcacttaccgaaagtgattatcgtgttctggttggcgagctggatgatgagcagatggctgcattatccagattgggtaacgattatcgcccaacaagtgcttatgaacgtggtcagcgttatgcaagccgattgcagaatgaatttgctggaaatatttctgcgctggctgatgcggaaaatatttcactcgtctctagaggatccccgaaattggcatttgtgaattgtggaggatgtcagcaactggaggaagacaataaattacttgtggaagagaattcctgggtttgggaaaaaatgactatgaaccggtttacgcagtttcggcttagtgaaacaaaagaaatcaccaatccgtatgccatgcgtttatacgaatccctgtgtcagtatcgtaagccggatggctcaggcatcgtctctctgaaaatcgactggatcatagagcgttaccagctgcctcaaagttaccagcgtatgcctgacttccgccgccgcttcctgcagaggatcccctacagtgtacatatcaacccatatctcattcccttctttatcgggttacagaaccggtttacgcagtttcggcttagtgaaacaaaagaaatcaccaatccgtatgccatgcgtttatacgaatccctgtgtcagtatcgtaagccggatggctcaggcatcgtctctctgaaaatcgactggatcatagagcgttaccagctgcctcaaagttaccagcgtatgcctgacttccgccgccgcttcctgcaggtctgtgttaatgagatcaacagcagaactccaatgcgcctctcatacattgagaaaaagaaaggccgccagacgactcatatcgtattttccttccgcgatatcacttccatgacgacaggatag

SEQ ID NO: 13452 - DNA, 436 bp, Homo sapiens; identical to SEQ ID NO: 5000
  SIMILAR (187)..(504): 1001254mologous to Homo sapiens GDNF receptor alpha,accession number U95847,Smith-Waterman Score=595.
  misc_feature (1)...(436): n = a,t,c or g

SEQ ID NO: 13453 - DNA, 376 bp, Homo sapiens
  misc_feature (1)...(376): n = a,t,c or g
aaccagcatggataaaggcctacaaggcgctctaaaaaagaagatctaaaanctataaaaaaaataattataaaaatatccccgtggataagtggataaccccaagggaagttttttcaggcatcgtgtgtaagcagaatatataagtgctgttccctggtnnnnnnnnnnnnnnnnnnnnnnnnnnnnnnnnnnnnnnnnnnnnnnnnnnnnnnnnngctgtaaaaggacagaccacatcatggttctgtgttcattaggttgttctgtccattgctgacataatccgctccacttcaacgtaacaccgcacgaagatttttattgttcctgaaggcatattcaaatcgttttcgttaccgcttgcaggcatcat

SEQ ID NO: 13454 - DNA, 647 bp, Homo sapiens
  misc_feature (1)...(647): n = a,t,c or g
agtttgtagattgtcncnctaaataaaaaagagtcaataagcaggaatatctgtgtgaaaaacatgcctcttctgagggcnatttgtcacagggttaagggcaatttgtcacagacaggactgtcatttgagggtgatttgtcacactgaaaggcaatttgtcacaacaccttctctaaacccagcatggataaaggcctacaaggcgctctaaaaaagaaggttttaaaacctataaaaaaaatatttataaaaatatccccgtggataagtggataaccccaagggaagttttttcaggcatcgtgtgtaagcagaatatataagtgctgttccctggtnnnnnnnnnnnnnnnnnnnnnnnnnnnnnnnnnnnnnnnnnnnnnnnnnnnnnnnnngctgtaaaaggacagaccacatcatggttctgtgttcattaggttgttctgtccattgctgacataatccgctccacttcaacgtaacaccgcacgaagatttctattgttcctgaaggcatattcaaatcgttttcgttaccgcttccaggcatcatgacagaacactacttcctataaacgctacacaggctcctgagattaannnnnnnnnnnnnnnnnnnnnnnnnnnnnnnnnnnggtcagaca

SEQ ID NO: 13455 - DNA, 406 bp, Homo sapiens
  SIMILAR (526)..(870): 1001254mologous to Plasmid F Protein D,accession number M12987,Smith-Waterman Score=584.
  misc_feature (1)...(406): n = a,t,c or g
aacaagttggcttatagagattataaaacttataaaaaaaataattataaaaatatccccgtggataagtggataaccccaagggaagttttttcaggcatcgtgtgtaagcagaatatataagtgctgttccctggtnnnnnnnnnnnnnnnnnnnnnnnnnnnnnnnnnnnnnnnnnnnnnnnnnnnnnnnnngctgtaaaaggacagaccacatcatggttctgtgttcattaggttgttctgtccattgctgacataatccgctccacttcaacgtaacaccgcacgaagatttctattgttcctgaaggcatattcaaatcgttttcgttaccgcttgcaggcatcatgacagaacagtacttcctataaacgctacacaggctcctgagattaataatgc

SEQ ID NO: 13456 - DNA, 1902 bp, Homo sapiens; identical to SEQ ID NO: 4029
  SIMILAR (1078)..(1422): 1001254mologous to Plasmid F Protein D,accession number M12987,Smith-Waterman Score=584.

SEQ ID NO: 13457 - DNA, 1044 bp, Homo sapiens
  SIMILAR (292)..(1041): 971254mologous to unidentified cloning vector 29kD protein essential for the replication of mini F plasmid,accession number AB015619,Smith-Waterman Score=1267.
  misc_feature (1)...(1044): n = a,t,c or g
atgatcggtatggagctgccaggcctggaaggaacagaactggaggggtgtcacgagcgggaggtcgtgtacgatcgggtgcgcgtgttcgaaaagaggggagaggctcgacatgtcgaggcgcgaagtccggggggtgggagtgagaaacgcggttgggggggagcccgtcatcagcggatgtgtaggaaaggcgccgacaacggaggggcgggccgcgcccgaagggtggcccgactgcgccagctggcgtcgagggccatcggcaggcgcaagggggcggtactttatcaaacaccggttatcaatcacaagaaacgtaaaaatagcccgcgaatcgtccagtcaaacgatctcactgaggcggcatatagtctctcccgggatcaaaaacgtatgctgtatctgttcgttgaccagatcagaaaatctgatggcaccctacaggaacatgacggtatctgcgagatccatgttgctaaatatgctgaaatattcggattgancctctggcgggaagccagtaaggatatacggcaggcattgaagagtttcgcggggaaggaagtggttttttatcgccctgaagaggatgccggcgatgaaaaaggctatgaatcttttccttggtttatcaaacgtgcgcacagtccatccagagggctttacagtgtacatatcaacccatatctcattcccttctttatcgggttacagaaccggtttacgcagtttcggcttagtgaaacaaaagaaatcaccaatccgtatgccatgcgtttatacgaatccctgtgtcagtatcgtaagccggatggctcaggcatcgtctctctgaaaatcgactggatcatagagcgttaccagctgcctcaaagttaccagcgtatgcctgacttccgccgccgcttcctgcaggtctgtgttaatgagatcaacagcagaactccaatgcgcctctcatacattgagaaaaagaaaggccgccagacgactcatatcgtattttccttccgcgatatcacttccatgacgacaggatag

SEQ ID NO: 13458 - DNA, 1425 bp, Homo sapiens; identical to SEQ ID NO: 5017
  SIMILAR (1255)..(1599): 1001254mologous to Plasmid F Protein D,accession number M12987,Smith-Waterman Score=584.

SEQ ID NO: 13459 - DNA, 1002 bp, Homo sapiens
  SIMILAR (259)..(999): 891254mologous to unidentified cloning vector 29kD protein essential for the replication of mini F plasmid,accession number AB015619,Smith-Waterman Score=1136.
atggcagtcccagtcccaaaagcagctcaggacatttgtcccacttctcccactctggccagagcgctcaggattggggttccgtttgacagatatggaaatggggacttcaccgaagccaggcgctttggcacgaaatgcgccggctgcgcgcaaggcatctcgcccagcgacctggtgcgcaaggcccggagcaaagtctttcacctcaactgtttcacctgcatggtgtgtaacaagcagctgtccaccggcgaggagctctacgtcatcgacgagaacaagttcgtgtgcaaagacgactacctgagctcatccagcctcaaggagggcagcctcaactcagcagttcatcatatgctgtatctgttcgttgaccagatcagaaaatctgatggcaccctacaggaacatgacggtatctgcgagatccatgttgctaaatatgctgaaatattcggattgacctctgcggaagccagtaaggatatacggcaggcattgaagagtttcgcggggaaggaagtggttttttatcgccctgaagaggatgccggcgatgaaaaaggctatgaatcttttccttggtttatcaaacgtgcgcacagtccatccagagggctttacagtgtacatatcaacccatatctcattcccttctttatcgggttacagaaccggtttacgcagtttcggcttagtgaaacaaaagaaatcaccaatccgtatgccatgcgtttatacgaatccctgtgtcagtatcgtaagccggatggctcaggcatcgtctctctgaaaatcgactggatcatagagcgttaccagctgcctcaaagttaccagcgtatgcctgacttccgccgccgcttcctgcaggtctgtgttaatgagatcaacagcagaactccaatgcgcctctcatacattgagaaaaagaaaggccgccagacgactcatatcgtattttccttccgcgatatcacttccatgacgacaggatag

SEQ ID NO: 13460 - DNA, 1602 bp, Homo sapiens; identical to SEQ ID NO: 13207
  SIMILAR (895)..(1278): 921254mologous to Plasmid F resolvase,accession number AP001918,Smith-Waterman Score=585.

SEQ ID NO: 13461 - DNA, 1560 bp, Homo sapiens
  SIMILAR (421)..(1209): 761254mologous to Cloning vector pZC320 SopB,accession number U26464,Smith-Waterman Score=939.
atgcgcgccgaacagccggtacagtacacggcagctctcgaaactagcacacccttccctacggccacccaagcaggggacgttgccagctaccgcgttgtctctgggtgcctctggacggccgaggatggcacgggcttagtatatccctccgggacagcgccgaccccgcaccgccccgccgaccccgccctctcccacctcggccgcatcccccgcatgcatcccgggccacagtccccgttccgccacctcgctcccggcccggcagccgccgccctgcggggcggggaccacgggtccctccacatcctcgcggcctgccggacagtcctgcgggcggggccccaacgcctaggcggtcccgggagccctgggccgcctccccccgccccccagggctgtcacccgctggcgcgtggggctcctactgggaccccggtctttggacctggcccatgtggccccagtgcatgcggcctcgccattctccgctcagggcccgaggggccgcccttcctggaggcctccccaggacccacccacctctgggacttgcgggggcatctcctgcaaatggacgccaagtctggggaaagtttctggcgatgtcaaggattatcctggactatctatgtgggtgcaacgcaatcacgatggtcctttaaatgcggaagaggtaggcaggaagtcagagtcagagagaaatatgaagttgctatactgctggctttgaagatgaaggaaggggctgcaagccagtgtgacaatctaaaaacttgtcacacttcacatggatctgtcatggcggaaacagcggttatcaatcacaagaaacgtaaaaatagcccgcgaatcgtccagtcaaacgacctcactgaggcggcatatagtctctcccgggatcaaaaacgtatgctgtatctgttcgttgaccagatcagaaaatctgatggcaccctacaggaacatgacggtatctgcgagatccatgttgctaaatatgctgaaatattcggattgacctctgcggaagccagtaaggatatacggcaggcattgaagagtttcgcggggaaggaagtggttttttatcgccctgaagaggatgccggcgatgaaaaaggctatgaatcttttccttggtttatcaaacgtgcgcacagtccatccagagggctttacagtgtacatatcaacccatatctcattcccttctttatcgggttacagaaccggtttacgcagtttcggcttagtgaaacaaaagaaatcaccaatccgtatgccatgcgtttatacgaatccctgtgtcagtatcgtaagccggatggctcaggcatcgtctctctgaaaatcgactggatcatagagcgttaccagctgcctcaaagttaccagcgtatgcctgacttccgccgccgcttcctgcaggtctgtgttaatgagatcaacagcagaactccaatgcgcctctcatacattgagaaaaagaaaggccgccagacgactcatatcgtattttccttccgcgatatcacttccatgacgacaggatag

SEQ ID NO: 13462 - DNA, 1281 bp, Homo sapiens; identical to SEQ ID NO: 5008
  SIMILAR (361)..(705): 981254mologous to Plasmid F Protein D,accession number M12987,Smith-Waterman Score=572.

SEQ ID NO: 13463 - DNA, 895 bp, Homo sapiens; identical to SEQ ID NO: 5009
  SIMILAR (679)..(834): 401254mologous to Homo sapiens profilaggrin,accession number M60503,Smith-Waterman Score=85.

SEQ ID NO: 13464 - DNA, 1125 bp, Homo sapiens
  SIMILAR (370)..(1122): 991254mologous to unidentified cloning vector 29kD protein essential for the replication of mini F plasmid,accession number AB015619,Smith-Waterman Score=1301.
atggaagaaaatgaaagagatttagaaataaacatgattaacatgtccaaagagctaaaggtagaaaatattaaaaaacacataggcatgcttgaaaaggatgaaattgaaatcatagtgacaaaaagtatactcattgaaatagaaatcccaacacagtgccttagaaatttaaatacccttcatctggctgcttctgcaggcaaccacatgtcaaacactgcttgttggtatggctgtgaggacttcacttcagtgagcacctttgcacaccagggagtgggaagctgggatgcatatgaaccagcagcctctttgttattaagctgtgacaatctaaaaacttgtcacacttcacatggatctgtcatggcggaaacagcggttatcaatcacaagaaacgtaaaaatagcccgcgaatcgtccagtcaaacgacctcactgaggcggcatatagtctctcccgggatcaaaaacgtatgctgtatctgttcgttgaccagatcagaaaatctgatggcaccctacaggaacatgacggtatctgcgagatccatgttgctaactatgctgaaatatacggattgacctctgcggaagccagtaaggatatacggcaggcattgaagagtttcgcggggaaggaagtggttttttatcgccctgaagaggatgccggcgatgaaaaaggctatgaatcttttccttggtttatcaaacgtgcgcacagtccatccagagggctttacagtgtacatatcaacccatatctcattcccttctttatcgggttacagaaccggtttacgcagtttcggcttagtgaaacaaaagaaatcaccaatccgtatgccatgcgtttatacgaatccctgtgtcagtatcgtaagccggatggctcaggcatcgtctctctgaaaatcgactggatcatagagcgttaccagctgcctcaaagttaccagcgtatgcctgacttccgccgccgcttcctgcaggtctgtgttaatgagatcaacagcagaactccaatgcgcctctcatacattgagaaaaagaaaggccgccagacgactcatatcgtattttccttccgcgatatcacttccatgacgacaggatag

SEQ ID NO: 13465 - DNA, 1131 bp, Homo sapiens
  SIMILAR (2537)..(4933): 881254mologous to Homo sapiens putative p150,accession number U93567,Smith-Waterman Score=3628.
atggtggattcgttaatggcgcgcgtaggagtaatggctcgcggtaatcccattactttgcctgtatgtggtcgggatgtgaagtttactcttgaagtgctccggggtgatagtgttgagaagacctctcggacaccggcgttcggtcgaagagtatctggtgtcatagaaattgccgatgggagtcgccgtcgtaaagctgctgcacttaccgaaagtgattatcgtgttctggttggcgagctggatgatgagcagatggctgcattatccagattgggtaacgattatcgcccaacaagtgcttatgaacgtggtcagcgttatgcaagccgattgcagaatgaatttgctccccatatttctgcgctggctgatgcggaaaatataatcacgtgcgcctttattccaaaacatacgcccaatatcaaccggttgaaagatatttcgttaacgacaccagttgccccgatggtggattcgttatttgcgcgcgtaggagtaatggctcgcggtaatgccaatactttgcctgtatgtggtcgggatgtgaagtttactcttaaagtgctccggggtgatagtgttgagaagacctctcgggtatggtcaggtaatgaacgtgaccaggagctgcttactgaggacgcactggatgatctcatcccttcttttctactgactggtcaacagacaccggcgttcggtcgaagagtatctggtgtcatagaaattgccgatgggagtcgccgtcgtaaagctgctgcacttaccgaaagtgattatcgtgttctggttggcgagctggatgatgagcagatggctgcattatccagattgggtaacgattatcgcccaacaagtgcttatgcacgtggtcagcgttatgcaagccgattgcagaatgaattcgccccccacatttctgcgctggctgatgcggaaaataaaaaacgtaaaaaaattacccgctgtatcaacaccgccaaattgcctaaatcagttgttgctcttttttctcaccccggtgaactatctgccccgtcaggaacgggaaaggaagtaattcttgaagtgcagctgattcacaatgtattccaatacaccttgcttgcttgttttgggacctga

SEQ ID NO: 13466 - DNA, 1188 bp, Homo sapiens
  SIMILAR (622)..(1146): 571254mologous to Homo sapiens p40,accession number U93569,Smith-Waterman Score=436.
atgaagcgtgcgcctgttattccaaaacatacgctcaatactcaaccggttgaagatacttcgttatcttcaccagctgtttcgatggtggattcgttaattgcgcgcgtgggagtaatggctcgcggtaatgccattactttgcctgtatgtggtcgggatgtgaagtttactcttgaagtgctccggggtgatagtgttgagaagacctctcgggtatggtcaggtaatgaacgtgaccaggagctgcttactgaggacgcactggatgatctcatcccttcttttctactgactggtcaacagacaccggcgttcggtcgaagagtatctggtgtcatagaaattgccgatgggagtcgccgtcgtaaagctgctgcacttaccgaaagtgattatcgtgttctggttggcgagctggatgatgagcagatggctgaattatccagattgggtaacgattatcgcccaacaagtgcttatgaacgtggtcagcgttatgcaagccgattgcagaaagaatttgctggaaatatttctgcgctggctgatgcggaaaaatatttacgtatcagtgataaacttgggaataatacagaaacatcaatgagccaaaagccttgcaaaatgaaaaggataattctagagaagagttggcagtttgaaaaatggatcatcatagtgatcttatttcattatggtgaaagttggaacctcttacgtgccgatcaacgtctcattttcgccaaaagttggcccagggcttcccggtatcaacagggacaccaggatttatttattctgcgaagtgatcttccgtcacaggtatttattcgcgataagctcatggagcggcgtaaccgtcgcacaggaaggacagagaaagcgcggatctgggaagtgacggacagaacggtcaggacctggattggggaggcggttgccgccgctgctgctgacggtgtgacgttctctgttccggtcacaccacatacgttccgccattcctatgcgatgcacatgctgtatgccggtataccgctgaaagttctgcaaagcctgatgggacataagtccatcaattcaacggaagtctacacgaaagtttttgcgctggatgtggctgcccggcaccgggtgcagtttgcgatgccggaatctgatgccgttgcaatgctatccttttaa

SEQ ID NO: 13467 - DNA, 987 bp, Homo sapiens; identical to SEQ ID NO: 13228
  SIMILAR (658)..(984): 991254mologous to unidentified cloning vector 29kD protein essential for the replication of mini F plasmid,accession number AB015619,Smith-Waterman Score=568.

SEQ ID NO: 13468 - DNA, 3561 bp, Homo sapiens
  SIMILAR (1874)..(4681): 981254mologous to Homo sapiens putative p150,accession number U93563,Smith-Waterman Score=4773.
atgcttcaaagcaaccgaaccgccgccagccattcaccatccatccagccagccatccagccagccatccagccagccaaccaactatccatccacaatttgtggacacaattccggcattcaaccaaaattccagttgaatgggtgaatggtgaatggctgaatggacgaatgccaggggatcatcatgaatggcaatgcaactatcagccagccatccagccagccatccagccagccaaccaactatccatccacaatttgtggacacaattccggcattcaaccaaaattccagttgaatgggtgaatggtgaatggctgaatggacgaatgacaaaggatcatcatgaatggcaatgcaactatcagccagccatccagccagccatccagccagccaaccaactatccatccacaatttgtggacacaattccggcattcaaccaaaattccagttgaatgggtgaatggtgaatggctgaatggacgaaagcaaggggatcatcatgaatggcaatgcaactatcagccagccatccagccagccatccagccagccaaccaactatccatccacaatttgtggacacaattccggcattcaaccaaaattccagttgaatgggtgaatggtgaatggctgaatggacgaatgccaggggatcatcatgaatggcaatgcaactatcagccagccatccagccagccatccagccagccaaccaactatccatccacaatttgtggacacaattccggcattcaaccaaaattccagttgaatgggtgaatggtgaatggctgaatggacgaatgccaggggatcatcatgaatggcaatgcaactatcagccagccatccagccagccatccagccagccaaccaactatccatccacaatgtgtggacacaattccggcattcaaccaaaattccagttgaatgggtgaatggtgaatggctgaatgcacgaaagcaaggggatcatcatgaatggcaatgcaactatcaggcagcgattgttccgttaaccgttggtgcagcaccgtttattgcccgtatggtcgagaacgctctgctggagatcccaaccgggttaattgaagcttcccgcgcaatgggtgccacgccgatgcagatcgtcccgctgccgggtctggtgaatgcggcaactatcaccctgattaccctggtcggttattccgcgatgggtggtgcagtcggtgccggtggtttaggtcagattggctatcagtatggctacatcggctataacgcgacggtgatgaatacgccagccatccagccagccatccagccagccaaccaactatccatccacaatttgtggacacaattccggcattcaaccaaaattccagttgaatgggtgaatggtgaatggctgaatggacgaatgccaggggatcatcatgaatggcaatgcaactatcagccagccatccagccagccatccagccagccaaccaactatccatccacaatttgtggacacaattccggcattcaaccaaaattccagttgaatgggtgaatggtgaatggctgaatggacgaatgccaggggatcatcatgaatggcaatgcaactatcagccagccatccagccagccatccagccagccaaccaactatccatccacaatttgtggacacaattccggcattcaaccaaaattccagttgaatgggtgaatggtgaatggctgaatggacgaatgacagaggatcatcatgaatggcaatgcaactatcagccagccatccagccagccatccagccagccaaccaactatccatccacaatttgtggacacaattccggcattcaaccaaaattccagttgaatgggtgaatggtgaatggctgaatggacgaatgacaggggatcatcatgaatggcaatgcaactatcagagcagccgaaccgccgccagccattcaccatccatccagccagccatccagccagccatccagccagccaaccaactatccatccacaatttgtggacgcaattccggcattcaaccaaaattccagttgaatgggtgaatggtgaatggctgaatggacgaatgccaggggatcatcatgaatggcaatgcaactatcaggaacatgacggtatctgcgagatccatgttgctaaatatgctgaaatattcggattgacctctgcggaagccagtaaggatatacggcaggcattgaagagtttcgcggggaaggaagtggttttttatcgccctgaagaggatgccggcgatgaaaaaggctatgaatcttttccttggtttatcaaacgtgcgcacagtccatccagagggctttacagtgtacatatcaacccatatctcattcccttctttatcgggttacagaaccggtttacgcagtttcgccattcaccatccatccagccagccatccagccagccatccagccagccaaccaactatccatccacaatttgtggacacaattccggcattcaaccaaaattccagttgaatgggtgaatggtgaatggctgaatggacgaatgccaggggatcatcatgaatggcaatgcaactatcagccagccatccagccagccatccagccagccaaccaactatccatccacaatttgtggacacaattccggcattcaaccaaaattccagttgaatgggtgaatggtgaatggctgaatggacgaatgccaggggatcatcatgaatggcaatgcaactatcagccagccatccagccagccatccagccagccaaccaactatccatccacaatttgtggacacaattccggcattcaaccaaaattccagttgaatgggtgaatggtgaatggctgaatggacgaatgccaggggatcatcatgaatggcaatgcaactatcaggaaaaaattgggccaaattggggctttcattcaagtggccctttcccccgaatactttcaaaatgcggatcagggggacttcttattctgtttaaagaagaagttttgatacccccgacgggtcctggcgcagttctttcacctgggaatggtgtagcgccaaatcgacaaactccaccgaggagtacccgattggtactgtcaacggtgcgtgaagttggtcactactcttgccgttcgatgaccggtaactgtgcggcactggcggcgctggctgatgaacctggctacgcacaaatcaataccgaagacgccaaacgtctgggtattgaagatgaggcattggtttgggtgcactcgcgtaaaggcaaaattatcacccgtgcgcaggtcagcgatcgtccgaacaaaggggcgatttacatgacctaccagtggtggattggtgcctgtaacgagctggttaccgaaaacttaagcccgattacgaaaacgccggagtacaaatactgcgccgttcgcgtcgagccgatcgccgatcagcgcgccgccgagcagtacgtgattgacgagtacaacaagttgaaaactcgcctgcgcgaagcggcactggcgtaa

SEQ ID NO: 13469 - DNA, 1797 bp, Homo sapiens
  SIMILAR (58)..(414): 1001254mologous to Homo sapiens Human secreted protein encoded by Gene No. 4,accession number W73400,Smith-Waterman Score= 617.
  misc_feature (1)...(1797): n = a,t,c or g
atgggtgcagctggaggtcatcgtattaagcaagataagccaagcacagaaagacagataccacatgttctcactcaaaggtctagaaaagccatccaagagccaagtcctggaataaaggaccccaagaggtcacttggtgctctagaccctgtggctgagctggtacctaagaccgttcagctggatattacggcctttttaaagaccgtaaagaaaaataagcacaagttttatccggcctttattcacattcttgcccgcctgatgaatgctcatccggaattccgtatggcaatgaaagacggtgagctggtgatatgggatagtgttcacccttgttacaccgttttccatgagcaaactgaaacgttttcatcgctctggagtgaataccacgacgatttccggcagtttctacacatatattcgcaagatgtggcgtgttacggtgaaaacctggcctatttccctaaagggtttattgagaatatgtttttcgtctcagccaatccctgggtgagtttcaccagttttgatttaaacgtggccaatatggacaacttcttcgcccccgttttcaccatgggcaaatattatacgcaaggcgacaaggtgctgatgccgctggcgattcaggttcatcatgccgtttgtgatggcttccatgtcggcagaatgcttaatgaattacaacagtactgcgatgagtggcagggcggggggtnaaaacatacgctcaatactcaaccggttgaagatacttcgttatcgacaccagctgccccgatggtggattcgttaattgcgcgcgtaggagtaatggctcgcggtaatgccattactttgcctgtatgtggtcgggatgtgaagtttactcttgaagtgctccggggtgatagtgttgagaagacctctcgggtatggtcaggtaatgaacgtgaccaggagctgcttactgaggacgcactggatgatctcatcccttcttttctactgactggtcaacagacaccggcgttcggtcgaagagtatctggtgtcatagaaattgccgatgggagtcgccgtcgtaaagctgctgcacttaccgaaagtgattatcgtgttctggttggcgagctggatgatgagcagatggctgcattatccagattgggtaacgattatcgcccaacaagtgcttatgaacgtggtcagcgttatgcaagccgattgcagaatgaatttgctggaaatatttctgcgctggctgatgcggaaaatatttcacgtaagattattacccgctgtatcaacaccgccaaattgcctaaatcagttgttgctcttttttctcaccccggtgaactatctgcccggtcaggtgatgcacttcaaaaagcctttacagataaagaggaattacttaagcagcaggcatctaaccttcatgagcagaaaaaagctggggtgatatttgaagctgaagaaggtccccggtcaggtgatgcacttcaaaaagcctttacagataaagaggaattatttaagcagcaggcatctaaccttcatgagcagaaaaaagctggggtgatatttgaagctgaagaagttatcactcttttaacttctgtgcttaaaacgtcatctgcatcaagaactagtttaagctcacgacatcagtttgctcctggagcgacagtattgtataagggcgataaaatggtgcttaacctggacaggtctcgtgttccaactgagtgtatagagaaaattgaggccattcttaaggaacttgaaaagccagcaccctga

SEQ ID NO: 13470 - DNA, 1203 bp, Homo sapiens
  SIMILAR (888)..(286): 991254mologous to unidentified cloning vector 29kD protein essential for the replication of mini F plasmid,accession number AB015619,Smith-Waterman Score=1038.
gctggccttgggccaggggaccctcagcgacggggtcaccccaatgttctggaggctgcggttctgcttcctcctggggctgagctgagcaagctctagctctcgggccgagcgcaaggagggcaggagtgatgtctccaactgtgctgaggtctgccctgggtgcaagggccctgtgttttcagcgctgccgtgtggcccatggatgccccaggcccctggacagttgatgcctggggtccacactcctggacagggctctggacagttgatgcctggggtccacactcgctggtaactttgaggcagctggtaacgctctatgatccagtcgattttcagagagacgatgcctgagccatccggcttacgatactgacacagggattcgtataaacgcatggcatacggattggtgatttcttttgtttcactaagcggaaactgcgtaaaccggttctgtaacccgataaagaagggaatgagatatgggttgatatgtacactgtaaagccctctggatggactgtgcgcacgtttgataaaccaaggaaaagattcatagcctttttcatcgccggcatcctcttcagggcgataaaaaaccacttccttccccgcgaaactcttcaatgcctgccgtatatccttactggcttccgcagaggtcaatccgaatatttcagcatatttagcaacatggatctcgcagataccgtcatgttcctgtagggtgccatcagattttctgatctggtcaacgaacagatacagcatacgtttttgatcccgggagagactatatgccgcctcagtgaggtcgtttgactggacgattcgcgggctatttttacgtttcttgtgattgataaccgctgtttccgccatgacagatccatgtgaagtgtgacaagtttttagattgtcacaagcatattccctgtgtgtcttggtgtccgcatttctctcttttatcaggacaccagtcactgaattatggaccaccttaatatccagcagggagttcttcgatgatgccgcagagatgacagagttgcgttcttgatccatccccaggatttggcttccataatgcaaaagtcctttattctttttggggctccaagaattaccaaccggttgcaaagaaactgggttaaaaaaaagggcccccaaagtctctccggtccggtttcttttcat

SEQ ID NO: 13471 - DNA, 1177 bp, Homo sapiens
  SIMILAR (120)..(548): 421254mologous to Arenicola marina fibrillar collagen,accession number U68412,Smith-Waterman Score=162.
atgggtcctctgccttttggcaagggagtcttcatcactgatgccagccatcaggtacttgaggcctgtgatccaggtgcgggcctcctcggggttggaggtgatgaggtccagggactccatgtggttgccatggtagatggtgaagcagcagctggggtcgaagttcccctcagcttgtctgtggaatatttcagactgccggccctcagtcactttgtaaatggaatcaataagtactggcacagacaaacaaaaagacagcaggaacttctgcagacttatatgtccccgtctgacagctttgaagaaaagcagtggttctccccaccaacgcaccttggagattttggagaacaaggcaagaatggttctcctcaagggggcgcagcggttatcaatcacaagaaacgtaaaaatagcccgcgaatcgtccagtcaaacgacctcactgaggcggcatatattctctcccgggatcaaaaacgtatgctgtatctgttcgttgaccagatcagaaaatctgatggcaccctacaggaacatgacggtatctgcgagatccatgttgctaaatatgctgaaatattcggattgacctctgcggaagccagtaaggatatacggcaggcattgaagagtttcgcggggaaggaagtggttttttatcgccctgaagaggatgccggcgatgaaaaaggctatgaatcttttccttggtttatcaaacgtgcgcacagtccatccagagggctttacagtgtacatatcaacccatatctcattcccttctttatcgggttacagaaccggtttacgcagtttcggcttagtgaaacaaaagaaatcaccaatccgtatgccatgcgtttatacgaatccctgtgtcagtatcgtaagccggatggctcaggcatcgtctctctgaaaatcgactggatcatagagcgttaccagctgcctcaaagttaccagcgtatggcctgacttccgccgccgcttcctgcagcacatatttgttcttcgggagcgccctgaaaccgtgttaatagatctcattcagaggacaaaggatgcagtaagagagctggacaatctgcagtatcgaaagatgaagaaactccttttccaggaggcacataatggaccagcagtagaagcacaggaagaagaagag

SEQ ID NO: 13472 - DNA, 2421 bp, Homo sapiens
  SIMILAR (1089)..(4): 941254mologous to Homo sapiens putative p150,accession number U93563,Smith-Waterman Score=1815.
gattctgagtatgtctttgtggtggttgatttcctaattggagtgttaatttttgctaccatcgttggtaacataggttctatgatttccaacatgaatgcagccagagcagaatttcaagcaagaattgatgctatcaagcaatatgtgcgtggtcgaaatcaagatttgatgctatcaagcaatatatgcacttttcgaaatgtaagcaaagatatggaaaagagggttattaaatggtttgactacctgtggaccaacaaaaaaacagttgatgagaaagaagtcttaaagtatctacctgataaactaagagcagaaattgccatcaacgttcacttagacacagtggggaaagtctacagtcctggagattatatttgcaagaaaggggatatcggacgagagatgtacattatcaaggaaggcaaactcgctgtggtggcagatgatggagtcactcagtttgtggtattgagcgatggcagctacttcggtgagatcagcattcttaacattaaagggagcaaagctggcaatcgaagaacggccaatattaaaagtattggctactcagacctgtgtgacaatctaaaaacttgtcacacttcacatggatctgtcatggcggaaacagcggttatcaatcacaagaaacgtaaaaatagcccgcgaatcgtccagtcaaacgacctcactgaggcggcatatagtctctcccgggatcaaaaacgtatgctgtatctgttcgttgaccagatcagaaaatctgatggcaccctacaggaacatgacggtatctgcgagatccatgttgctaaatatgctgaaatattcggattgacctctgcggaagccagtaaggatatacggcaggcattgaagagtttcgcggggaaggaagtggttttttatcgccctgaagaggatgccggcgatgaaaaaggctatgaatcttttccttggtttatcaaacgtgcgcacagtccatccagagggctttacagtgtacatatcaacccatatctcattcccttctttatcgggttacagaaccggtttacgcagtttccgcttagtgaaacaaaagaaatcaccaattcctatgccatgcgtttatacgaatccctgtgtcagtatctattggaagttctggccagggcaatcaggaaagagaaagaaataagggtattcaaaataagaagagaggtagtcaaattgtctctgttttcagatgacatgattttatatttagaaaaccccagcatatcagccccaaatctccttaagcagataggcaacttcagcaaagtcttaggatacaaaatcaatgtggaaaaatcacaagcattcttatacaccaataatagaccaacagagagccaaatcatgagtgaactcccattcacaattgctacaaagaaaataaaattcctaggaatccagcgggatcctctagagtcaactgcggtcatgcacggaattttgccgatttcggaaccaccatcacacaggattttcgcctgtggggcaaaccagcgtggaccgcttgctgcaactctctcagggccaggcggtgaagggcaatcagctgttgcccgtctcactggtgaaaagaaaaaccaccctggcgcccaatacgcaaaccgcctctccccgcgcgttggccgattcattaatgcagctggaaggacaggtttcccgactggaaagcgggcagtgagcgcaacgcaattaattgtcaggtttagctcccatggcttgagggatggctctgccatccagaaagaaacagggaagggagtttgccgatttcggaaccaccatcaaacaggattttcgcctgctggggcaaaccagcgtggaccgcttgctgcaactctctcagggccaggcggtgaagggcaatcagctgttgcccgtctcactggtgaaaagaaaaaccaccctggcgcccaatacgcaaaccgcctctccccgcgcgttggccgattcattaatgcagctggcacgacaggtttcccgactggaaagcgggcagtgagcgcaacgcaattaatggattttgccgatttcggaaccaccatcaaacaggattttcgcctgctggggcaaaccagcgtggaccgcttgctgcaactctctctgggccaggcggtgaagggcaatcagctgttgcccgtctcactggtgaaaagaaaaaccaccctggcgcccaatacgcaaaccgcctctccccgcgcgttggccgattcattaatgcagctggcacgacaggtttcccgactggaaagcgggcagggtggggaacagatgcaagggctgcctgagaaaagtaggcaggacactaaacagctgtcgccagcacttcacgggcccaaaaacttagaaaatgacttgatgctggctgctggcatatga

SEQ ID NO: 13473 - DNA, 1848 bp, Homo sapiens
  SIMILAR (118)..(360): 401254mologous to Crypthecodinium cohnii Dip1-associated protein C,accession number AF255446,Smith-Waterman Score=90.
atggagaaattgctactggaaaatgacagcttaagtaaggatgtaagccgcctagaaactgtgtttgtacctcctgagaaacatgaaaaagagataatagctctgaaatccaatattgttgaacttaagaaacagctgtctgaacttaagaaaaaatgtggtgaagaccaggagaaaatacacgctctcacatctgaaaacactaacttgaagaagatgatgagtaatcagtatgtgccagttaaaacccatgaagaggttaaaatgacactgaatgacacgttagccaaaactaacagagaattattagatgtgaagaaaaaatttgaagatataaatcaggaatttgtaaaaataaaagataagaatgaaatattaaaaagaaacctggaaaacactcagaaccaaataaaagctgagtacatcagcctggcagagcacgaggcaaagatgagctcgctaagtcagagcatgagaaaggtgcaggatagtaatgctgaaatcttggccaactacagaaaaggccaagaagagattgtgacactgcatgccgaaattaaagcacagaagaaggagctcgacacaatacaagaatgcattaagataatgaagcgtgcgcctgttattccaaaacatacgctcaatactcaaccggttgaagatacttcgttatcgacaccagctgccccgatggtggattcgttaattgcgcgcgtaggagtaatggctcgcggtaatgccattactttgcctgtatgtggtcgggatgtgaagtttactcttgaagtgctccggggtgatagtgttgagaagacctctcgggtatggtcaggtaatgaacgtgaccaggagctgcttactgaggacgcactggatgatctcatcccttcttttctactgactggtcaacagacaccggcgttcggtcgaagagtatctggtgtcatagaaattgccgatgggagtcgccgtcgtaaagctgctgcacttaccgaaagtgattatcgtgttctggttggcgagctggatgatgagcagatggctgcattatccagattgggtaacgattatcgcccaacaagtgcttatgaacgtggtcagcgttatgcaagccgattgcagaatgaatttgctggaaatatttctgcgctggctgatgcggaaaatatttcacgtaagattattacccgctgtatcaacaccgccaaattgcctaaatcagttgttgctcttttttctcaccccggtgaactatctgcccggtcagataaatcagggatttcttcttggtttggatccattactggtgaactaaaccggtttacgcagtttcggcttagtgaaacaaaagaaatcaccaatccgtatgccatgcgtttatacgaatccctgtgtcagtatcgtaagccggatggctcaggcatcgtctctctgaaaatcgactggatcatagagcgttaccagctgcctcaaagttaccagcgtatgcctgacttccgccgccgcttcctgcaggcaccgtgtatgaaatctaacaatgcgctcatcgtcatcctcggcaccgtcaccctggatgctgtaggcataggcttggttatgccggtactgccgggcctcttgcgggatatcgtccattccgacagcatcgccagtcactatggcgtgctgctagcgctatatgcgttgatgcaatttctatgcgcacccgttctcggagcactgtccgaccgctttggccgccgcccagtcctgctcgcttcgctacttggagccactatcgactacgcgatcatggcgaccacacccgtcctgtggatctacccactagtcaattcaccatcttgttga

SEQ ID NO: 13474 - DNA, 1662 bp, Homo sapiens
  SIMILAR (655)..(1356): 321254mologous to Dictyostelium discoideum calcium binding protein,accession number U03413,Smith-Waterman Score=170.
tcaggataattgtttcagcatcgcaaccgcatcagactccggcatcgcaaactgcacccggtgccgggcagccacatccagcgcaaaaaccttcgtgtagacttccgttgaactgatggacttatgtcccatcaggctttgcagaactttcagcggtataccggcatacagcatgtgcatcgcataggaatggcgcaacgtatgtggtgtgaccggaacagagaaagtcacaccgtcagcagcagcggcggcaaccgcctccccaatccaggtcctgaccgttctgtccgtcacttcccagatccgcgctttctctgtccttcctgtgcgacggttacgccgctccatgagcttatcgcgaataaatacctgcgtaaaccggttctgtaacccgataaagaagggaatgagatatgggttgatatgtccactgtaaagccttctggatggactgtgcgcacgtttgataaaccaaggaaaagattcatagcctttttcatcgccggcatcctcttcagggcgataaaaaaccacttccttccccgcgaaactcttcaatgcctgccgtatatccttactggcttccgcagaggtcaatccgaatatttcagcatatttagcaacatggatctcgcagagtaccgtcatgttcctgtagggtgccatcagattttctgatctggtcaacgaacacccaccgcgcacgtttttgatcccgggagagactataaaccgcctcagtaaggtcgtttgactggacgattcgcgggctatttttacgtttcttgtgattgataaccgctgtttccgccatgacagacacactgtgaagtgtgacaagtttttagattgtcacactgcagtaagcggcggcggaagtcaggcatacgctggtaactttgaggcagctggtaacgctctatgatccagtcgattttcagagagacgatgcctgagccatccggcttacgatactgacacagggattcgtataaacgcatggcatacggattggttttttcttttgttggggggggccgaaactgcgtaaaccggttctgtaacccgataaagaagggaatgagatatgggttgatatgtacactgtaaagccctctggatggactgtgcgcacgtttgataaaccaaggaaaagattcatagcctttttcatcgccggcatcctcttcagggcgataaaaaaccacttccttccccgcgaaactcttcaatgcctgccgtatatccttactggcttccgcagaggtcaatccgaatatttcaacatatttagcaacatggatctcgcagataccgtcatgttcctggagggtgccattagaatttctgatctgggcaacgaacagataccgcatacgtttttgatccccggaagagactatttgccgcctcaaaggaagtcgtttgaactggccaattcgcgggctttttttacctttcttgtgaatgaaaacccctgtttccgccatacagaatccagctgcctcaaagttaccagcgtatgccttgatttcgcccgcgctttctgcaggtcttgtgttaatgagatcaacaaccagaactccaatgcgcctttcatacatttgagaaaaaaaaagggcggcagaccactcatattgtattttcctttccccgaaatca

SEQ ID NO: 13475 - DNA, 1861 bp, Homo sapiens
  SIMILAR (458)..(814): 301254mologous to Alcelaphine herpesvirus 1 putative immediate early protein,accession number AF005370,Smith-Waterman Score=93.
atggtggattcgttaattgcgcgcgtaggagtaatggctcgcggtaatgccattactttgcctgtatgtggtcgggatgtgaagtttactcttcaagtgctccggggtgatagtgttgagaagacctctcgggtaccgccaggtaatgaacgtgaccaggagatgcttactgaggacgcactggatgatctcatcccttcttttctactgactggtcaacagacaccggcgttcggtcgaagagtatctggtgtcatacacactgccgatgggagtcgccgtcgtaaagctgctgcacttaccgaaaaattttgtatcgttgataaccccccgggggagattagaaaaagagcgtgcctttttattccaacacatgcgctcaatctcaaccggtttgaagatatttgttatgcacaccagctgcccgatggtggtttgttaagtgcgcgcgtaggagtaatggctcgcggtaaccccattctttcccctgtatgtggtcggaatgtaaagttcactcttaaagtgctccggggtgatagtgttgagaacccctctcgggtatggtcgggtaatgaacgtgcccaggagctgcttactgagcacgcactggatgatctcaccctttcttttctactgactggtcaacagacaccggcgttcggtcgaagagtatctggtgtcatagaaattgccgatgggagtcgccgtcgtaaagctgctgcacttaccgaaagtgattatcgtgttctggttggcgagctggatgatgagcagatggctgcattatccagattgggtaacgattatcgcccaacaagcccttatgaacgtggtcagcgttatgcaagccgattgcagaatgaatttgctggaaatatttctgcgctggctgatgcggaaaatatttcacgtaagattattacccgctgtatcaacaccgccaaattgcctaaatcagttgttgctcttttttctcaccccggtgaactatctgcccggtcaggtgatgcacttcaaaaagcctttacagataaagaggaattacttaagcagcaggcatctaaccttcatgagcagaaaaaagctggggtgatatttgaagctgaagaagttatcactcttttaacttctgtgcttaaaactgtgcaatctaaaaacttgtcacacttcacatggatctgtcatgcggaaacagcggttatcaatcacaagaaacgtaagaatagcccgcgaatcgtccagtcaaacgacctcactgaggcggcatatagtctctcccgggatcaaaaacgtatgctgtatctgttcgttgaccagatcagaaaatctgatggcaccctacaggaacatgacggtatctgcgagatccatgttgctaaatatgctgaaatattcggattgacctctgcggaagccagtaaggatatacggcaggcattgaagagtttcgcggggaaggaagtggttttttatcgccctgaagaggatgccggcgatgaaaaaggctatgaatcttttccttggtttatcaaacaaccggtttacgcagtttcggcttagtgaaacaaaagaaatcaccaatccgtatgccatgcgtttatacgaatccctgtgtcagtatcgtaagccggatggctcaggcatcgtctctctgaaaatcgactggatcatagagcgttaccagctgcctcaaagttaccagcgtatgcctgacttccgccgccgcttcctgcaggtctgtgttaatgagatcaacagcagaactccaatgcgcctctcatacattgagaaaaagaaaggccgccagacgactcatatcgtattttccttccgcgatatcacttccatgacgacaggatag

SEQ ID NO: 13476 - DNA, 2586 bp, Homo sapiens
  SIMILAR (817)..(1803): 971254mologous to Cloning vector pSacBII SacB,accession number U09128,Smith-Waterman Score=1692.
atgagactgggatttgaatcaaggggtgagatagcaaaagatcaagctaaacttgatctagcagggcaaaaagaaagggataaccaaagctcaacattgggggaagcagaaaccccattgattatttgctggtcgactctagaggatccccactatgatgtcatagttattgacagcgcgcctaacctgggtatcggcacgattaatgtcgtatgtgctgctgatgtgctgattgttcccacgcctgctgagttgtttgactacacctccgcactgcagtttttcgatatgcttcgtgatctgctcaagaacgttgatcttaaagggttcgagcctgatgtacgtattttgcttaccaaatacagcaatagtaatggctctcagtccccgtggatggaggagcaaattcgggatgcctggggaagcatggttctaaaaaatgttgtacgtgaaacggatgaagttggtaaaggtcagatccggatgagaactgtttttgaacaggccattgatcaacgctcttcaactgatacttcgttatcgacaccagctgccccgatggtggattcgttaattgcgcgcgtaggagtaatggctcgcggtaatgccattactttgcctgtatgtggtcgggatgtgaagtttactcttgaagtgctccggggtgatagtgttgagaagacctctcgggtatggtcaggtaatgaacgtgaccaggagctgcttactgaggacgcactggatgatctcatcccttcttttctactgactggtcaacagacaccggcgttcggtcgaagagtttccttgtaccctctggcaggaggagcgactcaagccttcgcgaaagaaaataaccaaaaagcatacaaagaaacgtacggcgtctctcatattacacgccatgatatgctgcagatccctaaacagcagcaaaacgaaaaataccaagtgcctcaattcgatcaatcaacgattaaaaatattgagtctgcaaaaggacttgatgtgtgggacagctggccgctgcaaaacgctgacggaacagtagctgaatacaacggctatcacgttgtgtttgctcttgcgggaagcccgaaagacgctgatgacacatcaatctacatgttttatcaaaaggtcggcgacaactcaatcgacagctggaaaaacgcgggccgtgtctttaaagacagcgataagttcgacgccaacgatccgatcctgaaagatcagacgcaagaatggtccggttctgcaacctttacatctgacggaaaaatccgtttattctacactgactattccggtaaacattacggcaaacaaagcctgacaacagcgcaggtaaatgtgtcaaaatctgatgacacactcaaaatcaacggagtggaagatcacaaaacgatttttgacggagacggaaaaacatatcagaacgttcagcagtttatcgatgaaggcaattatacatccggcgacaaccatacgctgagagaccctcactacgttgaagacaaaggccataaataccttgtattcgaagccaacacgggaacagaaaacggataccaaggcgaagaatctttatttaacaaagcgtactacggcggcggcacgaacttcttccgtaaagaaagccagaagcttcagcagagcgctaaaaaacgcgatgctgagttagcgaacggcgccctcggtatcatagagttaaataatgattacacattgaaaaaagtaatgaagccgctgatcacttcaaacacggtatttattcgcgataagctcatggagcggcgtaaccgtcgcacaggaaggacagagaaagcgcggatctgggaagtgacggacagaacggtcaggacctggattggggaggcggttgccgccgctgctgctgacggtgtgacgttctctgttccggtcacaccacatacgttccgccattcctatgcgatgcacatgctgtatgccggtataccgctgaaagttctgcaaagcctgatgggacataagtccatcagttcaacggaagtctacacgaaggtttttgcgctggatgtggctgcccggcaccggatcagaaaatctgatggcaccctacaggaacatgacggtatctgcgagatccatgttgctaaatatgctgaaatattcggattgacctctgcggaagccagtaaggatatacggcaggcattgaagagtttcgcggggaaggaagtggttttttatcgccctgaagaggatgccggcgatgaaaaaggctatgaatcttttccttggtttatcaaacgtgcgcacagtccatccagagggctttacagtgtacatatcaacccatatctcattcccttctttatcgggttacagaaccggtttacgcagtttcggcttagtgaaacaaaagaaatcaccaatccgtatgccatgcgtgttacgaatccctgtgtcagtatcgtctgtgttaatgagatcaacagcagaactccaatgcgcctctcatacattgagaaaaagaaaggccgccagacgactcatatcgtattttccttccgcgatatcacttccatgacgacaggatag

SEQ ID NO: 13477 - DNA, 696 bp, Homo sapiens
  SIMILAR (250)..(561): 1001254mologous to Plasmid F Protein D,accession number M12987,Smith-Waterman Score=535.
atgagaaaaagcacacctggtgggcttcctccacagtctggagaggcttctccagatcattccaagtggcttggatttggtggagctacagggaggggtgcacctcgccctctcgtctaccgccttcctctctccccgccacgcttccgcatcgctacgcgtctcctgccccccagtgcacgcggctgccttagtgcatcatttatttctgtactgagaaatacagacgtatttattcgcgataagctcatggagcggcgtaaccgtcgcacaggaaggacagagaaagcgcggatctgggaagtgacggacagaacggtcaggacctggattggggaggcggttgccgccgctgctgctgacggtgtgacgttctctgttccggtcacaccacatacgttccgccattcctatgcgatgcacatgctgtatgccggtataccgctgaaagttctgcaaagcctgatgggacataagtccatcagttcaacggaagtctacacgaaggtttttgcgctggatgtggctgcccggcaccgggtgcagtttgcgatgccggaggtcttccacgcggtcttccagcccgtgggtaataggttttcttggagctttttatctgtgcctgttgggggttctggattggaggcttctgcagcaccctggctgggatacatgggaggctacaaggaaacctga

SEQ ID NO: 13478 - DNA, 2334 bp, Homo sapiens
  SIMILAR (200)..(1279): 281254mologous to Leishmania major L8453.1,accession number AC008054,Smith-Waterman Score=230.
atgaaactcatggaaacacttaaccagtgcataaacgctggtcatgaaatgacgaaggctatcgccattgcacagtttaatgatgacagcccggaagcgaggaaaataacccggcgctggagaataggtgaagcagcggatttagttggggtttcttctcaggctatcagagatgccgagaaagcagggcgactaccgcacccggatatggaaattcgaggacgggttgagcaacgtgttggttatacaattgaacaaattaatcatatgcgtgatgtgtttggtacgcgattgcgacgtgctgaagacgtatttccaccggtgatcggggttgctgcccataaaggtggcgtttacaaaacctcagtttctgttcatcttgctcaggatctggctctgaaggggctacgtgttttgctcgtggaaggtaacgacccccagggaacagcctcaatgtatcacggatgggtaccagatcttcatattcatgcagaagacactctcctgcctttctatcttggggaaaaggacgatgtcacttatgcaataaagcccacttgctggccggggcttgacattattccttcctgtctggctctgcaccgtattgaaactgagttaatgggcaaatttgatgaaggtaaactgcccaccgatccacacctgatgctccgactggccattgaaactgttgctcatgactatgatgtcatagttattgacagcgcgcctaacctgggtatcggcacgattaatgtcgtatgtgctgctgatgtgctgattgttcccacgcctgctgagttgtttgactacacctccgcactgcagtttttcgatatgcttcgtgatctgctcaaaaccgttgatcttaaagggttcgagcctgatgtacgtattttgcttaccaaatacagcaatagtaatggctctcagtccccgtggatggaggagcaaattcgggatgcctggggaagcatggttctaaaaaatgttgtacgtgaaacggatgaagttggtaaaggtcagatccggatgagaactgtttttgaacaggccattgatcaacgctcttcaactgatacttcgttatcgacaccagctgccccgatggtggattcgttaattgcgcgcgtaggagtaatggctcgcggtaatgccattactttgcctgtatgtggtcgggatgtgaagtttactcttgaagtgctccggggtgatagtgttgagaagacctctcgggtatggtcaggtaatgaacgtgaccaggagctgcttactgaggacgcactggatgatctcatcccttcttttctactgactggtcaacagacaccggcgttcggtcgaagagtatctggtgtcatagaaattgccgatgggagtcgccgtcgtaaagctgctgcacttaccgaaagtgattatcgtgttctggttggcgagctggatgatgagcagatggctgcattatccagattgggtaacgattatcgcccaacaagtgcttatgaacgtggtcagcgttatgcaagccgattgcagaatgaatttgctggaaatatttctgcgctggctgatgcggaaaatatttcacgtaagattattacccgctgtatcaacaccgccaaattgcctaaatcagttgttgctcttttttctcaccccggtgaactatctgcccggtcaggtgatgcacttcaaaaagcctttacagataaagaggaattacttaagcagcaggcatctaaccttcatgagcagaaaaaagctggggtgatatttgaagctgaagaagttatcactcttttaacttctgtgcttaaaacgtcatctgcatcaagaactagtttaagctcacgacatcagtttgctcctggagcgacagtattgtataagggcgataaaatggcccttaacctggacaggtctcgtgttccagcatacattatacgaagttatattcgatgcggccgcaaggggttcgcgtcagcgggtgttggcgggtgtcggggctggcttaactatgcggcatcagagcagattgtactgagagtgcaccatatgcggtgtgaaataccgcacagatgcgtaaggagaaaataccgcatcaggcgccattcgccattcaggctgcgcaactgttgggaagggcgatcggtgcgggcctcttcgctattacgccagctggcgaaagggggatgtgctgcaaggcgattaagttgggtgaacattaaacaagaagtcagtcagtgtgcaactcagaagataagagaatcctcatcagaaataaacaatgctggcatcctgattcccaacttgcagacttcagaactgtga

SEQ ID NO: 13479 - DNA, 3822 bp, Homo sapiens
  SIMILAR (600)..(106): 551254mologous to Homo sapiens cytochrome c-like polypeptide,accession number S80864,Smith-Waterman Score=379.
  misc_feature (1)...(3822): n = a,t,c or g
atgctggatggcccactgttctccgaggggcctgacagcccccgggagctccaggatgaggagtctggcagctgcctctgggtgcagaagtccaagctattggtgatagaagtgaagactatttcctgtcattatagtcgccgcgccccttctcgacagcccatggacttccaggccagccactgggctcgcgggttccagaaccgcacgtgtgggccgcgcccgggatccccacagccgccgccccgccggccctgggcctccagggtgctgcaggaggcgaccaactggcgggcggggcccctggccgaggtccgagctcgggagcaagagaaaaggaaagcggcgtcgcaggagcgggaggccaaggagaccgagcgaaaaaggcgcaaggctggtggggcccgacggagccccccgggtcgaccccgcccggagccccgcaacgcccctcgggtggcccagctggcagggctccctgctcccttgcggccggagcgcctggcgcctgtggggcgagcgccccgtccatccgcgcagccgcagagcgacccagggtcggcgtgggcggggccctggggaggtcggcggcccgggcccccaagctacgaggctcacctgctgctgagaggttctgccgggaccgccccacgacgccgctgggaccggccgccaccctacgtggctccaccttcttacgaaggcccccataggaccttggggactaagagaggccccgggaactctcaggtgcccacttcatcagccccagctgcgactccagccaggacagacggagggcgcacaaagaagaggctggatcctcggatctaccgggacgtcctcggggcttggggtctccgacaggggcaaggtctcttggggggatccccaggctgtggagcggccagagcaaggccagagcccggcaagggggtcgtggagaaaagcctggggctggctgctgctgacctgaacagtggtagcgacagccatccccaagccaaagctacagggagcgcaggcaccgagatagctcctgcggggtctgcaactgcggctccctgtgccccgcatcccgctcccagatccaggcaccacctcaagggctcgagggaagggaaagaaggagaacagatctggtttcccaaatgctggattccctcccctaaaaagcagccgccccgccatagccagacactccccagaccctgggctcccggaggcaccggatggagagaatctctgggtcttggagagggggcaggaccggagaccctggagggttggaaggcgacccgccgtgcccacaccttgccccgcagttcccagggcctgtcccgtggggaaggcgtctttgtcattgacgccacgtgcgtagtgatacgatcccaatatgttccaaccccccgaacccagcaggtgcagcttttgccctctggggtgacacgcgtggtgggggattcccccagccaatcgaagcccggcaaggaggagggtgaaggggccacggtctttccttccccttgtcaaaagcggctgtcgagcagtcgccttttacaccagcccggcgggggccgcgggggcgaagctgagggcgggaggccgggggactccacactggaggagcgcactttccgcatcttggggctcccggcccccgaagtaaacctgcgggacgcccccacgcagccaggtagcccagagcaccaagccttaggcccagcagcttcgggagcccagggcagagccgaggggtcggaagtggcggtggtccagcggcgcgccggccggggctgggcgcggaccccagggccctacgccggggccctgcgagaagccgtgtcccgtatccgccgccacacagcccctgactcggacacggacgaagctgaggagctcagcgtccatagcggctcctctgatggaagcgacacagaagccccgggcgcctcctggcggaatgagaggaccctgcccgaggttggaaacagttcgccagaggaagatgggaagacagcggaactgagcgacagtgtcggggagatcctagatgtcataagccaaaccgaggaggtcctcttcggngtatttattcgcgataagctcatggagcggcgtaaccgtcgcacaggaaggacagagaaagcgcggatctgggaagtgacggacagaacggtcaggacctggattggggaggcggttgccgccgctgctgctgacggtgtgacgttctctgttccggtcacaccacatacgttccgccattcctatgcgatgcacatgctgtatgccggtataccgctgaaagttctgcaaagcctgatgggacataagtccatcagttcaacggaagtctacacgaaggtttttgcgctggatgtggctgcccggcaccgggtgcagtttgcgatgccggaggattttgccgatttcggaaccaccatcaaacaggattttcgcctgctggggcaaaccagcgtggaccgcttgctgcaactctctcagggccaggcggtgaagggcaatcagctgttgcccgtctcactggtgaaaagaaaaaccaccctggcgcccaatacgcaaaccgcctctccccgcgcgttggccgattcattaatgcagctggcacgacaggtttcccgactggaaagcgggcacgccttacatatctccctcatcacaccaagtttccctactgaggggaagagccagtttgtgctgcaactaagaccttcgttacgaggagcactcttgagtttgctggatcactacgaatggaactgttttgtcttcctgtatgacacagacagggnagtaatggctcgcggtaatgccatttctttgcctgtatgtggtcgggatgtgaagttactctttgaagtgctccggggtgatagtgttgagaagacctctcgggtatggtcaggtaatgaacgtgaccaggagctgcttactgaggacgcactggatgatctcatcctttcttttctactgactggtcaacagacaccggcgttcggtngaagagtatctggtgtcatagaaattgccgatgggagtcgccgtcgtaaagctgctgcacttaccgaaagtgattatcgtgttctggttggcgagctggatgatgagcagatggctgcattatccagattgggtaacgattatcgcccaacaagtgcttatgaacgtggtcagcgttatgcaagccgattgcagaatgaatttgctggaaatatttctgcgctggctgatgcggaaaatatttcacgtaagattattacccgctgtatcaacaccgccaaattgcctaaatcagttgttgctctcccctctcaccccggtgaactatctgcccggtcaggtgatgcacttcaaaaagcctttacagataaagaggaattacttaagcagcaggcatctaaccttcatgagcagaaaaaagctgggacggtttttcgccttttgacgttggagtccacgtctttaatagtggactcttgtcccaaactgaaacaacactcaaccttatctcgggttattcttttgatttataagggattttgccgatttcggaaccaccatcaaacaggattttcgcctgctggggcaaaccagcgtggaccgcttgctgcaactctctcagggccaggcggtgaagggcaatcagctgttgcccgtctcactggtgaaaagaaaaaccaccctggcgcccaatacgcaaaccgcctctccccgcgcgttggccgattcattaatgcagctggcacgacaggtttcccgactggaaagcgggcagtgagcgcaacgcaattaatgtga

SEQ ID NO: 13480 - DNA, 2451 bp, Homo sapiens
  SIMILAR (351)..(599): 451254mologous to Homo sapiens SUMO-1-specific protease,accession number AF196304,Smith-Waterman Score=176.
tcaggaatcttgtagcatatatatagggctgtccctgtgctcctcggtcaatcgaagttgccctgtggtcaactgcgcgagattactggtgtaaaggacagccacatcttggtctgtgttcattaggtgtctgtccatgtggactaatccggtccacttaacgtacaccgacgaagattcagtgtcccggtgccgggcagccacatccagcgcaaaaaccttcgtgtagacttccgttgaactgatggacttatgtcccatcaggctttgcagaactttcagcggtataccggcatacagcatgtgcatcgcataggaatggcggaacgtatgtggtgtgaccggaacagagaacgtcacaccgtcagcagcagcggcggcaaccgcctccccaatccaggtcctgaccgttctgtccgtcacttcccagatccgcgctttctctgtccttcctgtgcgacggttacgccgctccatgagcttatcgcgaataaatactgccgggcctcttgcgggatatcgtccattccgacagcatcgccagtcactatggcgtgctgctagcgctatatgcgttgatgcaatttctatgcgcacccgttctcggagcactgtccgaccgctttggccgccgcccagtcctgctcgcttcgctacttggagccatgtcagctgtccttgctccaggatgctgtttttgacaacggatgttttattgcctttgatgttcattaagaagcttggcgcaaatgttgcctttttatcctcgaagaagcctctgtttgtcatgtagcttgtgataaccacattgttgcctttggcttgcggcactgcgaagtgagagtaagtgaatgtcacatcgtttggatcaagacccatttgcagcacaagccctgttttgttcagcggcttgtaagggccggttaaagagtttgatacataaccaagcatgtaaatatcgtttgagttaataccatcgatcgtcatttttgaaccgcgtgaatcagtgaacaagtaccatttgccgttcattttgaaaacattcgcgcgctcgatttcatcagttaccgtgtttgaagtgatcagcggcttcattacttttttcaatgtgtaatcattatttaactctatgataccgagggcgccgttcgctaactcagcatcgcgttttttagcgctctgctgaagcttctggctttctttacggaagaagttcgtgccgccgccgtagtacgctttgttaaataaagattcttcgccttggtatccgttttctgttcccgtgttggcttcgaatacaaggtatttatggcctttgtcttcaacgtagtgagggtctctcagcgtatggttgtcgccggatgtataattgccttcatcgataaactgctgaacgttctgatatgtttttccgtctccgtcaaaaatcgttttgtgatcttccactccgttgattttgagtgtgtcatcagattttgacacatttacctgcgctgttgtcaggctttgtttgccgtaatgtttaccggaatagtcagtgtagaataaacggatttttccgtcagatgtaaaggtgcagtaaccggacctaacttcatctgattgtggagcatggactgtataagccattacccttaccacaaacattaaatgcaaacattctgtatcatctaaataatgcaaattaactgccatgttcctcaatttaacattaacataatttgattcaagacttacgatactgacacagggattcgtataaacgcatggcatacggattggtgatttcttttgtttcactaagccgaaactgcgtaaaccggttctgtaacccgataaagaagggaatgagatatgggttgatatgtacactgtaagccctctggatggactgtgcgcacgtttgataaaccaaggaaaagattcatagcctttttcatcgccggcatcctcttcagggcgataaaaaaccacttccttccccgcgaaactcttcaatgcctgccgtatatccttactggcttccgcagaggtcaatccgaatatttcagcatatttagcaacatggatctcgcagataccgtcatgttcctgtagggtgccatcagattttctgatctggtcaacgaacagatacagcatacgtttttgatcccgggagagactatatgccgcctcagtgaggtcgtttgactggacgattcgcgggctatttttacgtttcttgtgattgataaccgctgtttccgccatgacagatccatgtgaagtgtgacaagtttttagattgtcacatggctgtaaaaggacagaccacatcatggttctgtgttcattaggttgttctgtccatgctgacataatccgctccacttcaacgtaacaccgcacgaagatttctattgttcctgaaggcatattcaaatcgttttcgttaccgcttgcaggcat

SEQ ID NO: 13481 - DNA, 2259 bp, Homo sapiens
  SIMILAR (619)..(879): 561254mologous to Homo sapiens PRO2221,accession number AF116695,Smith-Waterman Score=239.
  misc_feature (1)...(2259): n = a,t,c or g
atggagtggggcaagttcaaaagactagtcttaccaagtcaaggcaagtcaaaaccagaacaaaggtgccaatacaggcacaccgtgggtgatcaggccacgcttccactcagatccagagtagagaaacgaaatggagaggcagagggaagaatctaccgaaaactatgggatgttgccctgctctgttgtgtccaggaggtcattaatggggaaaggaaacctctgagagcactgactgaagtgaaatcgggatttaggctcagggaggacagcgataagttcgacgccaacgatccgatcctgaaagatcagacgcaagaatggtccggttctgcaacctttacatctgacggaaaaatccgtttattctacactgactattccggtaaacattacggcaaacaaagcctgacaacagcgcagaacgttcagcagtttatcgatgaaggcaattatacatccggcgacaaccatacgctgagagaccctcactacgttgaagacaaaggccataaataccttgtattcgaagccaacacgggaacagaaaacggataccaaggcgaagaatctttatttaacaaagcgtactacggcggcggcacgaacttcttccgtaaagaaagccagaagcttcagcagagcgctaaaaaacgcgatgctgagttagcgaacggcgccctcggtatcatagagttaaataatgattacacattgaaaaaagtaatgaagccgctgatcacttcaaacacgtgtgacaatctaaaaacttgtcacacttcacatggatctgtcatggcggaaacagcggttatcaatcacaagaaacgtaaaaatagcccgcgaatcgtccagtcaaacgacctcactgaggcggcatatagtctctcccgggatcaaaaacgtatgctgtatctgttcgttgaccagatcagaaaatctgatggcaccctacaggaacatgacggtatctgcgagatccatgttgctaaatatgctgaaatattcggattgacctctgcggaagccagtaaggatatacggcaggcattgaagagtttcgcggggaaggaagtggttttttatcgccctgaagaggatgccggcgatgaaaaaggctatgaatcttttccttggtttatcaaacgtgcgcacagtccatccagagggctttacagtgtacatatcaacccatatctcattcccttctttatcgggttacagaaccggtttacgcagtttcggcttagtgaaacaaaagaaatcaccaatccgtatgccatgcgtttatacgaatccctgtgtcagtatcgtaagccggatggctcaggcatcgtctctctgaaaatcgactggatcatagagcgttaccagctgcctcaaagttaccagcgtatgcctgacttccgccgccgcttcctgcagcattttctggctcatgctggctgtcccaaaggcacccagaacttcacgtttagaatgaaatttatcatcttctccattaaaaaagttttacctcctgttgacacaatcttagctcatgaccccgttatccatacttgtcatctgagagagtcctttggtagtgtctctccttcatctccaaaatctaatcggttaccatgccctgaagtgatcttatttcattatggtgaaagttggaacctcttacgtgccgatcaacgtctcattttcgccaaaagttggcccagggcttcccggtatcaacagggacaccaggatttatttattctgcgaagtgatcttccgtcacaggtatttattcgcgataagctcatggagcggcgtaaccgtcgcacaggaaggacagagaaagcgcggatctgggaagtgacggacagaacggtcaggacctggattggggaggcggttgccgccgctgctgctgacggtgtgacgttctctgttccggtcacaccacatacgttccgccattcctatgcgatgcacatgctgtatgccggtataccgctgaaagttctgcaaagcctgatgggacataagtccatcagttcaacggaagtctacacgaaggtttttgcgctggatgtggctgcccggcaccgggtgcagtttgcgatgccggagtctgatgcggttgcgatgctgaaacattatcctgagataaatgccttggccctttatttgaaatgtggaactgagtggatatgctngttttgtctggtaaacagagaagctggctggtattccctggagaagcgaaccaaacaatga

SEQ ID NO: 13482 - DNA, 5360 bp, Homo sapiens
  SIMILAR (1)..(1083): 991254mologous to Cloning vector pZC320 SopA,accession number U26464,Smith-Waterman Score=1872.
  misc_feature (1)...(5360): n = a,t,c or g
atgaaactcatggaaacacttaaccagtgcataaacgctggtcatgaaatgacgaaggctatcgccattgcacagtttaatgatgacagcccggaagcgaggaaaataacccggcgctggagaataggtgaagcagcggatttagttggggtttcttctcaggctatcagagatgccgagaaagcagggcgactaccgcacccggatatggaaattcgaggacgggttgagcaacgtgttggttatacaattgaacaaattaatcatatgcgtgatgtgtttggtacgcgattgcgacgtgctgaagacgtatttccaccggtgatcggggttgctgcccataaaggtggcgtttacaaaacctcagtttctgttcatcttgctcaggatctggctctgaaggggctacgtgttttgctcgtggaaggtaacgacccccagggaacagcctcaatgtatcacggatgggtaccagatcttcatattcatgcagaagacactctcctgcctttctatcttggggaaaaggacgatgtcacttatgcaataaagcccacttgctggccggggcttgacattattccttcctgtctggctctgcaccgtattgaaactgagttaatgggcaaatttgatgaaggtaaactgcccaccgatccacacctgatgctccgactggccattgaaactgttgctcatgactatgatgtcatagttattgacagcgcgcctaacctgggtatcggcacgattaatgtcgtatgtgctgctgatgtgctgattgttcccacgcctgctgagttgtttgactacacctccgcactgcagtttttcgatatgcttcgtgatctgctcaagaacgttgatcttaaagggttcgagcctgatgtacgtattttgcttaccaaatacagcaatagtaatggctctcagtccccgtggatggaggagcaaattcgggatgcctggggaagcatggttctaaaaaatgttgtacgtgaaacggatgaagttggtaaaggtcagatccggatgagaactgtttttgaacaggccattgatcaacgctcttcaactgctgccccgatggtggattcgttaattgcgcgcgtaggagtaatggctcgcggtaatgccattactttgcctgtatgtggtcgggatgtgaagtttactcttgaagtgctccggggtgatagtgttgagaagacctctcgggtatggtcaggtaatgaacgtgaccaggagctgcttactgaggacgcactggatgatctcatcccttcttttctactgactggtcaacagacaccggcgttcggtcgaagagtatctggtgtcatagaaattgccgatgggagtcgccgtcgtaaagctgctgcacttaccgaaagtgattatcgtgttctggttggcgagctggatgatgagcagatggctgcattatccagattgggtaacgattatcgcccaacaagtgcttatgaacgtggtcagcgttatgcaagccgattgcagaatgaatttgctggaaatatttctgcgctggctgatgcggaaaatatttcacgtaagattattacccgctgtatcaacaccgccaaattgcctaaatcagttgttgctcttttttctcaccccggtgaactatctgcccggtcagttattgacagcgcgcctaactggggtatcggcacgattaatgtcgtatgtgctgctgatgtgctgattgttcccacgcctgctgagttgtttgactacacctccgcactgcagtttttcgatatgcttcgtgatctgctcaagaacgttgatcttaaagggttcgagcctgatgtacgtattttgcttaccaaatacagcaatagtaatggctctcagtccccgtggatggaggagcaaattcgggatgcctggggaagcatggttctaaaaaatgttgtacgtgaaacggatgaagttggtaaaggtcagatccggatgagaactgtttttgaacaggccattgatcaacgctcttcaactgataatgaaggtgcgcctgttattccaaaacatacgctcaatactcaaccggttgaagatacttcgttatcgacaccagctgccccgatggtggattcgttaattgcgcgcgtaggagtaatggctcgcggtaatgccattactttgcctgtatgtggtcgggatgtgaagtttactcttgaagtgctccggggtgatagtgttgagaagacctctcgggtatggtcaggtaatgaacgtgaccaggagctgcttactgaggacgcactggatgatctcatcccttcttttctactgactggtcaacagacaccggcgttcggtcgaagagtatctggtgtcatagaaattgccgatgggagtcgccgtcgtaaagctgctgcacttaccgaaagtgattatcgtgttctggttggcgagctgcatgatgagcagatggctgcattatacagattgggtaacgattatcgcccaacaagtgcttatgaacgtggtcagcgttatgcaagccgattgcagaatgaatttgctggaaatatttctgcgctggctgatgcggaaaatatttcacatcttcatattcatgcagaagacactttcttgcctttctatcttgggaaaaaggacgatgtcacttatgcaataaagcccacttgttggccggggcttgacattattccttcttgtctggctctgcacggtattgaaattgagttaatgggcaaatttgatgaaggtaaactgcccaccgatccacacctgatgctcggactggccattgaaactgttgctcatgactatgatgtcatagttattgacagcgcgcctaacctgggtatcggcacgattaatgtcgtatgtgctgctgatgtgctgattgttcccacgcctgctgagttgtttgactacacctccgcactgcagtttttcgatatgcttcgtgatctgctcaagaacgttgatattaaagggttcgagcctgatgtacgtattttgcttaccaaatacagcaatagtaatggctctcagtccccgtggatggaggagcaaattcgggatgcctggggaagcatggttctaaaaaatgtggtacgtgaaacggatgaagttggtaaagcggttatcaatcacaagaaacgtaaaaatagcccgcgaatcgtccagtcaaacgacctcactgaggcggcatatagtctctcccgggatcaaaaacgtatgctgtatctgttcgttgaccagatcagaaaatctgatggcaccctacaggaacatgacggtatctgcgagatccatgttgctaaatatgctgaaatattcggattgacctctgcggaagccagtaaggatatacggcaggcattgaagagtttcgcggggaaggaagtggtttttcctcgccctgaagaggatgccggcgatgaaaaaggctatgaatcccttcacccgtttatcaaacgtgcgcacagtccatccagaggaatttacagtgtacatatcaacccatatctcattcccttctttatcgggttacagaaccggtttacgcagtttcggcttagtgacaaccaaagaaatcaccaatccgtatgccatgcgttctctacgaatccctgtgtcagtatcgtaagccggatggctcaggcatcgtctctctgaaaatcgactggatcatagagcgttaccagctgcctcaaagttaccagcgtatgcctgacttccgccgccgcttcctgcaggtctgtgttaatgagatcaacagcagaactccaatgcgcctctcatacattgagaaaaagaaaggccgccagacgactcatatctttttcgatatgcttcgtgatctgctcaagaacgttgatcttaaagggttcgagcctgatgtacgtattttgcttaccaaatacagcaatagtaatggctctcagtccccgtggatggaggagcaaattcgggatgcctggggaagcatggttctaaaaaatgttgtacgtgaaacggatgaagttggtaaagatacttcgttatcgacaccagctgccccgatggtggattcgttaattgcgcgcgtaggagtaatggctcgcggtaatgccattactttgcctgtatgtggtcgggatgtgaagtttactcttgaagtgctccggggtgatagtgttgagaagacctctcgggtatggtcaggtgctgtatcccagggaggtgagagttttatctatatgcccctgactggggctgctgcctttctttcagagatgccctgcccagagaggaggaatctaaagaagcagtgtggctacagtggctttgctgcatgcggttatcaatcacaagaacgtaaaaatagcccgcgaatcgtccagtcaaacgacctcactgaggcggcatatagtctctcccgggatcaaaaacgtatgctgtatctgttcgttgaccagatcagaaaatctgatggcaccctacaggaacatgacggtatctgcgagatccatgttgctaaatatgctgaaatattcggattgacctctgcggaagccagtaaggatatacggcaggcattgaagagtttcgcggggaaggaagtggttttttatcgccctgaagaggatgccggcgatgaaaaaggctatgaatcttttccttggtttatcaaacgtgcgcacagtccatccagagggctttacagtgtacatatcaacccatatctcattcccttctttatcgggttacagaaccggtttacgcagtttcggcttagtgaaacaaaagaaatcaccaatccgtatgccatgcgtttatacgaatccctgtgtcagtatcgtaagccggatggctcaggcatcgtctctctgaaaatcgactggatcatagagcgttaccagctgcctcaaagttaccagcgtatgcctgacttccgccgccgcttcctgcaggatcataactcttcaccagaaagggaacaaaactggatggagaatgagtttgacgaactgacagaagtaggcttcagaaggtgggtaataacaaactcctccgagctaaaggagcatgttctaacccaatgcaaggaagctaagaaccttgataaaaggttacaggaactgctaactagaataagcaatttagagaacatagatgacctgatggagctcaaaaacacagcacaagaacttcatgaaacatacacaagtatcaatagccaaactgatcaagcagaagaaaggatatcagagattggagatcaacttaatgaaataaacatgaagaccagattagaggagaaaaaaaaaggaaagggaacgaacaaaggcctccaagaaccactttggngatga

SEQ ID NO: 13483 - DNA, 4966 bp, Homo sapiens
  SIMILAR (1957)..(4716): 941254mologous to Homo sapiens putative p150,accession number U93569,Smith-Waterman Score=4428.
  misc_feature (1)...(4966): n = a,t,c or g
ctatgggggatcctctagagtcgacctgcaggcatgcaagcgatctaaacactccagttgaaccacgagacatgtccaggttaagcaccattttatcgcccttatacaaatactgtcgctccaggagccaaactgatgtcgtgagcttaaactagttctggatgcagatgacgttttagccacagaagttaaaagagtgataacttcttcagcttcaaatatcaccccagcttttttctgctcatgaaggttagatgcctgctgcataagtaattcctctttatctgtaaaggctttttgaagtgcatcacctgaccgggcagatagttcaccggggtgagaaaaaagagcaacaactgatttaggcaatttggcggtgttgatacagcgggtaataatcttacgtgaaatattttccgcatcagccagcgcagaaatatttccagcaaattcattctgcaatcggcttgcataacgctgaccacgttcataagcacttgttgggcgataatcgttacccaatctggataatgcagccatctgctcatcatccagctcgccaaccagaacacgataatcactttcggtaagtgcagcagctttacgacggcgactcccatcggcaatttctatgacaccagatactcttcgaccgaacgccggtgtctgttgaccagtcagtagaaaagaagggatgagatcatccagtgcgtcctcagtaagcagctcctggtcacgttcattacctgaccatacccgagaggtcttctcaacactatcaccccggagcacttcaagagtatacttcacatcccgaccacatacaggcaaagtaatggcattaccgcgagccattactccggaatagtcagtgtagaataaacggatttttccgtcagatgtaaaggttgcagaaccggaccattcttgcgtctgatctttcaggatcggatcgttggcgtcgaacttatcgctgtctttaaagacacggcccgcgtttttccagctgtcgattgagttgtcgccgaccttttgataaaacatgtagattgatgtgtcatcagcgtctttcgggcttcccgcaagagcaaacacaacgtgatagccgttgtattcagctactgttccgtcagcgttttgcagcggccagctgtcccacacatcaagtccttttgcagactcaatatttttaatcgttgattgatcgaattgaggcacttggtatttttcgttttgctgctgtttagggatcattccacagttagcgacgacatgttcaatccttgaccttgacggcaaagaatatactcgtagactcacgcgaatagtcgcatcaccaatataaagtggatccgtgatcccagtccgataatcagaccgaaaacacaagtggtatcctggtcccagactaataatcagaccgacgatacgagtaggaccgctgatcccagacgacgatacgagaggcccgtagtcacagactaataatagaccgccgatacgagatggaccatggtccccgcctaataaactggacgacgatacgatatggaccgtggtcccagtctttatggcagcaaccccgatcaccggtgtaaatacgtcttcagcacgtcgcaatcgcgtaccaaacacatcacgcatatgattaatttgttcaattgtataaccaacacgttgctcaacccgtcctcgaatttccatatccgggtgcggtagncgccctgctttctcggcatctctgatagcctgagaagaaaccccaactaaatccgctgcttcacctattctccagcgccgggttattttcctcgcttccgggctgtcatcattaaactgtgcaatggcgatagccttcgtcatttcatgaccagcgtttatgcactggttaagtgtttccatgagtttcattctgaacatcctgaccgggcagatagcttcaccggggtgagaaaaaagagcaacaactgatttaggcaatttggcggtgttgatacagcgggtaataatcttacgtgaaatattttccgcatcagccagcgcagaaatatttccagcaaattcattctgcaatcggcttgcataacgctgaccacgttcataagcacttgttgggcgataatcgttacccaatctgaataatgcagccatctgctcatcatccagctcgccaaccagaacacgataatcactttcggtaagtgcagcagctttacgacggcgactcccatcggcaatttctatgacaccagatactcttcgaccgaacgccggtgtctgttgaccagtcagtagaaaagaagggatgagatcatccagtgcgtcctcagtaagcagctcctggtcacgttcattacctgaccatacccgagaggtcttctcaacactatcaccccggagcacttcaagagtaaacttcacatcccgaccacatacaggcaaagtaatggcattaccgcgagccattactcctacgcgcgcaattaacgaatccaccatcggggcagctggtgtcgataacgaagtatctttaccaacttcatccgtttcacgtacaacattttttagaaccatgcttccccaggcatcccgaatttgctcctccatccacggggactgagagccattactattgctgtatttggtaagcaaaatacgtacatcaggctcgaaccctttaagatcaacgttcttgagcagatcacgaagcatatcgaaaaacttgagaacattgccttctaataggtttggaccctggagttgtaattctgaacaagtctgtgggatattcactgttggctccttcagctgcactctccagacttctccactctgctccgagatccaagaggttgccttatgtggtctataccaataggctcccttgccatctggttctgccttgagtgacaggaccttgactgatccagtgccccaggacttccacagctttgtcacctcattgactctcactttatcatggggggatcctctagagtcgacctgcaggcattcattgtngcagctatgatcggtcacagcaaaaggatacaaagcaaaatcagcaaagggtaaaggagtattgggtgaagtccaggggaaatgaggcacaagcttccaagaggcctctcccttataagatgaataggaatcttcagaccagtaaggtaggaagagtattcggacattaatcgtgccgatacccaggttaggcgcgctgtcaataactatgacatcatagtcatgagcaacagtttcaatggccagtcggagcatcaggtgtggatcggtgggcagtttaccttcatcaaatttgcccattaactcagtttcaatacggtgcagagccagacaggaaggaataatgtcaagccccggccagcaagtgggctttattgcataagtgacatcgtccttttccccaagatagaaaggcaggagagtgtcttctgcatgaatatgaagatctggtacccatccgtgatacattgaggctgttccctgggggtcgttaccttccacgagcaaaacacgtagccccttcagagccagatcctgagcaagatgaacagaaactgaggttttgtaaacgccacctttatgggcagcaaccccgatcaccggtggaaatacgtcttcagcacgtcgcaatcgcgtaccaaacacatcacgcatatgattaatttgttcaattgtataaccaacacgttgctcaacccgtcctcgaatttccatatccgggtgcggtagtcgccctgctttctcggcatctctgatagcctgagaagaaaccccaactaaatccgctgcttcacctattctccagcgccgggttattttcctcgcttccgggctgtcatcattaaactgtgcaatggcgatagccttcgtcatttcatgaccagcgtttatgcactgcaggaagcggcggcggaagtcaggcatacgctggtaactttgaggcagctggtaacgctctatgatccagtcgattttcagagagacgatgcctgagccatccgggcttacgatactgacacagggattcgtataaacgcatggcatacggattggtgatttcttttgtttcactaagccgaaactgcgtaaaccggttctgtaacccgataaagaagggaatgagatatgggttgatatgtacactgtaaagccctctggatggactgtgcgcacgtttgataaaccaaggaaaagattcatagcctttttcatcgccggcatcctcttcagggcgataaaaaaccacttccttccccgcgaaactcttcaatgcctgccgtatatccttactggcttccgcagaggtcaatccgaatatttcagcatatttagcaacatggatctcgcagataccgtcatgttcctgtagggtgccatcagattttctgatctggtcaacgaacagatacagcatacgtttttgatcccgggagagactatatgccgcctcagtgaggtcgtttgactggacgattcgcgggctatttttacgtttcttgtgattgataaccgctgtttccgccatgacagatccatgtgaagtgtgacaagtttttagattgtcacacagagcagacaggttgagcttcacaccagcctcaaggggtggagtgtagctgaccccagtcaaccagtggttgactttggtagaaatgaaagcaatgggtttcaattgaaatttagctgcaaggccaaaacgagtgcagctggtacttgatgtccaagccaggtttattaaagcatcaagttcttcacaaactttttgataaactgatcctccaaattctgccccatcattgacattagtgtgcagctggaagtccccagtcctgtagcccactgcaaagttattctttgtctgctttgacttggtgctgttaaagctcatctggtacccagcaagctgagccatgaattgcaagtccagcaaaatcaaagttaacat

SEQ ID NO: 13484 - DNA, 3201 bp, Homo sapiens
  SIMILAR (1)..(201): 791254mologous to Homo sapiens ribosomal protein L31 (AA 1- 125),accession number X15940,Smith-Waterman Score=260.
  misc_feature (1)...(3201): n = a,t,c or g
atgaaactcatggaaacacttaaccagtgcataaacgctggtcatgaaatgacgaaggctatcgccattgcacagtttaatgatgacagcccggaagccaccccaataacccggcgctggagaatagatgaaacagcggatttagatagggtttcttctcaggctatcagagatgccgagaaagcagggcgactaccgggcacccgggatatggaaattcgaggacggcttgagcaacgtgttggttatacaattgaagaaattaatcatatgcgtgatgatacttcgttatcgacaccagctgccccgatggtggattcgttaattgcgcgcgtaggagtaatggctcgcggtaatgccattactttgcctgtatgtggtcgggatgtgaagtttactcttgaagtgctccggggtgatagtgttgagaagacctctcgggtatggtcaggtaatgaacgtgaccaggagctgcttactgaggacgcactggatgatctcatcccttcttttctactgactggtcaacagacaccggcgttcggtcgaagagtatctggtgtcatagaaattgccgatgggagtcgccgtcgtaaagctgctgcacttaccgaaagtgattatcgtgttctggttggcgagctggatgatgagcagatggctgcattatccagattgggtaacgattatcgcccaacaagtgcttatgaacgtggtcagcgttatgcaagccgattgcagaatgaatttgctggaaatatttctgcgctggctgatgcggaaaatatttcacgtaagattattacccgctgtatcaacaccgccaaattgcctaaatcagttgttgctcttttttctcaccccggtgaactatctgcccggtcaggtgatgcacttcaaaaagcctttacagataaagaggaattagttaagcagcaggcatctaacttacaaagcagaaaaaaatacagcaagatggccaggccactctatactgtattcaaggaaacccagagggcaactactcatctagtagaatcccacaccagtggcagaaacagccttcaaaacaataaagcaggccctagtacaagcgccagccttaagctttcccacaggacaaaacttctcttatttgtcatagagagagcaggagtagctcttgcactccttactcagacttgtgggacaaccccagaaccagtggcatatctaaattattacccgctgtatcaacaccgccaaaatgccctaaatcagttgtgcttcttttttctcacccccggtgaactatctgcccggtcaggtgatgcacttcaaaaagcctttacagataaagaggaattacttaagcagcaggcatctaaccttcatgagcagaaaaaagctggggtatttattcgcgataagctcatggagcggcgtaaccgtcgcacaggaaggacagagaaagcgcggatctgggaagtgacggacagaacggtcaggacctggattggggaggcggttgccgccgctgctgctgacggtgtgacgttctctgttccggtcacaccacatacgttccgccattcctatgcgatgcacatgctgtatgccggtataccgctgaaagttctgcaaagcctgatgggacataagtccatcagttcaacggaagtctacacgaaggtttttgcgctggatgtggctgcccggcaccggnatcacaaaacgatttttgacggtgacggaaaaacatatcagaacgttcagcagtttatcgatgaaggcaattatacatccggcgacaaccatacgctgagagaccctcactacgttgaagacaaaggccataaataccttgtattcgaagccaacacgggaacagaaaacggataccaaggcgaagaatctttatttaacaaagcgtactacggcggcggcacgaacttcttccgtaaagaaagccagaagcttcagcagagcgctaaaaaacgcgatgctgagttagcgaacggcgccctcggtatcatagagttaaataatgattacacattgaaaaaagtaatgaagccgctgatcacttcaaacacggtaactgatgaaatcgagcgcgcgaatgttttcaaaatgaacggcaaatggtacttgttcactgattcacgcggttcaaaaatgacgatcgatggtattaactcaaacgatatttacatgcttggttggcccagggcttcccggtatcaacagggacaccaggatttatttattctgcgaagtgatcttccgtcacaggtatttattcgcgataagctcatggagcggcgtaaccgtcgcacaggaaggacagagaaagcgcggatctgggaagtgacggacagaacggtcaggacctggattggggaggcggttgccgccgctgctgctgacggtgtgacgttctctgttccggtcacaccacatacgttccgccattcctatgcgatgcacatgctgtatgccgacttttttcatgctgcttctcgcctcttctctctggtgttcaaactgctaatctctcaggcccttgagtatgcaggtttctcttatctcaaagcctttgcaattgccggtccctctgcttataaatcccttcctgagtctttggatgctcaggggagactctgttctcaggctccacatgggcagtacctgaactgcaggcgcctcccctcacccaacaggtgcaatgctgcaggactccagatccgaggtctcacagattcaaataagcagaaaatcaccaagaacatattgcttaatgatattatccaggataacttccccaatctagcaaggcaggccaacattcaaattcaggaaatacagagaatgccacaaagatactcctcgagaagagcaactccaagacacataattgtcagattcaccaaagttgaaatgaaggaaaaaatattaagggcagacagagagaaaggtcaggttacccacaaagggaagcccatcagactaccagcggatctctcagcagaaactctacaagccagaagagagtgggggccaatattcaacattcttaaagaaaagaattttcaacccagaatttcatatccagccaaattaagcttcataagtgaaggagaaataaaatactttacagacaagcaaatgctgagagattttgtcaccaccaggcctgccctacgagagctcctgaagtaa

SEQ ID NO: 13485 - DNA, 4851 bp, Homo sapiens
  SIMILAR (2364)..(3023): 991254mologous to Cloning vector pZC320 SopB,accession number U26464,Smith-Waterman Score=1089.
atgcagggcatgcaagccctagctaggacagttgatggtaaggaagaaagcctcaaccttgatcaagcttttcaatgggctggaaaaagttcttcttttgggacctgtcccaataaatttcgatcgtcgattaaccccgctggagatagaatattaagcggggcctgttatccaaaactacgtcaatactcaaccggtggagaaacttcgtattcgacaccagctgccccgatggtggattcgttaattgcgcgcgtaggagtaatggctcccggtaatgccattactttgcctgtatgtggtcgggatgtgaagtttactcttgaagtgctccggggtgatagtgttaagaagacctctcgggtatggtcaggtaatgaacgtgaccaggagctgcttactgaggacgcactggatgatctcatcccttcttttctactgactggtcaacagacaccggcgttcggtcgaagagtatctggtgtcatagaaattgccgatgggagtcgccgtcgtaaagctgctgcacttaccgaaagtgattatcgtgttctggttggcgagctggatgatgagcagatggctgcattatccagattgggtaacgattatcgcccaacaagtgcttatgaacgtggtcagcgttatgcaagccgattgcagaatgaatttgctggaaatatttctgcgctggctgatgcggaaaatatttcacgtaagattattacccgctgtatcaacaccgccaaattgcctaaatcagttgttgctcttttttctcaccccggtgaactatctgcccggtcaggtgatgcacttcaaaaagcctttacagataaagaggaattacttaagcagcaggggggatcctctagagtcggcgacaactcaatcgacagctggaaaacgcggggccgtgtctttaaagacagcgataagttcgacgccaacgatccgatcctgaaagatcagacgcaagaatggtccggttctgcaacctttaccatggacggacaaattccgtttattctaccaggcatatttccggtaaccattccggcaaaccaaagcctgccaccggcgcaggtaattgtgtcaaattctgttgaccacctcaaaatcaccggggtggaagatcacaaaccgatttttgccggagccggaaaaccatatcagaaccttcgccagtttatcgatgaaggcaattatacatccggcgacaaccatacgctgagagaccctcactacgttgaagacaaagcccataaataccttgtattcgaagccaacacgggaacagaaaacggataccaaggcgaagaatctttatttaacaaagcgtactacggcggcggcacgaacttcttccggggatcctctagagtcgacctgcaggcatgctgaagaacacatcgacagcaccacaacaacgaatctatcatacactgacaaacacacagcacaaaacgattcacacccagggacagctaaaacacaaacgacaataacagatcaccacgaccacagccacaaacagtggctccaattgccgagccgagcaggactggccgcggaccaaagcggtcggacagtgctccgagaacgggtgcgcatagaaaattgcatacaaacgcactatagccgctcagcaagcaacgcccaagcgcccaggccagtacgcggcaatgaacccaagccatatgccatacaaacataccagggtgacggagcagaggaagacgatgagacttacagccccaatttagaccgcgtaaccaccaaaaagacacaccgtggttgccaagcaaagatggcgggagtatcccctgaattcaaccacagtgaccccttatgcctcatgccaccagaagttagcgtgagccttggtgttcccaatcagtatctctggacttctcaaaccacaaatccacctcgcactggggatgggagagcagaaggctccaaggcacacaaggaccttgatgaggagataagccttattcctacagttaatgtgaggaaaaacctgtttttcctggaaatgcctactttggccgacacaaatattttcccgccacgcggcggtccaatttccctacgacacactaaggggccgtgtgacaatctaaaaacttgtcacacttcacatggatctgtcatggcggaaacagcggttatcaatcacaagaaacgtaaaaatagcccgcgaatcgtccagtcaaacgacctcactgaggcggcatatagtctctcccgggatcaaaaacgtatgctgtatctgttcgttgaccagatcagaaaatctgatggcaccctacaggaacatgacggagtaatggctcgcgctaatgccattactttgccctgtatgtggtcgggatgtaaagtttactcttgaagtgctccggggtgatagtgttgacaagacctctcgggtatggtcaggtaatgaacgtgaccaggagctgcttactgaggacgcactggatgatctcatcccttcttttctactgactggtcaacagacaccggcgttcggtcgaagagtatctggtgtcatagaaattgccgatgggagtcgccgtcgtaaagctgctgcacttaccgaaagtgattatcgtgttctggttggcgagctggatgatgagcagatggctgcattatccagattgggtaacgattatcgcccaacaagtgcttatgaacgtggtcagcgttatgcaagccgattgcagaatgaatttgctggaaatatttctgcgctggctgatgcggaaaatatttcacgtaagattattacccgctgtatcaacaccgccaaattgcctaaatcagttgttgctcttttttctcaccccggtgaactatctgcccggtcaggtgatgcacttcaaaaagcctttacagataaagaggaattacttaagcagcaggcatctaaccttcatgagcagaaaaaagctggggtgatatttgaagctgaagaagttatcactcttttaacttctgtgcttaaaacgtcaggggattttgccgatttcggaaccaccatcaaacaggattttcgcctgctggggcaaaccagcgtggaccgcttgctgcaactctctcagggccaggcggtgaagggcaatcagctgttgcccgtctcactggtgaaaagaaaaaccaccctggcgcccaatacgcaaaccgcctctccccgcgcgttggccgattcattaatgcagctggcacgacaggtttcccgactggaaagcgggcagcataggcttggttatgccggtactgccgggcctcttgcgggatatcgtccattccgacagcatcgccagtcactatggcgtgctgctagcgctatatgcgttgatgcaatttctatgcgcacccgttctcggagcactgtccgaccgctttggccgccgcccagtcctgctcgcttcgctacttggagccactatcgactacgcgatcatggcgaccacacccgtcctgtggatctacccactaggattttgccgatttgggaccccccatcaaacaggattttcgccggttggggcaacccagcgtggaccggcttgctgcaactctctcagggcccagccggtgaagggcaatcagctgttgcccgtctcactggtgaaaagaaaaacccacccctggcgcccaatacgcaaaccgcctctccccgcgcgttggccgatttcattaatgcagcgggcacgacaggtttccccgactggaaagcgggcagaggccggatgtcgtgcgtcgaattgtgacaacgcgaaatgagattcgcgcggagtccattgcgatagtgtggacgtagaatgtcgacgggccaggcggtccgccgaggcttacccaaataggcaaggggggcaggaaggaagaacggcgagtatgggcaaaagaacaggctggtaaagggttggaagcctcattttcttgtttttgcatcctcccatccccaggacccagtaccttcaagcgttggctgtacggattaccagctcctgaattgcaggcctcttttccataaccagaaagacttgtaagtgcttctgtttccttccccataaactccccaggacccagtaccttcaagcgttggctgtacggattaccagctcctgaattgcaggcctcttttccataaccagaaagacttgtaagtgcttctgtttccttccccataaactcccggtgccgggcagccacatccagcgcaaaaaccttcgtgtagacttcggttgaactgatggacttatgtcccatcaggctttgcagaactttcagcggtataccggcatacagcatgtgcatcgcataggaatggcggaacgtatgtggtgtgaccggaacagagaacgtcacaccgtcagcagcagcggcggcaaccgcctccccaatccaggtcctgaccgttctgtccgtcacttcccagatccgcgctttctctgtccttcctgtgcgacggttacgccgctccatgagcttatcgcgaataaatacctttgaaattacccatgaaatccgcacgctgacaccatcagtggtaccagcagtaaggtgttttctctttctttttcctgcagttccacaaaacctctcgaatctagattcatttgtgctgatggagaatatatccagcccagaagcaatcacagggccacgcttcaagaaaccggctcggtcgcggggctcgccggacaggccaatgaaccgtgggtacaaggtggagtttgtcttgggcagtaggaggacagcccgggcacccaggggcccaattccaggggaaagccatctcccttctggaattgcccaactccgggggaaaaccat

SEQ ID NO: 13486 - DNA, 4171 bp, Homo sapiens
  SIMILAR (2321)..(5326): 971254mologous to Homo sapiens Gag-Pro-Pol-Env protein,accession number AF164611,Smith-Waterman Score=5163.
ctagagtcgattggcaggatgatacaccttaaaggcctgacagattgggaattcctgctctccataaagcctgttggcaatactcagtgtgtaatcagtcttgatcctgtctaatttggagagaagctgcccaaagtagcagctgaccagtccgctctcattgtttaaggacccagcctttttaacttggatagtcacaggatcataccgaatgattcgccctcccccagatggaggtgcttgagtgttaaacaagagcagttcctggtgtgagtgggccactataaaagagggaaggtgaaggtccgagaagtgagaggcgctggcaacaggaatggtgaagtggtacagggtggcggtagcagctggggtggacaggaagaccatatgcagagtcacggagggacctgtggttggggacagagcagcacagcgtgatggtctaagtttccaaaggggagcattgaaggtgactttaacattgttgtagtcacatataggagaatgtaagagattattatgaaacaatgtagtaaatgtacaatagggaattctagataagcacagcagagaagcaaccagctccttttcaggtcctttcctgagactgattcggctggaagggagtaggtcccgccaaatgaagaagctttccgagacaacagccccagtggctgcagctgcctgggtaccgttttcatccacctccacaaaggttttgtggataatttttgacaagtacaaattgggacttggagagattccagtaagatcagccctcgtttcatcaaagatatccgtaatgcccatgtcttgtaaaatggaattgagatcatagctgtcttccagggtgaaccgggggaaggacaggaccaccgattcttctgacatgttttctgagctgctccaggccaccattttttcataggtgattttcctttcaagcgtcagcagcagcggcgcaaccgcctccccaatccaggtcctgaccgttctgtccgtcacttcccagatccgcgctttctctgtccttcctgtgcgacggttacgccgctccatgagcttatcgcgaataaatacctgtgacggaagatcacttcgcagaataaataaatcctggtgtccctgttgataccgggaagccctgggccaacttttggcgaaaatgagacgttgatcggcacgtaagaggttccaactttcaccataatgaaataagatcaatatgtttattgcggcattattcacaatagcaaagactttggaaccaacccaaaatgtccaacaatgatagactggattaagaaaaggggatcctctagagtcgcatcatccagctcgccaaccagaacacgataatcactttcggtaagtgcagcagctttacgacggcgactcccatcggcaatttctatgacaccagatactcttcgaccgaacgccggtgtctgttgaccagtcagtagaaaagaagggatgagatcatccagtgcgtcctcagtaagcagctcctggtcacgttcattacctgaccatacccgagaggtcttctcaacactatcaccccggagcacttcaagagtaaacttcacatcccgaccacatacaggcaaagtaatggcattaccgcgagccattactcctacgcgcgcaattaacgaatccaccatcggggcagctggtgtcgataacgaagtatcagttgaagagcgttgatcaatggcctgttcaaaaacagttctcatccggatctgacctttaccaacttcatccgtttcacgtacaacattttttagaaccatgcttccccaggcatcccgaatttgctcctccatccacggggactgagagccattactattgctgtatttggtaagcaaaatacgtacatcaggctcgaaccctttaagatcaacgttcttgagcagatcacgaagcatatcgaaaggggatcctctagagtcgacctggatgtccaggcagaagtctactgcaggaatggagcccttatgaaaaacttctacaagggcagtgcagaaggcaaacgtggggttggagccctcacacaaagtgccacttgggccactgcctagtgaagctgtgagagaagagccactgtgctccagaccccagaatggtagatctaccaacagcttgcaccatatgcctgcaggcatgcaagcttcttgaccgggcagatatttccccgggtgagaaaaaagagcaacaactgatttagccaatttggcggtgttgatccagcggataataatcttacgtgaaatattttccgcatcagccagcgccgaaatatttccagcaaattcattctgcaatcggcttgcataacgctgaccacgttcataagcacttgttgggcgataatcgttacccaatctggataatgcagccatctgctcatcatccagctcgccaaccagaacacgataatcactttcggtaagtgcagcagctttacgacggcgactcccatcggcaatttctatgacaccagatactcttcgaccgaacgccggtgtctgttgaccagtcagtagaaaagaagggatgagatcatccagtgcgtcctcagtaagcagctcctggtcacgttcattacctgaccatacccgagaggtcttctcaacactatcaccccggagcacttcaagagtaaacttcacatcccgaccacatacaggcaaagtaatggcattaccgcgagccattactcctacgcgcgcaattaacgaatccaccatcggggcagctggtgtcgataacgaagtatcttcaaccggttgagtattgagcgtatgttttggaataacaggcgcacgcttcattatctaatctcccagcgtggtttaatcagacgatcgaaaatttcattgcagacaggttcccaaatagaaagagcatttctccaggcaccagttgaagagcgttgatcaatggcctgttcaaaaacagttctcatccggatctgacctttaccaaacttcatccggtttacggacaacattttttaaaaccatgctttcccaggccatcccgaatttggctccttcatccacggtgactgagagccattactattgctgtatttggtaagcaaaatacgtacatcaggctcgaaccctttaagatcaacgttcttgagcagatcacgaagcatatcgaaaaacccagcttttttctgctcatgaaggttagatgcctgctgcttaagtaattcctctttatctgtaaaggctttttgaagtgcatcacctgaccgggcagatagttcaccggggtgagaaaaaagagcaacaactgatttaggcaatttggcaagagttgatacagcgggggataatcttacgtgaaatattttccgcatcagccagcgcagaaatatttccagcaaattcattctgcaatcggcttgcataacgctgaccacgttcataagcacttgttgggcgataatcgttacccaatctggataatgcagccatctgctcatcatccagctcgccaaccagaacacgataatcactttcggtaagtgcagcagctttacgacggcgactcccatcggcaatttctatgacaccagatactcttcgaccgaacgccggtgtctgttgaccagtcagtagaaaagaagggatgagatcatccaatgcgtcctccataagcagctcctggtcacgttcattacctgaccatacccgaaaagtcttctcaacactatcaaccccgagcacttcaagaagtaaattcacatcccgaacccgtgaaatattttccgcatcagccagcgcagaaatatttccagcaaattcattctgcaatcggcttgcataacgtcttttctgggggtgagcacttgttgggcgataatcgttacccaatctggataatgggggcatctgctcatcatacagctcgccaaccagaacacgataatcactttcggtaagtgcagcagctttacgacggcgacttccatcggcaatttctatgacaccagatactcttctacccaacgccggtgtctgttgaccagtcagtagaaaagaagggatgagatcattcagtgcgttctcagtaagcagcttctggtcacgttcattacccgaccatacccgagaggtgtttttaacactatcacccccgggca

SEQ ID NO: 13487 - DNA, 4787 bp, Homo sapiens
  SIMILAR (1006)..(2508): 961254mologous to Homo sapiens putative p150,accession number U93563,Smith-Waterman Score=2579.
atggacgatatcccgcaagaggcccggcagtaccggcataaccaagcctatgcctacagcatccagggtgacggtgccgaggatgacgatgagcgcattgttagatttcatacacgggtcaccgtcgacagcgacacacttgcatcggatgcagcccggttaacgtgccggcacggcctgggtaaccagtgtgacaatctaaaaacttgtcacacttcacatggatctgtcatggcggaaacagcggttatcaatcacaagaaacgtaaaaatagcccgcgaatcgtccagtcaaacgacctcactgaggcggcatatagtctctcccgggatcaaaaacgtatgctgtatctgttcgttgaccagatcagaaaatctgatggcaccctacaggaacatgacggtatctgcgagatccatgttgctaaatatgctgaaatattcggattgacctctgcggaagccagtaaggatatacggcaggcattgaagagtttcgcggggaaggaagtggttttttatcgccctgaagaggatgccggcgatgaaaaaggctatgaatcttttccttggtttatcaaacgtgcgcacagtccatccagagggctttacagtgtacatatcaacccatatctcattcccttctttatcgggttacagaaccggtttacgcagtttcggcttagtgaaacaaaagaaatcaccaatccgtatgccatgcgtttatacgaatccctgtgtcagtatcgtaagccggatggctcaggcatcgtctctctgaaaatcgactggatcatagagcgttaccagctgcctcaaagttaccagcgtaagcctaacaacagccgccgcttcctgcaggtctgtgttaatgagatcaacagcagaactccaatgcgcctctcatacattgagaaaaagaaaggccgccagacgactcatatcgctatcagagatgccgagaaagcagggcgactaccgcacccggatatggaaattcgaggacgggttgagcaacgtgttggttatacaattgaacaaattaatcatatgcgtgatgtgtttggtacgcgattgcgacgtgctgaagacgtatttccaccggtgatcggggttgctgcccataaaggtggcgtttacaaaacctcagtttctgttcatcttgctcaggatctggctctgaaggggctacgtgttttggttcgtgaaagggtaaccacccccaagggaacaggcctcaatgtatcagggatggggtaccagatctttaatattcatgcagaagacactctcctgcttttctatcttggggaaaaggacgatgtcacttatgcaataaagcccacttgctggccggggcttgacattattccttcctgtctggctttgcaccgtattgaaactgagttaatgggcaaatttgatgaaggtaaactgcccaccgatccacacctgatgctccgactggccattgaaactgttgctcatgactatgatgtcatagttattgacagcgcgcctaacctgggtatcggcacgattaatgtcgtatgtgctgctgatgtgctgattgttcccacgcctgctgagttgtttgactacacctccgcactgcagtttttcgatatgcttcgtgatctgctcaagaacgttgatcttaaagggttcgagcctgatgtacgtattttgcttaccaaatacagcaatagtaatggctatcagtccccgtggatggaggagcaaattcgggatgcctggggaagcatggttctaaaaaatgttgtacgtgaaacggatgaagttggtaaaggtcagatccggatgagaactgtttttgaacaggccattgatcaacgctcttcaacaagtgcctggagaaatgctcttgcagcgaaccggtttacgcagtttcggcttagtgaaacaaaagaaatcaccaatccgtatgccatgcgtttatacgaatccctgtgtcagtatcgtaagccggatggctcaggcatcgtctctctgaaaatcgactggatcatagagcgttaccagctgcctcaaagttaccagcgtatgcctgacttccgccgccgcttcctgcaggattttcgcctgttggggcaaaccagcgtggaccgcttgctccaactctctcagggccagtcggtgaagggcaatcagctgttgcccgtctcactggtgaaaagaaaaaccaccctggcgcccaatacgcaaaccgcctctccccgcgcgttggccgattcattaatgcagctggcacgacaggtttcccgactggaaagcgggcaggattttgccgatttcggaaccaccatcaaacaggattttcgcctgctggggcaaaccagcgtggaccgcttgctgcaactctctcagggccaggcggtgaagggcaatcagctgttgcccgtctcactggtgaaaagaaaaaccaccctggcgcccaatacgcaaaccgcctctccccgcgcgttggccgattcattaatgcagctggcacgacaggtttcccgactggaaagcgggcaggattttgccgatttcggaaccaccatcaaacaggattttcgcctgctggggcaaaccagcgtggaccgcttgctgcaactctctcagggccaggcggtgaagggcaatcagctgttgcccgtctcactggtgaaaagaaaaaccaccctggcgcccaatacgcaaaccgcctctccccgcgcgttggccgattcattaatgcagctggcacgacaggtttcccgactggaaagcgggcagtttcccatgaaatataagcctttcaagggcttcaaggaatccaaggtttgcacttccaggcatttccaggcttattctgctggaactctaattcctccatcctttcctaactgccacatctgggattttgccgatttcggaaccaccatcaaacaggattttcgcctgctggggcaaaccagcgtggaccgcttgctgcaactctctcagggccaggcggtgaagggcaatcagctgttgcccgtctcactggtgaaaagaaaaaccaccctggcgcccaatacgcaaaccgcctctccccgcgcgttggccgattcattaatgcagctggcacgacaggtttcccgactggaaagcgggcaaaaatttcgtaacggacaccagtgcgcccgaaggggggattggttaattgcgcgcgagggagaaaaggctcgcggaaaggccaatacttggctggtacgtggcggggatgtgaagtttactcttgaagtgctccggggtgaaagtgttaagaagacctttcgggtaaggccaggtaatgaacgtgaccaggagctgcttactgaggacgcactggatgatctcatcccttcttttctactgactggtcatcagacaccggcgttcggtcgaagagtatctggtgtcatagaaattgccgatgggagtcgccgtcgtaaagctgctgcacttaccgaaagtgattatcgtgttctggttggcgagctggatgatgagcagatggctgcattatccagattgggtaacgattatcgcccaacaagtgcttatgaacgtggtcagcgttatgcaagccgattgcagaatgaatttgctggaaatatttctgcgctggctgatgcggaaaatatttcacgtaagattattacccgctgtatcaacaccgccaaattgcctaaatcagttgttgctcttttttctcaccccggtgaactatctgcccggtcagggatttgccggatttcggaacccaccatcaaacaggattttcgcctgctggggcaaaccagcgtggaccgcttgctgcaactctctcagggccaggcggtgaagggcaatcagctgttgcccgtctcactggaaacagctatgaccatgattacgaattcgagctcggtacccattgagaatatgtttttcgtctcagccaatccctgggtgagtttcaccagttttgatttaaacgtggccaatatggacaacttcttcgcccccgttttcaccatgggcaaatattatacgcaaggcgacaaggtgctgatgccgctggcgattcagacaaaaacagcatatccactcagttccacatttccatataaaggccaaggcatttattctcaggataattgtttcagcatcgcaaccgcatcagactccggcatcgcaaactgcacccggtgccgggcagccacatccagcgcaaaaaccttcgtgtagacttccgttgaactgatggacttatgtcccatcaggctttgcagaactttcagcggtataccggcatacagcatgtgcatcgcataggaatggcggaacgtatgtggtgtgaccggaacagagaacgtcacaccgtcagcagcagcggcggcaaccgcctccccaatccaggtcctgaccgttctgtccgtcacttcccagatccgcgctttctctgtccttcctgtgcgacggttacgccgctccatgagcttatcgcgaataaatacctgtgacggaagatcacttcgcagaataaataaatcctggtgtccctgttgataccggaaagccctgggccaaccagaactcgcgctggcccgcaagcctgtgcgcagccccagttcccgcacgcgcctctccctccacacctccccgcaagctgagggagccggctccggccttggccagcccagaaaggggctcccacagtgcagcggcgggttgaagcgctcaagtgcggccagagtgggcgccaaggccaaggaggcaccgagagcgagcgaggg

SEQ ID NO: 13488 - DNA, 1187 bp, Homo sapiens
  SIMILAR (344)..(847): 791254mologous to Shigella dysenteriae RepE,accession number AF239690,Smith-Waterman Score=643.
atgcctgcaagcggtaacgaaaacgatttgaatatgccttcaggaacaatagaaatcttcgtgcggtgttacgttgaagtggagcggattatgcctttggactggcagagggaactgcctggagaccatggagaggcttccacatggagcccaaaacgttccagtgttctgggcagtgcagtaagatgcacctctgcgtgcctatcccacaaggctctgcgttttgtcttaggcagaggacccccgctgtatctgttcgttgaccagatcagaaaatctgatggcaccctacaggaacatgacggtatctgcgagatccatgtgactgagaaagccctggcagttccccatgtcctttgccgtgcccaacaaggatatacggcaggcattgaagagtttcgcggggaaggaagtggttttttatcgccctgaagaggatgccggcgatgaaaaaggctatgaatcttttccttggtttatcaaacgtgcgcacagtccatccagagggctttacagggtacatatcaacccatatctcattcccttctttatcgggttacagaaccggtttacgcagtttcggcttagtgaaacaaaagaaatcaccaatccgtatgccatgcgtttatacgaatccctgtgtcagtatcgtaagccggatggctcaggcatcgtctctctgaaaatcgactggatcatagagcgttaccagctgccctcaaagataccagcgtatgcctgacttccgccgccgcttcctgcaggtctgtgttaatgagatcaacagcagaactccaatgcgcctctcatacattgagaaaaagaaggccgccagacgactcatatccctggggacagttcacccccaatcacagctggtacttggccctgaggggccagtggaacaatccactagcttggttccagttccccaggccttgagcacaccacccaggggtatggagatgagagccatggccttatctcaacaggggaaagagctctcactgtcagaacacagacaagcatgtagtgtgggtttgtgtggtgatgagggaggtggtcgctgctccctttgtgagactggaccagggaggagaactgcagtttctgccatggggagcctagcagtccagaaacctgaatggctcagcaatctggatatggatggcttggaaccagcctaa

SEQ ID NO: 13489 - DNA, 2569 bp, Homo sapiens
  SIMILAR (94)..(1476): 921254mologous to Homo sapiens putative p150,accession number U93572,Smith-Waterman Score=2169.
ctatcctgtcgtcatggaagtgatatcgcggaaggaaaatacgatatgagtcgtctggcggcctttctttttctcaatgtatgagaggcgcattggagttctgctgttgatctcattaacacagacctgcaggaagcggcggcggaagtcaggcatacgctggtaactttgaggcagctggtaacgctctatgatccagtcgattttcagagagacgatgcctgagccatccggcttacgatactgacacagggattcgtataaacgcatggcatacggattggtgatctctgttgtttcactaagccgtaaactgcgtaaaccggttctgtaacccgataaagaagggaatgagatatgggttgatatgtacactgtaaagccctctggatggactgtgcgcacgtttgataaaccaaggaaaagattcatagcctttttcatcgccggcatcctcttcagggcgataaaaaaccacttccttccccgcgaaactcttcaatgcctgccgtatatccttactggcttccgcagaggtcaatccgaatatttcagcatatttagcaacatggatctcgcagataccgtcatgttcctgtagggtgccatcagattttctgatctggtcaacgaacagatacagcatacgtttttgatcccgggagagactatatgccgcctcagtgaggtcgtttgactggacgattcgcgggctatttttacgtttcttgtgattgataaccgctgtttccgccatgacagatccatgtgaagtgtgacaagtttttagattgtcacaccggtgccgggcagccacatccagcgcaaaaaccttcgtgtagacttccgttgaactgatggacttatgtcccatcaggctttgcagaactttcagcggtataccggcatacagcatgtgcatcgcataggaatggcggaacgtatgtggtgtgaccggaacagagaacgtcacaccgtcagcagcagcggcggcaaccgcctccccaatccaggtcctgaccgttctgtccgtcacttcccacacccgcgctttctctgtccttcctgtgcgacggttacgccgctccatgagcttatcgcgaataaatacctgctccgtgtaggagccaggatgctgccagaggagaaggcagagtgctgcttcagggaggccctgaaccatggcgggggggtccattccatgcaggagccgttcccatacagggagtcgttcccatggggcactccatcccatgcgagttctaaggtggtccgggagcttgagctttgctccactctccaggtgatcctggtgcacacgtgcattgaagagctgcgcccaggatgctctctgcctagtgcacatgggcattgaagagctgtcccccgggatgctctccgccaattgtttcagcatcgcaaccgcatcagactccggcatcgcaaactgcacccggtgccgggcagccacatccagcgcaaaaaccttcgtgtagacttccgttgaactgatggacttatgtcccatcaggctttgcagaactttcagcggtataccggcatacagcatgtgcatcgcataggaatggcggaacgtatgtggtgtgaccggaacagagaacgtcacaccgtcagcagcagcggcggcaaccgcctccccaatccaggtcctgaccgttctgtccgtcacttcccagatccgcgctttctctgtccttcctgtgcgacggttacgccgctccatgagcttatcgcgaataaatacctgtgacggaagatcacttcgcagaataaataaatcctggtgtccctgttgatccagaagccctgggccaacatctctttcaggcacaccaattagttgtagatccagtctctttacacaatcccatatttcttggaggttttgttcgttccttttcattcttttttctctattcttgtctgtctgccttatttcagaaacacagtcctcaaactctgagattctttcctccacttggtcttttctgctattaatacttgtgattgcattatgaaattcttgtattgtgtttttcagctccatcaggttcattacattcttctctatactggctattttgtctgtcacttcctgcaatattttatgatttttagctttcctgcattgggttacaatgtgctccttaagatcagtgaagattgtgtttatccacattctgaattctacttctgtcatttcagccatctcagcctcaccccggttctgaacccttacagagtggcagtcattttgccggaaagcccagtgccacagtaggtaaagctcctgggcctccatgcatgcctgagtgtcctgggcctccatgcatgcctgagtggctgttctgccaagactccatgcagctctgtgtgtcagactgaaggcccattctttgttctcatctattttgacctgatgatcagcatcagcccacacagtcaaccacttccttctcaaaacacttacttccctgggcttttctatcaccgaactcctaattttcctctgattcacttcccatttgttctgagagtcctttgtcat

SEQ ID NO: 13490 - DNA, 2310 bp, Homo sapiens
  SIMILAR (1)..(948): 951254mologous to Cloning vector pZC320 SopA,accession number U26464,Smith-Waterman Score=1559.
atgaaactcatggaaacacttaaccagtgcataaacgctggtcatgaaatgacgaaggctatcgccattgcacagtttaatgatgacagcccggaagcgaggaaaataacccggcgctggagaataggtgaagcagcggatttagttggggtttcttctcaggctatcagagatgccgagaaagcagggcgactaccgcacccggatatggaaattcgaggacgggttgagcaacgtgttggttatacaattgaacaaattaatcatatgcgtgatgtgtttggtacgcgattgcgacgtgctgaagacgtatttccaccggtgatcggggttgctgcccataaaggtggcgtttacaaaacctcagtttctgttcatcttgctcaggatctggctctgaaggggctacgtgttttgctcgtggaaggtaacgacccccagggaacagcctcaatgtatcacggatgggtaccagatcttcatattcatgcagaagacactctcctgcctttctatcttggggaaaaggacgatgtcacttatgcaataaagcccacttgctggccggggcttgacattattccttcctgtctggctctgcaccgtattgaaactgagttaatgggcaaatttgatgaaggtaaactgcccaccgatccacacctgatgctccgactggccattgaaactgttgctcatgactatgatgtcatagttattgacagcgcgcctaacctgggtatcggcacgattaatgtcgtatgtgctgctgatgtgctgattgttcccacgcctgctgagttgtttgactacacctccgcactgcagtttttcgatatgcttcgtgatctgctcaagaacgttgatcttaaagggttcgagcctgatagaagcctgatagatgtggtcggagtgattaatagcaacctgtctccagagataaaagagtggcgagtgagacgcattgccctgactccacttctaattctgtgttgttatatgcggctgtttggccaagcggaggcaccacacccacagcaccgtatctggctgcaagccctggatttcctgggtcaccaagataagattctttcagtggaaaagaaaatgatctggggcagtggtatttacccagagcagggttgtaagctggagaaggcacaggaaaggcgtgttggtgcaggtttcacccctgttcctgcaatgccattatctggtgctctcccagtgagaaattcatcagtaggacaggatgcccaggaattgatcttatttcattatggtgaaagttggaacctcttacgtgccgatcaacgtctcattttcgccaaaagttggcccagggcttcccggtatcaacagggacaccaggatttatttattctgcgaagtgatcttccgtcacaggtatttattcgcgataagctcatggagcggcgtaaccgtcgcacaggaaggacagagaaagcgcggatctgggaagtgacggacagaacggtcaggacctggattggggaggcggttgccgccgctgctgctgacggtgtgacgttctctgttccggtcacaccacatacgttccgccattcctatgcgatgcacatgctgtatgccggtataccgctgaaagttctgcaaagcctgatgggacataagtccatcagttcaacggaagtctacacgaaggtttttgcgctggatgtggctgccccggcccggatccctaaacagcagcaaaacgaaaaataccaagtgcctcaattcgatcaatcaacgattaaaaatattgagtctgcaaaaggacttgatgtgtgggacagctggccgctgcaaaacgctgacggaacagtagctgaatacaacggctatcacgttgtgtttgctcttgcgggaagcccgaaagacgctgatgacacatcaatctacatgttttatcaaaaggtcggcgacaactcaatcgacagctggaaaaacgcgggccgtgtctttaaagacagcgataagttcgacgccaacgatccgatcctgaaagatcagacgcaagaatggtccggttctgcaacctttacatctgacggaaaaatccgtttattctacactgactattccggtaaacattacggcaaacaaagcctgacaacagcgcaggtaaatgtgtcaaaatctgatgacacactcaaaatcaacggagtggaagatcacaaaacgatttttgacggagacggaaaaacatatcagaacgttcagcagtttatcgatgaaaggcattatacatccggcgacaaccatacgctgagagaccctcactac

SEQ ID NO: 13491 - DNA, 6259 bp, Homo sapiens
  SIMILAR (466)..(2532): 951254mologous to Homo sapiens putative p150,accession number U93574,Smith-Waterman Score=3515.
atgaaactcatggaaacacttaaccagtgcataaacgctggtcatgaaatgacgaaggctatcgccattgcacagtttaatgatgacagcccggaagcgaggaaaataacccggcgctggagaataggtgaagcagcggatttagttggggtttcttctcaggctatcagagatgccgagaaagcagggcgactaccgcacccggatatggaaattcgaggacgggttgagcaacgtgttggttatacaattgaacaaattaatcatatgcgtgatgtgtttggtacgcgattgcgacgtgctgaagacgtatttccaccggtgatcggggttgctgcccataaaggtggcgtttacaaaacctcagtttctgttcatcttgctcaggatctggctctgaaggggctacgtgttttgctcgtggaaggtaacgacccccagggaacagcctcaatgtatcacggatgggtaccagatcttcatattcatgcagaagacactctcctgcctttctatcttggggaaaaggacgatgtcacttatgcaataaagcccacttgctggccggggcttgacattattccttcctgtctggctctgcaccgtattgaaactgagttaatgggcaaatttgatgaaggtaaactgcccaccgatccacacctgatgctccgactggccattgaaactgttgctcatgactatgatgtcatagttattgacagcgcgcctaacctgggtatcggcacgattaatgtcgtatgtgctgctgatgtgctgattgttcccacgcctgctgagttgtttgactacacctccgcactgcagtttttcgatatgcttcgtgatctgctcaagaacgttgatcttaaagggttcgagcctgatggcacacaggcaaagatgacacaaggtgaacgcaggaacgtccccaaacaagaatacatatctcgtgggtatttcacccttaaagaaaccgtgatcgatacaagcaatggaagcaggatttctttcacgactcgtataaccggcaaagacgtagtaagaaccaccagcattgtaatgctggctaaagtcactttcctgagctgtataacgatgagcgattttactttttctggctatgaattggcctgctttgtaacacactccggtctatcccgtagcgccgggcatatcctgtcgcaatgtgcaaatctcgcggcaacaaccagtgaatacttcattcacaagcctcaccgcctgatcgcggcagaaactggttatagccaatcaaccgtcgttcgtgcattccgtgaagctgtaaacaaaggaattctgtctgtagagattgttatcggcgatcaccgtgaacgtcgcgctaacctgtaccggtttacaccatcctttttggccttcgcacaacaagccaaaaatgcgctgatagaaagcaaattaaagatctcttcagcggcaaccaagtgtgacaatctaaaaacttgtcacacttcacatggatctgtcatggcggaaacagcggttatcaatcacaagaaacgtaaaaatagcccgcgaatcgtccagtcaaacgacctcactgaggcggcatatagtctctcccgggatcaaaaacgtatgctgtatctgttcgttgaccagatcagaaaatctgatggcaccctacaggaacatgacggtatctgcgagatccatgttgctaaatatgctgaaatattcggattgacctctgcggaagccagtaaggatatacggcaggcattgaagagtttcgcggggaaggaagtggttttttatcgccctgaagaggatgccggcgatgaaaaaggctatgaatcttttccttggtttatcaaacgtgcgcacagtccatccagagggctttacagtgtacatatcaacccatatctcattcccttctttatcgggttacagaaccggtttacgcagtttcggcttagtgaaacaaaagaaatcaccaatccgtatgccatgcgtttatacgaatccctgtgtcagtatcgtaagccggatggctcaggccttcgtctctctgaaaatcggctggatcatagaagcgtaccagctggctcaaagttcccagcgtatgcctgactttcgccggcggcttgctgcaggtcttgtgttaatgaaatccaacagccggaactccgaagccgccttctcatgcattgggaaaaaagaaagggcgcccagaaccactcatatctttaatgatgacagcccggaagcgaggaaaataacccggcgctggagaataggtgaagcagcggatttagttggggtttcttctcaggctatcagagatgccgagaaagcagggcgactaccgcacccggatatggaaattcgaggacgggttgagcaacgtgttggttatacaattgaacaaattaatcatatgcgtgatgtgtttggtacgcgattgcgacgtgctgaagacgtatttccaccggtgatcggggttgctgcccataaaggtggcgtttacaaaacctcagtttctgttcatcttgctcaggatctggctctgaaggggctacgtgttttgctcgtggaaggtaacgacccccagggaacagcctcaatgtatcacggatgggtaccagatcttcatattcatgcagaagacactctcctgcctttctatcttggggaaaaggacgatgtcacttatgcaataaagcccacttgctggccggggcttgacattattccttcctgtctggctctgcaccgtattgaaactgagttatggggcaaattgatgaaggcagatccttcatgcctgggcctccacccaccacccactggggcggtcaagccagtagcaggtcagcaactctctggacagagctgcgaagggcaactgaaagcctctctgccactgcccctgcagtggaactacccatgctaccctcagactaataaaggagcaaagaccctacgtgccttatgcacacctccaacaagctgtagtcgacccaaggagaggaggccacatggttcttattatgttgtacgtgtaacgggtgacgttggtaaaggtcagatccggatgagaactgttgttgaacaggccattgatcaacgctcttcaactggtgcctggagaaatgctctttctatttgggaacctgtctgcaatgaaattttctatcgtctgattaaaccacgctgggagattagatgggggaagcgtgcgcctgttattccaaaacatacgctcaatactcaaccggttgaagatacttcgttatcgacaccagctgccccgatggtggattcgttaattgcgcgcgtaggagtaatggctcgcggtaatgccattactttgcctgtatgtggtcgggatgtgaagtttactcttgaagtgctccggggtgatagtgttgagaagacctctcgggtatggtcaggtaatgaacgtgaccaggagctgcttactgaggacgcactggatgatctcatcccttcttttctactgactggtcaacagacaccggcgttcggtcgaagagtatctggtgtcatagaaattgccgatgggagtcgccgtcgtaaagctgctgcacttaccgaaagtgattatcgtgttctggttggcgagctggatgatgagcagatggctgcattatccagattgggtaacgattatcgcccaacaagtgcttatgaacgtggtcagcgttatgcaagccgattgcagaatgaatttgctggaaatatttctgcgctggctgatgcggaaaatatttcacgtaagattattacccgctgtatcaacaccgccaaattgcctaaatcagttgttgctcttttttctcacccccgtcaggcaccgtgtatgaaatctaacaatgcgctcatcgtcatcctcggcaccgtcaccctggatgctgtaggcataggcttggttatgccggatctggctctgaaggggctacgtgttttgctcgtggaaggtaacgacccccagggaacagcctcaatgtatcacggatgggtaccagatcttcatattcatgcagaagacactctcctgcctttctatcttggggaaaaggacgatgtcacttatgcaataaagcccacttgctggccggggcttgacattattccttcctgtctggctctgcaccgtattgaaactgagttaatgggcaaatttgatgaaggtaaactgcccaccgatccacacctgatgctccgactggccattgaaactgttgctcatgactatgatgtcatagttattgacagcgcgcctaacctgggtatcggcacgattaatgtcgtatgtgctgctcacgccctgattgttcccacgcctgctgagttgtttgactacacctccgcactgcagtttttcgatatgcttcgtgatctgctcaagaacgttgatcttaaagggttcgagcctgatgtacgtattttgcttaccaaatacagcaatagtaatggctctcagtccccgtggattgaggagcaaatatcggatgcctggggaagcatggttctaaaaaatgttcacgccatagtgactggcgatgctgtcggaatggacgatatcccgcaagaggcccggcagtaccggcataaccaagcctatgcctacagcatccagggtgacggtgccgaggatgacgatgagcgcattgttagatttcatacacgggtcaccgtcgacagcgacacacttgcatcggatgcagcccggttaacgtgccggcacggcctgggtaaccagcggaatggtggtgtcctgattgaagacaaattcgagtgcttcttctccctcactgcggtctttgctacaagagcctactatgctgtctatcatttgacgggtgccagacactcagacatcgtggtcgcacacgggtacgctggttgcaatgtcaggtttgttgcacttctgggcacaaataccaccttggagacctacttatctaatcaaggttctaatggcttttcttgtctgcattttggagaggatgtgggacaggagaggatccccatctgcgagatccatgttgctaaaatatgctgaaatattcgggattgaccttcgcggaaagcaataaagaatatccgccaggcattgaagagtttcgcggggaaggaagtggttttttatcgccctgaagaggatgccggcgatgaaaaaggctatgaatcttttccttggtttatcaaacgtgcgcacagtccatccagagggctttacagtgtacatatcaacccatatctcattcccttctttatcgggttacagaaccggtttacgcagtttcggcttagtgaaacaaaagaaatcaccaatccgtatgccatgcgtttatacgaatccctgtgtcagtatcgtaagccggatggctcaggcatcgtctctctgaaaatcgactggatcatagagcgttaccagctgcctcaaagttaccagcgtatgcctgacttccgccgccgcttcctgcaggtctgtgttaatgagatcaacagcagaactccaatgcgcctctcatacattgagaaaaagaaaggccgccagacgactcatatctgtgacaatctaaaaacttgtcacacttcacatggatctgtcatggcggaaacagcggttatcaatcacaagaaacgtaaaaatagcccgcgaatcgtccagtcaaacgacctcactgaggcggcatatagtctctcccgggatcaaaaacgtatgctgtatctgttcgttgaccagatcagaaaatctgatggcaccctacaggaacatgacggtatctgcgagatccatgttgctaaatatgctgaaatattcggattgacctctgcggaagccagtaaggatatacggcaggcattgaaaagtttcgcggggaaagaagtggttttttatcgccctgaagaggatgccggcgatgaaaaaggctatgaatcttttccttggtttatcaaacgtgcgcacagtccatccagagggctttacagtgtacatatcaacccatatctcattcccttctttatcgggttacagaaccggtttacacaatttcggcttattgaaacaaaagaaatcaccaatccgtatgccatgcgtttatacaaatccctgtgtcaatatcgtaaaccggatggctcaaggcatctctctttgaaaatcgactggatcatagagcggttccagctgccctcaaattaccaaccgatgcctgactttccccgccgtttcctgcaggtatga

SEQ ID NO: 13492 - DNA, 6173 bp, Homo sapiens
  SIMILAR (892)..(2715): 971254mologous to Homo sapiens putative p150,accession number U93563,Smith-Waterman Score=3159.
  misc_feature (1)...(6173): n = a,t,c or g
ccatggatatccgcgcctgttccggtggacgtggtggagggtgcaatggactctgtgacggttcttagctttggtggtttaatgctctatttttgtgctggttggcctcctgccaggaggtggtgctttccagaaagcatcagctgtggtagtatggagagggaccagtggtgggggctccaagtagcgaagcgagcaggactggccggcggccaaagcggtcggacagtgctccgagaacgggtgcgcatagaaattgcatcaacgcatatagcgctagcagcacgccatagtgactggcgatgctgtcggaatggacgatatcccgcaagaggcccggcagctttgcagaactttcagcggtataccggcatacagcatgtgcatcgcataggaatggcggaacgtatgtggtgtgaccggaacagagaacgtcacaccgtcagcagcagcggcggcaaccgcctccccaatccaggtcctgaccgttcttgtgacaatctaaaaacttgtcacacttcacatggatctgtcatggcggaaacagcggttatcaatcacaagaaacgtaaaaatagcccgcgaatcgtccagtcaaacgacctcactgaggcggcatatagtctctcccgggatcaaaaacgtatgctgtatctgttcgttgaccagatcagaaaatctgatggcaccctacaggaacatgacggtatctgcgagatccatgttgctaaatatgctgaaatattcggattgacctctgcggaagccagtaaggatatacggcaggcattgaagagtttcgcggggaaggaagtggttttttatcgccctgaagaggatgccggcgatgaaaaaggctatgaatcttttccttggtttatcaaacgtgcgcacagtccatccagagggctttacagtgtacatatcaacccatatctcattcccttctttatcgggttacagaaccggtttacgcagtttcggcttagtgaaacaaaagaaatcaccgatccgtatgccatgcgtttatacaaataccctgtgtcagtatcgggctttcgtaaatggggggggagaagaaaaggctcgcggaaagcccatactttgccggtatggggtcgggatgtgaagttaactctgaaagtgctccggggtgatagtgttgagaagacttttcgggtagggtcaggtaatgaacgtgcccagaagctgcttactgaggacgcactggatgatctcatcccttcttttctactgactggtcaacagacaccggcgttcggtcgaagagtatctggtgtcatagaaattgccgatgggagtcgccgtcgtaaagctgctgcacttaccgaaagtgattatcgtgttctggttggcgagctggatgatgagcagatggctgcattatccagattgggtaacgattatcgcccaacaagtgcttatgaacgtggtcagcgttatgcaagccgattgcagaatgaatttgctggaaatactctctgcgctggctgatgcggagtgtgacaatctaaaaacttgtcacacttcacatggatctgtcatggcggaaacagcggttatcaatcacaagaaacgtaaaaatagcccgcgaatcgtccagtcaaacgacctcactgaggcggcatatagtctctcccgggatcaaaaacgtatgctgtatctgttcgttgaccagatcagaaaatctgatggcaccctacaggaacatgacggtatctgcgagatccatgttgctaaatatgctgaaatattcggattgacctctgcggaagccagtaaggatatacggcaggcattgaagagtttcgcggggaaggaagtggttttttatcgccctgaagaggatgccggcgatgaaaaaggctatgaatcttttccttggtttatcaaacgtgcgcacagtccatccagagggctttacagtaaccggtttacgcagtttcggcttagtgaaacaaaagaaatcaccaatccgtatgccatgcgtttatacgaatccctgtgtcagtatcgtaagccggatggctcaggcatcgtctctctgaaaatcgactggatcatagagcgttaccagctgcctcaaagttaccagcgtatgcctgacttccgccgccgcttcctgcagtgcataaacgctggtcatgaaatgacgaaggctatcgccattgcacagtttaatgatgacagcccggaagcgaggaaaataacccggcgctggagaataggtgaagcagcggatttagttggggtttcttctcaggctatcagagatgccgagaaagcagggcgactaccgcacccggatatggaaattcgaggacgggttgagcaacgtgttggttatacaattgaacaaattaatcatatgcgtgatgtgtttggtacgcgattgcgacgtgctgaagacgtatttccaccggtgatcggggttgctgcccataaaggtggcgtttacaaaacctcagtttctgttcatcttgctcaggatctggctctgaaggggctacgtgttttgctcgtggaaggtaacgacccccagggaacagcctcaatgtatcacggatgggtaccagatcttcatattcatgcagaagacactctcctgcctttctatcttggggaaaaggacgatgtcacttatgcaataaagcccacttgctggccggggcttgacattattccttcctgtctggctctgcaccgtattgaaactgagttaatgggcaaatttgatgaaggtaaactgcccaccgatccacacctgatgctccgactggccattgaaactgttgctcatgactatgatgtcatagttattgacagcgcgcctaacctgggtatcggcacgattaatgtcgtatgtgctgctgatgtgctgattgttcccacgcctgctgagttgtttgactacacctccgcactgcagtttttcgatatgcttcgtgatctgctcaagaacgttgatcttaaagggttcgagccctgatgtacgtattttgcttcccaaatacagcaatagtaatggctctcagtccccgtggatggaggagcaaattcgggatgcctggggaagcatggttctaaaaaatgttgtacgtgaaacggatgaagttggtaaaggtcagatccggatgagaactgtttttgaacaggccattgatcaacgctcttcaactgatacttcgttatcgacaccagctgccccgatggtggattcgttaattgcgcgcgtaggagtaatggctcgcggtaatgccattactttgcctgtatgtggtcgggatgtgaagtttactcttgaagtgctccggggtgatagtgttgagaagacctctcgggtatggtcaggtaatgaacgtgaccaggagctgcttactgaggacgcactggatgatctcatcccttcttttctactgactggtcaacagacaccggcgtttcggtccaaaaagatcctggtgtcatagaaattgccgatgggagtcgccgtcgtaaagctgctgcacttaccgaaagtgattatcgtgtttctggttggcgaactggatgatgagcacatggctgcattatccagattgggtaacgattatcgcccaacaagtgcttatgaacgtggtcagcgttatgcaagcccgattgcagaatgaatttgctgggaaatatttcttgcgctggctgatgcggaaaatatttcacgtaagattattacccgctgtatcaacaccgccaaattggcctaaatcagttgttgctcttttttctcaccccggcgaactatctgcccggtcaggtgatgcacttcaaaaagcctttacagataaagaggaattacttaagcagggggccttttacccttattgaccggataaaagctggggtgatatttgaggctgacgaaagtatcactcttttaacttctgtgcttaaaacgtcatctgcatcaagaactagtttaagctcacgacatcagtttgctcctggagcgacagtattgtattatcgtcgataaaatgtttatcacagttaaaattgctaaacgcagtcaggcaccgtgtatgaaatctaacaatgcgctcatcgtcatcctcggcaccgtcaccctggatgctgtaggcataggcttggttatgccggtactgccgggcctcttgcgggatatcgtccattccgacagcatcgccagtcactatggcgtgctgctagcgctatatgcgttgatgcaatttctatgcgcacccgttctcggagcactgtccgaccgctttggccgccgcccagtcctgctcgcttcgctacttggagccactatcgactacgcgatcatggcgaccacacccgtcctgtggatctacccactacttgctgaaatatcagtcctgggagtaggtaaagcgtttggtattaagnataacccatatcttcatattcatgcagaagacactctcctgcctttctatcttgggcaaaaggacgatgtcacttatgcaataaagcccacttgctggccggggcttgacattattccttcctgtctggctctgcaccgtattgaaactgagttaatgggcaaatttgatgaaggtaaactgcccaccgatccacacctgatgctccgactggccattgaaactgttgctcatgactatgatgtcatagttattgacagcgcgcctaacctgggtatcggcacgattaatgtcgtatgtgctgctgatgtgctgattgttcccacgcctgctgagttgtttgactacacctccgcactgcagtttttcgatatgcttcgtgatctgctcaagaacgttgatcttaaagggttcgagcctgatgacgatgtcacttatgcaataaagcccacttgctggccggggcttgacattattccttcctgtctggctctgcaccgtattgaaactgagttaatgggcaaatttgatgaaggtaaactgcccaccgatccacacctgatgctccgactggccattgaaactgttgctcatgactatgatgtcatagttattgacagcgcgcctaacctgggtatcggcacgattaatgtcgtatgtgctgctgatgtgctgattgttcccacgcctgctgagttgtttgactacacctccgcactgcagtttttcgatatgcttcgtgatctgctcaagaacgttgatcttaaagggttcgagcctgatgtacgtattttgcttaccaaatacagcaatagtaatggctctcagtccccgtggatggaggagcaaattcgggatgcctggggaagcatggttctaaaaaatgttgtacgtgaaacggatgaagttgggatttggctctgtgactcaagcttgtatgcaccggggtgtgacaatctaaaaacttgtcacacttcacatggatctgtcatggcggaaacagcggttatcaatcacaagaaacgtaaaaatagcccgcgaatcgtccagtcaaacgacctcactgaggcggcatatagtctctcccgggatcaaaaacgtatgctgtatctgttcgttgaccagatcagaaaatctgatggcaccctacaggaacatgacggtatctgcgagatccatgttgctaaatatgctgaaatattcggattgacctctgcggaagccagtaaggatatacggcaggcattgaagagtttcgcggggaaggaagtggttttttatcgccctgaagaggatgccggcgatgaaaaaggctatgaatcttttccttggtttatcaaacgtgcgcacagtccatccagagggctttacagtgtacatatcaacccatatctcattcccttctttatcgggttacagaaccggtttacgcagtttccgcttagtgaaacaaaagaaatcaccaatccgtatgccatgcgtttataccaattcctgtgtcagtatcggaagccggatggctcaggcatcgccaccatccctgacactcttgccataaggcttcctgtttaccactcagctcctgcaatttccatgtcctctatcttctctttactaaaacccatatccccaaccctctttacacatcattaccacctcatctcctactttgtcaaaaaaagtacagagtatgaacctcacaggaaaagcccctctgaaaacgatctgctggttagggaatga

SEQ ID NO: 13493 - DNA, 2884 bp, Homo sapiens
  SIMILAR (1291)..(3126): 981254mologous to Homo sapiens putative p150,accession number U93574,Smith-Waterman Score=3205.
  misc_feature (1)...(2884): n = a,t,c or g
tcagggtgctggcttttcaagttccttaagaatggcctcaattttctctatacactcagttggaacacgagacctgtccaggttaagcaccattttatcgcccttatacaatactgtcgctccaggagcaaactgatgtcgtgagcttaaactagttcttgatgcagatgacgttttaagcacagaagttaaaagagtgataacttcttcagcttcaaatatcaccccagcttttttctgctcatgaaggttagatgcctgctgcttaagtaattcctctttatctgtaaaggctttttgaagtgcatcacctgaccgggcagatagttcaccggggtgagaaaaaagagcaacaactgatttaggcatttggcggtgttgatacagcgggtaataatgtgaaatattttccgcatcagccagcgcagaaatatttccagcaaattcattctgcaatcggcttgcataacgctgaccacgttcataagcacttgttgggcgataatcgttacccaatctggataatgcagccatctgctcatcatccagctcgccaaccagaacacgataatcactttcggtaagtgcagcaacnccctttccagcaaattcattctgcaatcgtcttgcataacgctgaccacgttcataagcacttgttgggcgataatcgttacccaatctggataatgcagccatctgctcatcatccagctcgccaaccagaacacgataatcactttcggtaagtgcagcagctttacgacggcgactcccatcggcaatttctatgacaccagatactcttcgaccgaacgccggtgtctgttgaccagtcagtagaaaagaagggatgagatcatccagtgcgtcctcagtaagcagctcctggtcacgttcattacctgaccatacccgagaggtcttctcaacactatcaccccggagcacttcaagagtaaacttcacatcccgaccacatacaggcaaagtaatggcattaccgcgagccattactcctacgcgcgcaattaacgaatccaccatcggggcagcatgagggagccactgcatggcagaccggaaggtgagaaccaggcccaagaagagcagggtctggtccaatgggaagctagtgtccagtgtgagtgctgaaggggcatgtttctggtggtgtttcaaatgggcaaggctggaatcatagagcagcattcccatgtcccccgaaggctcagatagagcaccaggcagtgtaaagggctctgagttcatgggatatgcttcttctaacacccatgggcatgtgggcttctggtcctcagggctgcttattttcactttcgggcaacggacaaccttcaccaccttggagaccctcactgggtgggcagcaccttggaagcatctctccttcaggaaatcacacacgacattgacggctgatttgacatcagcaccaaaggtggtgtcgggaaggaggtaatcctctatgaacttgtccagcgtccaggctgggatgctcctgagtccgtgctccatgctaagtctggagcttcctgggtctcccagcctgatttgaggcagctggtaacgctctatgatccagtcgattttcaaaagagacgaaggcttaacccttccgggcatccgatactgacacagggatttgtaataagcgccatggcatacggatgggtgatttcttttgtttccctaagccgaaaactgcgttaaccgggttctgtaccccgataaagaagggaatgagatatggggggaatatgtccactgaaaagccctctggatggcctgtgcgcccgtttgataacccaaggaaaagattcatagcctttttcatcgccggcatcctcttcagggcgataaagaaccacttccttccccgcgaaactcttcaatgcctgccgtatatccttactggcttccgcagaggtcaatccgaatatttcagcatatttagcaacatggatctggcaggatgccggtcatgttcctgtagggtgccatcagatgttctgatttggtcagcgccgagatacagcatacgtttttgatcccgggagagagtatatgccgcctcagtgaggtcgtttgactggacgattcgcgggctatttttacgtttcttgttgattgataaccgctgtttccgccatgacagatccatgtgaaagtgtgacaagttttttagaatgtcacactaaataaaaaagagtcaataagcaggggataactttgtgaaaaaacagcttcttctgagggcaatttggtaccaggggtaaaggggaatttggtcacaagacaggactggtcatttggagggtgattttggcaccactggaagggggcaatttgtcacaacacctttctctaaaaacaacatggataaaggccttacaaggcgctctaaaacagaagatctaaaaactatagaaaccataattataaaaacatccccgcggataagcggataaccccaagggaaagttttttcaggcatcgtgtgtaagcagaatatataagtgctgttccctggtgcttcctcgctcactcgagggcttccgccttgcgctcgactgcgcgagcactactggctgtaaaggacagaccacatcatggttctgtgttcattaggatgttctgtccattgctgacataatccgctccacttcaacgtaacaccgcacgaagatttctattgttcctgaaggcatgttcaaatcgtttttgttaccggttggaggcatatgacagccattccttcttataaccgttcaaagctccgtgaaataaaaggcggtctctaccatatgggaattttccgacggttcttggcttctaaggaaacccccactttttgttacat

SEQ ID NO: 13494 - DNA, 7903 bp, Homo sapiens
  SIMILAR (1054)..(2640): 961254mologous to Homo sapiens putative p150,accession number U93564,Smith-Waterman Score=2730.
atgcaggaacaacagcaagcctccagcctgatcaggagcggcaatgggcgcctccctggatcaggagcacagcggacaccctgccatatccggagggatggaagtcagcggcgggtctgcgatgactgcaaacagcagtggtggaaggcaaaatacaacataccatctggcttgcatgcttgcactgcgactctagaagaaacccatattttagactcgggggcacatgtgcaagttttttacaagggtcaactgcatgtcatgagagttccatgtacagattattttgacacccagaagaaccccaacttgtcacacttacatggatctgtcatggcggaaacagcggttatcaatcacaagaaacgtaaaaatagcccgcgaatcgtccagtcaaacgacctcactgaggcggcatatagtctctcccgggatcaaaaacgtatgctgtatctgttcgttgaccagatcagaaaatctgatggcaccctacaggaacatgacggtatctgcgagatccatgttgctaaatatgctgaaatattcggattgacctctgcggaagccagtaaggatatacggcaggcattgaagagtttcgcggggaaggaagtggttttttatcgccctgaagaggatgccggcgatgaaaaaggctatgaatcttttccttggtttatcaaacgtgcgcacagtccatccagagggctttacagtgtacatatcaacccatatctcattcccttctttatcgggttacagaaccggtttacgcagtttcggcttagtgaaacaaaagaaatcaccaatccgtatgccatgcgtttatacgaatccctgtgtcagtatcgtaagcccgatggctcaagcatcgtctctctgaaaatcgactgggacatagaaccgtaccccgctggcctaaaagagcagattaagtctgatgttttcttgttaagttcctgtgtggaagttctccccaatgctgaaattgggttcttaaaatgtctagctattattggattatgggctgtttctctcttcagctacaataattgctttatatgtacaccggcgttcggtcgaagagtatctggtgtcatagaaattgccgatgggagtcgccgtcgtaaagctgctgcacttaccgaaagtgattatcgtgttctggttggcgagctggatgatgagcagatggctgcattatccagattgggtaacgattatcgcccaacaagtgcttatgaacgtggtcagcgttatgcaagccgattgcagaatgaatttgctggaaatatttctgcgctggctgatgcggaaaatatttcacgtaagattattacccgctgtatcaacaccgccaaattgcctaaatcagttgttgctcttttttctcaccccggtgaactatctgcccggtcaggtgatgcacttcaaaaagcctttacagataaagaggaattacttaagcagcaggcatctaaccttcatgagcagaaaaaagctggggccataaacacacaactggttgaaaccctgctctctgactctagaagaatccccgacttcatgtctaaaacaccaaaagcaatggtaacaaaagctaaaattgacaaatgggatctaattaaactaaagagcttctgcacagcaaaagaaactaccatcagagtgaacaggcaacctacagaatgggagaaaattttcgcaacctactcgtctgacaaagggctaatatccagaatctacaaagaactcaaacaaagttacaggaaaaaaacaaccctgtcaacaagtggtggccatgagaagtggagacgaaatctgaaactcaatgttgctctgctgatatggttttgctgtgaccccacccaaatttcatttttaattgtagctgccaaaattcccatgtcatgtgagggatctggtgggagaagaaaccccatgataaccaggcaaacaggatctggagtggacctccagcaaactccagcagacctgcagaagagggactttactggtagaaggaaaactaacaaacagaaaggaatagcaccaacatcaacaaaaattacgtccacatggaaacctcatccaaaggattgcaactcctcaccagcaagggaacaaaactggatggagaatgagtttgacaaattgacagaagtaggcttcagaaggtggacaataacaaactcctccaagctaaaggagcgtgttctaacccaatgcaaggaagcaacgaaccttgcaaaaaggttagagaaattgctaactagaataaccagtttagaaaagaacaaaaatgacctgatggagctgaaaaacacagcacaagaacttcgtgaagcatacaccagtatcagcggccgaatcaatcaagcagaacaaaggacatcagagattgaagatcaacttaatgaaataaagcgcagaggcgtctccgtgtgtccacaaccatcagaagacaccccgaggagtactgccagggtcccaaaggggatggtccccttccggccccgggtccccttggtcactccacccagagagaaaaaagaagctccttggcttgcatgccttcgcactagggctctaaggatcctcatagaccctccgagccaggtgtgggatatagtctcgtgtgatgcggagaatgaaaccaagttggaaaacactctgcaggatattatccaggagaacttccccaatctagcaaggcaggccaacgttcagattcaggaaatacagagaacgccacaaagatactcctcaagaagagcaactccaagacacataattgtcagattcaccaaagttgaaatgaaggaaaaaatgttaagggcagccagagagaaaggtcgggttaccctcaaagggaagcccatcagactaacagcggatctctcggcagaaaccctacaagccagaagagagtgggggccaatattcaacacccttaaagaaaagaattttcaacccagaatttcatatccagccaaaataagcttcataagtgaaggagaaataaaatactttacagacaagcaaatgctgagagattttgtcaccagcaggcctgccctagaagacctcctgaaggaagcgctaaacatggaaaggaacaaccggttggttaaatccctcgcttgggcaagccagaacggcttccggtccccggccttgttgccactgtccctaatgctttgtgctcccctacaagaggcagatggaacaaatctgggatggctggctcactgtggcctgctgtgcactggtgaccaccctagtggccttggcaaacctggccggcacggcgctgaccgtcaccatccagagggactggatcgtgagctgacgggtgacaacagaggccagctggttggaggagcgactcaagccttcgcgaaagaaaataaccaaaaagcatacaaagaaacgtacggcgtctctcatattacacgccatgatatgctgcagatccctaaacagcagcaaaacgaaaaataccaagtgcctcaattcgatcaatcaacgattaaaaatattgagtctgcaaaaggacttgatgtgtgggacagctggccgctgcaaaacgctgacggaacagtagctgaatacaacggctatcacgttgtgtttgctcttgcgggaagcccgaaagacgctgatgacacatcaatctacatgttttatcaaaaggtcggcgacaactcaatcgacagctggaaaaacgcgggccgtgtctttaaagacagcgataagttcgacgccaacgatccgatcctgaaagatcagacgcaagaatggtccggttctgcaacctttacatctgacggaaaaatccgtttattctacactgactattccggtaaacattacggcaaacaaagcctgacaacagcgcaggtaaatgtgtcaaaatctgatgacacactcaaaatcaacggagtggaagatcacaaaacgatttttgacggagacggaaaaacatatcagaacgttcagcagtttatcgatgaaggcaattatacatccggcgacaaccatacgctgagagaccctcactacgttgaagacaaaggccataaataccttgtattcgaagccaacacgggaacagaaaacggataccaaggcgaagaatctttatttaacaaagcgtactacggcggcggcacgaacttcttccgtaaagaaagccagaagcttcagcagagcgctaaaaaacgcgatgctgagttagcgaacggcgccctcggtatcatagagttaaataatgattacacattgaaaaaagtaatgaagccgctgatcacttcaaacacggtaactgatgaaatcgagcgcgcgaatgttttcaaaatgaacggcaaatggtacttgttcactgattcacgcggttcaaaaatgacgatcgatggatgccagcctacgtgttctgaggctttgcagaactttcaacggtataccggcatacagcatgtgcatcgcataggaatggcggaacgtatgtggtgtgaccggaacagagaacgtcacaccgtcagcagcagcggcggcacccgcctccccaatccaggtcctgcccgttctgaacattttgaggcatttcagtcagttgctcaatgtacctataaccagaccgttcagctggatattacggcctttttaaagaccgtaaagaaaaataagcacaagttttatccggcctttattcacattcttgcccgcctgatgaatgctcatccggagttccgtatggcaatgaaagacggtgagctggtgatatgggatagtgttcacccttgttacaccgttttccatgagcaaactgaaacgttttcatcgctctggagtgaataccacgacgatttccggcagtttctacacatatattcgcaagatgtggcgtgttacggtgaaaacctggcctatttccctaaagggtttattgagaatatgtttttcgtctcagccaatccctggtcttccttagagctagcagtgatcatgggaccaattctggccaataagtgtgacaatctaaaaacttgtcccccttccacatggatctgtcatggcggaaaccagcgggttatcaattcccaagaaacggtaaaaataggccctctaatcgtccagtcaaacgccgtcactgaggcggcatatagtctctcccagggatcaaaaacgtatgctgtattctgttcgttgaccagttcaaaaaatttgatggcaccctacaagaaccatgccggtatctgcgagatcccatgttgcttaaatatgttgaaatatttcggattgccctttgcggaagccagtaaggatatagcggccagccattgaagagtttcgcggggaaggaaagtggttttttatcgccctaaagaggatgccggcgataaaaaaggctatgaatcttttccttggtttatcaaacgtgcgcacagtccatccagagggctttacagtgtacatatcaacccatatctcattcctcttctttatcgggtttacagaaccggtttacgcagtttcggcttagtgaaacaaaagaaatcaccaatccgtatggccatggcgttaatacgaaatccctgttgtcagtatccgtaagcccgggatgggctcaaggcatcgtctcttctgaaaatcgactggatcatagagcgttaccagcctgcctcaaaattaccagcggtatgccttgacttccgccggccgcttcctggcagggctgtgtttattggagatcaacaggcagaacttccaatgccgccctttattaccttgaagaaaaagaaaggccgccagacgactcatatcgatctggctctgaaggggctacgtgttttgctcgtggaaggtaacgacccccagggaacagcctcaatgtatcacggatgggtaccagatcttcatattcatgcagaagacactctcctgcctttctatcttggggaaaaggacgatgtcacttatgcaataaagcccacttgctggccggggcttgacattattccttcctgtctggctctgcaccgtattgaaactgagttaatgggcaaatttgatgaaggtaaactgcccaccgatccacacctgatgctccgactggccattgaaactgttgctcatgactatgatgtcatagttattgacagcgcgcctaacctgggtatcggcacgattaatgtcgtatgtgctgctgatgtgctgattgttcccacgcctgctgagttgtttgactacacctccgcactgcagtttttcgatatgcttcgtgatctgctcaagaacgttgatcttaaagggttcgagcctgatgtacgtattttgcttaccaaatacagcaatagtaatggctctcagtccccgtggatggaggagcaaattcgggatgcctggggaagcatggttctaaaaaatgttgtacgtgaaacggatgaagttggtaaagctgccccgatggtggattcgttaattgcgcgcgtaggagtaatggctcgcggtaatgccattactttgcctgtatgtggtcgggatgtgaagtttactcttgaagtgctccggggtgatagtgttgagaagacctctcgggtatggtcaggtaatgaacgtgaccaggagctgcttactgaggacgcactggatgatctcatcccttcttttctactgactggtcaacagacaccggcgttcggtcgaagagtatctggtgtcatagaaattgccgatgggagtcgccgtcgtaaagctgctgcacttaccgaaagtgattatcgtgttctggttggcgagctggatgatgagcagatggctgcattatccagattgggtaacgattatcgcccaacaagtgcttatgaacgtggtcagcgttatgcaagccgattgcagaatgaatttgctggaaatatttctgcgctggctgatgcggaaaatatttcacgtaagattattacccgctgtatcaacaccgccaaattgcctaaatcagttgttggtcttttttctccaccccggtgaactatctgcccggtcaggtgatgcacttcaaaaagcctttacagataaaggaggatttacttaagcagcaggcatctaaccttcatggagcagaaaaaagctggggtgatatttgaagctgaagaagttatcactcttttaacttctgtgcttaaaacgtcatctgcatcaagaactagtttaagctcacgacatcagtttgctcctggagcgacagtattgtataagggcgataaaatggtgcttaacctggacaggaagagcaaatgctttcacctattttgcaactgtcattaccatcctgatttcatataccttcgtctgtagtaggggatcctctacagtagacctggattcatgcccccatgtcgtaggagtaagtttcgcggggaaggaaggggttttttatcgccctgaagaggaggccggcgatgaaaaaggctatgatccttttccttggtttatcaaacgtgtgcacagtccatccagagggctttacagtgtacatatcaacccatatctcattcccttctttatcgggttacagaaccggtttacgcagtttcggcttagtgaaacaaaagaaatcaccaatccgtatgccatgcgtttatacgaatccctgtgtcagtatcgtaagccggatggctcaggcatcgtctctctgaaaatcgactggatcatagagcgttaccagctgcctcaaagttaccagcgtatgcctgacttccgccgccgcttcctgcaggtctgtgttaatgagatcaacacaagaactccaatgcgcctctcatacattgagaaaaagaaaggccgccagacgactcatatcgtattttccttccgcgatatcacttccatgacgacaggatag

SEQ ID NO: 13495 - DNA, 2062 bp, Homo sapiens
  SIMILAR (4)..(369): 881254mologous to Homo sapiens putative p150,accession number U93563,Smith-Waterman Score=567.
  misc_feature (1)...(2062): n = a,t,c or g
atgggcaaagacttcatgactaaaacaccaaaagcaatggcaacaaaagccaaaattgacaaatgggatctaattaaactaaagagcttctgcacagcaaaagaaactaccatcagagtgaataggcaacttacagaatgggagaaaatttttgcagtctactcatctgacaaagggctaatatccagaatctacaaagaacacaaacaaatttacaagaaaaaaacaaacaaccccatcagcaactgggcgaaggatatgaacagacacttctcaaaagaagacatttatgcaggcaacagacacatgaaaaaatgctcatcaccactggccatcagagaaatgcaaatcaaaaccacaagccagtggatgtttggggttttgggggtgtcagtagagcacctttgcttgcctagcagcggtgaagcatttgctatggaaaagaagcaaagctgcaagttcagcagattgttactatttatcctcagaggtatgttttaccctagtttctacaaaaacactcttatgatgttcacaattggatcccagtatcacagttaccacccagatcaccaggacctgggtaggttacctgtgggttttactacttatgtagtagaagtgggaagactcccacaacagagacagtttgaaaaggcctgctttgccagcaacccgtttcccaaagaaggaaccggatttattcgcaacttcgtcaccctgcggcttgagggtaaaacatccccccaagtgatcttatttcattatggtgaaagttggaacctcttacgtgccgatcaacgtctcattttcgccaaaagttggcccaggggcttcccggtatcaacagggacaccaggatttatttattctgcgaagtgatcttccgtcacaggtatttattcgcgataagctcatggagcggcgtaaccgtcgcacaggaaggacagagaaagcgcggatttggggaagtggacggacagaacggtcaggaacctggatatgtcgaggcgggttgcccgcgcgctgctgctgacggtgtgacgtttttttgttcggctccccccaacatacggttccgcccattcctatgcgaatgcacatggctgttatgcccggtaataccgctgtatagttctgcaaagcctgatgggacataagtccatcagttcacacggaagtctacacgaaggtttttgcgctggatgtggctgcccggcaccgggtgcagtttgcgatgccggagtctgatgcggttgcgaatgctgaaacaattattcctaagaaataaatgccttggctctttatatggaaaatggggaactgaggggataatgctggttttggtctgtttaacaaagaaaacgggctgtgatacccattgagaagcgaacggaaccagtcggggaaaatctccccttattggggaagatccggattatttaatctaaggaccctggggtaccgtttataggaaagaatggttctgtcatgatgcctgcaagccggtaacgaaaacgatttgaatatgccttcaggaacaatagaaatcttcgtgcggtgttacgttgaagtggagcggattatgtcagcaatggacagaacaacctaatgaacacagaaccatgatgtggtctgtccttttacgcccagtaatgctcccccaaattcgagcgacagggcgaagccctcgagtgagcgaggaatcaccagggaacagcacttatatattctgcttacacacgatgcctgaaaaaacttgccttggggttatccacttatccacggggatatttttataattattttttttataggttttagaacctctagaggcgaccctgcagcatgccagcttgggactgggcgggcgtttaaaacggccggaacgggaaaaaaccggggggtcccaaattaaatggctttggaaaaanaagggncaagccatacaaagaggggaatatcttgaggtatcattgtttacggggcgaccgtaagtatcggctagtggcggtgaagaatcgggaaggatacttaaactctgctggttcttcggtgtgcc

SEQ ID NO: 13496 - DNA, 999 bp, Homo sapiens
  SIMILAR (340)..(2706): 941254mologous to Homo sapiens putative p150,accession number U93572,Smith-Waterman Score=3931.
gacgaccggtcaggacctggattggggagtgtggctgccgccgctgctgctgacggtgtgacgttctctgttccggtcacaccacatacgttccgccattcctatgcgatgcacatgctgtatgccggtataccgctgaaagttctgcaaagcctgatgggacataagtccatcagttcaacttatgtctacacgaaggtttttgcgctggatgtggctgcccggcaccgggtgcagggtccttataacagggaaacaggaggttcagagagaagacagaaacaggagttggaattacgtactttgaaaatagaaggaggggccataaaccaaagaaagtatgtggcctttagaagagagaaaaaccaacacggcgaacagcaaaacggataccaaggcgaagaatctttatttaacaaagcgtactacggcggcggcacgaacttcttccgtaaagaaagccagaagcttcagcagagcgctaaaaaacgcgatgctgagttagcgaacggcgccctcggtatcatagagttaaataatgattacacattgaaaaaagtaatgaagccgctgatcacttcaaacacggtaactgatgaaatcgagcgcgcgaatgttttcaaaatgaacggcaaatggtacttgttcactgattcacgcggttcaaaaatgacgatcgatggtattaactcaaacgatatttacatgcttggttatgtatcaaactctttaaccggcccttacaagccgctgaacaaaacagggcttgtgctgcaaatgggtcttgatccaaacgatgtgacattcacttactctcacttcgcagtgccgcaagccaaaggcaacaatgtggttatcacaagctacatgacaaacagaggcttcttcgaggataaaaaggcaacatttgcgccaagcttcttaatgaacatcaaaggcaataaaacatccgttgtcaaaaacagcttcctggaacaaggacagctgacagtcaactaa

SEQ ID NO: 13497 - DNA, 886 bp, Homo sapiens
  SIMILAR (67)..(2): 541254mologous to Homo sapiens Secreted protein encoded by gene 110 clone HTWAF58,accession number W88643,Smith-Waterman Score =61.
atgaactccattagtggtgagagagtattgaaaacacacccggtgatggctgtgaaccctttattgacaccaacagggcagcagacaatcccactgatcccctcaccatttgggcctccaactgtggacagtaagagcgtagagttcttcaatcagaagcgtcgccttaagcgcgagcagcaactgctggctgaagcgcgttccttaaaccaggccaacgatatcgccgctgattttggtagcaaaaagtttacgcctgcatttgctcaatgaagcgcagaatgagctggaactgtcagaaggcagcgacgataacgaaggtattaaagaacgtaccagcttccgtctggagcgtcgggtcgcccgaaaggggtcgtcaaatgggccgcggtaacggctatctggcaaccatcggcgcgatttctccgttcgttggtctgtttggtacggtctggggcatcatgaacagctttattggtatcgcgcaaacgcagaccactaacctggcagtcgttgcgccgggtatcgcagaagctctgttagcaacggcaatcggcctcgtggcagcgattcctgcggtcgttatctataacgtatttgcacgccagattggcggctttaaagcgatgctgggtgatgttgcagcgcaggtattgttgctgcaaagccgtgacctggatctggaagccagcgccgctgcgcatccgcccctctacaccagcgcccgctacacgtcagcccagcctatgcccaacgcactgaaaccgctgcgagccgcccgtatcacgacacccccaacttctcacgatgacttcacagccaacgctactctcctcgagacggccatgcaccacaccacacacagacagcgacacggcgacacaca

SEQ ID NO: 13498 - DNA, 913 bp, Homo sapiens
  SIMILAR (5)..(241): 981254mologous to Escherichia coli No definition line found,accession number U00039,Smith-Waterman Score=399.
ttacgagcgcctgctcgctgccgtgcgggtaaccttaagcggcaccgagggagcactggattccctgcgcgtgcgggaagtcacccgccgtcgcggtgtggggcaatatctgctggaagaggttttgcgtaacaatcctggcgtttcatgctggtggatggcggatgcaggcgtggaagatcgcggtgtgatgacggcgtttatgcaggcgctggggtttacggcacaacagggcggcttcatcaacgtctcgtaatcgcggttttgtccgctcggaagaagatggtggtgtctttcttgccttcggtaacgcattcaacgccgtaatcattgtttcatcggtgaccggatcgttacgataaacatcgagttgtctgccttcaccgacagataaaccggtttttccggcgcggctgcggcgtgcggatgcgcagcggcgctggcttccagatccagtcacggctttgcagcaacaatacctgcgctgcaacatcacccagcatcctttaaagccgccaatctggcgtgcaaatacgttatagataacgaccgcggaatcgctgccacgagggcgattgccgttgctaacagagctttggtgtgtctgaatgtagcgtcggttgggaggtgctgagttgggtgctgttgtggtgtggccgtggtgtggcgtgggttttggttgctcgggggcgtgggtgtgttgggtcgtggggtcgtttggccggcggttgccggtgtgttggccggttcggttttgagtacggcacgtgacattgttatgactactcactatgatcgagcgataacagagatctcccgataaccggtggtataacctctgagagatgcgtactcgtcgtgccatagctagagcttgtactactataaagacatagactgccgagtgctccat

SEQ ID NO: 13499 - DNA, 2361 bp, Homo sapiens
  SIMILAR (782)..(1171): 311254mologous to Chlamydomonas reinhardtii vegetative cell wall protein gp1,accession number AF309494,Smith-Waterman Score= 109.
atggcaccagcaatccatcaaatgaccctggccagtgcacggtcctggtggatagtggtggacgtcagatgcccagatggggtggctgcattccgtgccttcttgaagacggagttcagtgaggagaacctggaattctggttggcctgtgaggagttcaagaagaccaggtcaactgcaaaactggtctctaaggcccataggatctttgaggagtttgtggatgtgcaggctccacgggagattacaagcaccagggtgtcagggacgctgtctggtcctgctttgccattccacatggcaccaaacactgtgccaggcacaacaagatgtcagccctacatcagtctgcaggctgctcctgtctgctccaaatccctcccccaagtctgcagggctggtgcagcggcgtcaacccgaagagacctgaacgccgatgggcagttgggattctccgtacgcctcggaaacagcagcccaaacctcacaacgcagaaccacgagatagtggggattgcagagccctgcgcaagagaaggaaaattaagacgcagcggagcccaggaggtgcccgcacgcgggaaggactggcgtgcagacgaggcagggggaggtttgcactcggcgtggcgcggttcggatgcttccgatcctcggggagccggggcgctgcgccggagtcacttcagcccatgttgttcaggtgacacccggggaagagcagactccagtgtgcaaaacgtttcggggtttccgggccagcggttccgggcgcgcctcgcgggcggcggcgcagaactacaacccccaggctccctggcgtggcggcacgtgggcccgagccgggcggccgcggatataaagcgcggcggcggctgccgggcggagcggctgcacggacaagagcggaggcctgggcgtttcaaagtttgcaaaggcagcaaacttttacgtagtgtagttatctgtgcaaagaaattttccaagctgccattgcccccagatggcagacagtctaggagaggagccaaaaccaccctgcttaataactctgataaccttttactgctgaattcaaaagcctttgggaaattccatacagagaacactgaccaattccatgcagagaacactggcaaaggttctgatgatgatgctgatatttcttggacctcgctcacagacagctgcctccgaggggctggtggctctccagaattcagggagaggcagagttcagaggggatggcagaggggaagagggtggtggtggcaagaacaggagcaagaggaagcatcatggagaaatggggagaatgtgacgcttctgtctgtaaaggtccatttggagagtcaggacaaaacctcttggacagcttgggccagagcccagagcagctttggagtggagagaggcagcccgaggctgaacctggggtgtctcttggaataccaccctggactggcacctcctttctcttgaaagagaaaccaggaagaacaatgctcatggttacgttttcggggaggaatgctgaggtgtcagattgtggccagcagccactgagccagaaggatgaacctgaggtccttcctgatgacacaagggccttaactgacccctggaccactttcctggttcacctctctcccctgtccccactgccatgctacagttgtgagatgctgttagtaactagcaattgtttaaatgctcaagctgttgccaaagccatttactgtgcctggaaatactacatctcccatgatcagaaaattgagaaacagaaagctacagaaattgcccatagtcatactgctagtcctgcaaccacagacttacatctgagtcctagagagacagaactaaagcagaacccaaaaagaaacagaattgattcagcagttggagcagtagacaaccaacatctgcaactggaaggggaaatcccaaagatgttgtcaaatttggacggcaccatggtattttcagaggcattagaaacactccacaaggcagtggcagcaagacctccacctggcatcgcacttcctgaagcagccaggcagatgccagcagtggagcctcaagtggacatctctggcatgagaaccctgactaatacagataacattcaaggacagaaaaaggaaaaaggacagaaaaaagaagacacacaccagcatcttttctctggacactgtaagagcctcttgtccttacaatccattcttcatgggaccgccattgtgatctttcaaacatataaagatgatcaggttattgccctgcaaactctccaatgggctgatacctcaaatacgatcagcctcctcattgaagcttacaaggcacagtaa

SEQ ID NO: 13500 - DNA, 408 bp, Homo sapiens
  SIMILAR (183)..(359): 401254mologous to Homo sapiens Human secreted protein, SEQ ID NO: 4473,accession number G00392,Smith-Waterman Score=92.
  misc_feature (1)...(408): n = a,t,c or g
aagcccgggttagtaaacttgggtcctttaaaacggcccccccnnnnnnnnnnnnnnctcttcttcataagtttgtctagttttgatctttgaggctgttgatccttggatgaggatttgtggggacttttttgttgatgctattgttgnnnnnnnnnnnnnnnnnnnnnnnnnnnnnnnnnatagtcagctccctcttctctagggctgctgtggtttgctgggagttcacttcaggccctattcatcaggttcactcccgtgcctggagatgtcactcgaggagactggagaacagcaaagatggatgcctgctccttcctctgggatctctgacctcgaggggcaccaatgtgatgccagtagaaatgctcccatataaggtgtctgacaacctctgtggaggat

SEQ ID NO: 13501 - DNA, 1137 bp, Homo sapiens
  SIMILAR (370)..(1050): 951254mologous to Cloning vector pZC320 SopA,accession number U26464,Smith-Waterman Score=1121.
atggagatccatgaacaaaggactgaaggaggtgtgggcgcaactctacagagtgggaaccatttggaacaagagccctgcagagggttgctgtggattctggagctgtacctccaagctcttgggacacgatcccttcagagggtcctgggctttcagagccccccgaggggcctctggcgctcattccagccatctatcccttttggcttcaccatcctgattcaagcagtgttccttctctatcaggcctggtggctgttgcttggggctccccaagcacttagtacaggtgattgtagcagcctctttatgggtcagagccgcctacaggaccagaagcttcatgaagccagcaccccaacttccaacaccagcgtccgcaatgcccaacagagatcccagtgctgggattacgagctgaaaaaatcgatagacgtgtcagatgaccctgagatccccttatttctatcggggcctgagagtgatgtcaagcagcctgtttccaaaggtcctaacgacctggcacctactcgcaggccttccagcaaatcccaaaggcagaaccaaggcagcagcccacttccagaagttaaacaagccaccaggcaaaggtggaagcagggagaatactccaccctctttagcagcaggaggaagagggggaacactgagaacattggtgtgttcataatttttgttccattacaaggaataggtggctctcaagctgcaagggttcttccagtcaacaggacccgaggtgagaatgacagcattcttgatgggagcattgagattcttccatcacaagtacacactgtcacgttcagcctgcctcacgctgtgtttcctctcctgcgtggagcttccagagtgctcacatctgtgaatggaccagccttaatggctgaatacggtgacccagggaagagatgttggggtcatgtgttctcccctgttttgttttcagagcatcgttctggagagctgcatgtcgtcaaacagttgggggcttgtgacattttgctggcaggcagaactgagcatgtatggcttcttatgttagctacgttgtcttacagtaccatagaatccctcggcgtcaacccatcatacaccctacggcaaggatag

SEQ ID NO: 13502 - DNA, 909 bp, Homo sapiens
  SIMILAR (1023)..(376): 941254mologous to Escherichia coli topoisomerase IV subunit,accession number M58409,Smith-Waterman Score=1022.
aatacagggtggtggtgttgttattgtcgctttctgcttgtttgtttttccttcaataatcaggtccctcttctatagggctcctgcagtttgctgggggttcacttcaggccctattcatctgatttgttccaatgcctggagatgtcattcaaggaggctggagaacagcaaagatgggtgcctactccttcctctgggacctctgacctcgagaggcaccaacctgatgccaaactaccaggaggagaggctaagtctgctggtctgcagagacagtggccacccctcccccaaggggctcaggcccaggaagatccaaaatctgtccctgtgcttctggctggagttattggagatcctgcagggaagccctgcccactgaggaaggatgggtcagggttaaacctgaagaggcactctggctgcagactgccacagccagagctcaaacggcttagacagcaggcagccacagctgatgctggtcacccttcccctcaggagttccgtaggcttaaacagattccagctgagaggctggttcttccagtcagcaggacccgaggtgagaatgacagcattcttgatgggagcattgagattcttccatcacaagtacacactgtcacgttcagcctgcctcacgctgtgtttcctctcctgcgtggagcttccagagtgctcacatctgtgaatggaccagccttaatggctgtcagttctagaccttgcaagggggctacagggaagcatacacgtgttgaccgcatacaggactttacatctatccatggagaaatgtatatttcactgaataactgtccttggaattcagaagaggaagcaggcaggtgggaaggcagcttgaagcccatggaatctgatccagtcctttctagagagtaa

SEQ ID NO: 13503 - DNA, 453 bp, Homo sapiens
  SIMILAR (155)..(322): 461254mologous to Arabidopsis thaliana unknown protein,accession number AC006955,Smith-Waterman Score=131.
ttcgccgcccgaggtcgttcggctcgggtaccatcctccgcgccatggacaccagcgacctgttcgccagctgcaggaagggggatgtgggccgagtgcgaccatgaacccgtcctgacccaggctctgacctccttcctgcccaggtacctgctggagcagcgagacgtggaggtactatgcctgcttgtgtgggcacgaggagctggtactctaccttctggccaatggagcccgctgcgaggccaacaccttcgatggtgagcgctgcctctatggggcactgagtgaccccatccgccgggctctacgcgattacaagcaggtcacggcttcctgcaggaggcgggattactatgacgacttcttgcagcggcttctagagcagggcatccacagtgacgtggtctttgtagtacacgggaagccattccgggtgcatcgctgcgtcct

SEQ ID NO: 13504 - DNA, 1095 bp, Homo sapiens
  SIMILAR (619)..(840): 1001254mologous to Cloning vector pEH1 lac repressor,accession number AJ007659,Smith-Waterman Score=354.
atggaactacaggagttccaggagttcagccctcaagatctagagaaagtgatgcaggctcagtggcttctattttacctagatgtcacagtggcgctggctctcagctgcatagcagggcactgtgagagagctgagcacctgggagaggggtatctgcagcaggctgtggaggctacgagcagggaatgtgtgactgtgcatgttcaggagggagaaggctgctggggaggagccggagaggtgttccggcagcaccgggggccacagctcctggccctggtggaagaggtgctgccccgccatggcagtggccaccatggggcctggcacatctctctgagcaagcccagcgagaaggagcagcaccttctcatgacactggtgggcgagcagggggtggtgcccactcaagatgtcctttccatgctgggtgacatccgcaggagcctggaggagattggcatccagaactattccacaaccagcagctgccaggcgcgggccagccaggtgcgcagcgactacggcacgctcttcgtggtgctggtggtcattggggccatctgcatcatcatcattgcgcttggcctgctctacaactgctggcagcgccggctgcccaagctcaagcacgtgtcgcacggcgaggagctgcgcttcgtggagaacggctgccacgacaaccccacgctggacgtggccagcgacagccagtcggagatgcaggagaagcaccccagcctgaacggcggcggggccctcaacggcccggggagctggggggcgctcatggggggcaagcgggaccccgaggactcggacgtgttcgaggaggacacgcacctgtcgttcggctcgggtaccatcctccgcgccgtggacaccagcgacctgttcgccttctgctgggtgggggatgtgggccgagtgcggtgtggtcctcgcaacacaaggagaggagtgcgggaaagtggcccgcccccgaaaacgcctccgggcccgtgcgacgggcagaatggacgacccccgaagagcgcaggcgcctatgcctggccacagccactcccggccgcccccggcgtgggacagtaa

SEQ ID NO: 13505 - DNA, 510 bp, Homo sapiens
  SIMILAR (1)..(213): 541254mologous to Mus musculus Pro-Pol-dUTPase polyprotein,accession number Y12713,Smith-Waterman Score=162.
atgcctcagggttatatcaactccctagcccgatgtcagaatttagttaacagggatcttgatcacctttcccttccacaagatagcacactggtccattacattgatgatattgtgctgaatggatttagtgaggaagagaagggtcaggtggctcagtctgctgatctagatgagggattgctcaaaattcctggagatacttttgggcctgaagcagataaggacttcttgcacaaagatctcagcacagaaattgtaggtcagagctataacactcaccacatggcccaagattccattccttggaatccgtcaggccaagaaccccaggtcagagaacacgaggcttgccatcatcttggaagcggctcaccaccatcttgggagctctgtgagcaaggacccccggtaacagaatcattccaggtgcttgtcaccagtggattggataaagaaaatatggcctatatgcactgtggaataatatgcagcaataaaaaaggatga

SEQ ID NO: 13506 - DNA, 1557 bp, Homo sapiens
  SIMILAR (1182)..(1634): 991254mologous to unidentified cloning vector 29kD protein essential for the replication of mini F plasmid,accession number AB015619,Smith-Waterman Score=801.
ttacagtttcaattcaccttggaggtcccttcgtggtcgccaaagtgttaccgggggtccttgctcccagagctcccaagaaggtggtgggcgacttccaaaatggcggcaggccacttccaagatggtggcaagccccgtgttctctgacctggggttgttggcctcacggattccaaggaatggaatctgtcttaacttcacaatgaccgtattgcgttttatgaagacaaaactcgtgagcatatccacatcatagaatggcagcccattactactatcagtcaccttgttaactgtgtacacaaaaccccatgttgagttcagtgtgcttttaatttgataatacttctgaccatcaacagaacactgaaagcacccataaactgtctcccttttgaagttccccattccacagagtatgcaaggccctttgggaatgttgtgattaagtaagttaactcggatatgggtcccttctttgagtgaaatatcagtcatgctgagaggtttgtcatagtagtcagaaaaaagatcatccaagtaaagctgtgaacgagaaatgacatccatcactcttctatcaaaggcaccatccaggtatatgaagagttcaaaaacactgaaagctatggttgtatgtgctgggaaaacaatagctttgtcccttcccttgggattctgttcatccataaagtgaaaccgcattgcttcccctcgaattccagcatgcacagacagtgagcactgtcgtgtggttcggatgctctccatgaccacacacaatactgcctttctgctgctccttgactgacgtatcaagctgtggtcaaagttaattttttggtcatagattgtcttttccaccatgatgtgagtctcactgtccaggtctgacagcttggaattctcagggttaatcttcttggtattgatctcagggtcactggacaccaagcggctccaccactccatcttcttgatcttctccagatgcacagtcaccaccttgccgtcctcaatgagccacgagctctcctccgccttcacttcgttgtagagctccccatcgatgatcgctggctgccccttgagccccaccaccacgtccttccctttcagctggaagtccacacagaaagggaccgccaggtccagctccgacagggtcttggtccagcggtaatcaggcaggtctgccctgttgcctaggttgggcttcagttttcctttgtccttctcatcttcctcctcctcatcttcctcagtcttctgcttccctcgccttccatagagtgaaacatctgattcatcttcataattcagtaattgataagatgaaataccagctgaaatttctctgtctcctaggagaatatctttcagtgtaaaaggtgttgaagtaaatttatatctaggaaacagaaagcatcgcttcttttttaccaccagacttagaggttgatatttgtcagcttcactgaggcttggaacaggaactaatctccctccatctccaacttgcttgacaaagctcttggtagcagcagcaaacat

SEQ ID NO: 13507 - DNA, 963 bp, Homo sapiens
  SIMILAR (646)..(1296): 971254mologous to Cloning vector pZC320 SopB,accession number U26464,Smith-Waterman Score=1040.
atgcaaaaggaagtacttcagtcggaaaaaaagaatacagtgagcaataagaaaacacctgaaggtataaaactcattgtcaataatgaatggataaagaaaatatggtacatctatgcaatggagtaccattcagccataaaaaagaaagtgatcctgtcatttgcaacaacatggattgaactggaggacgctattctacgtgaaataaaacaggcactgaaagacaaacattgcatattccccctatctgtgggagctaaaaatcaaataattagagggcagaaggatagttaccagaggttgggaaggggcaggacctcccaaccagggtctctagccacttcctactgtgcatttgggccagcagcaggtgcacaacttcctggaatgaagctcccagagggagggtcaagatgtcatctttgctgtttcatagccttcactggagatacttccagagcgataacactcatcgcatggcccaagattccattccttggaatccgtgaggccaagaaccccagatcagagaacatgaggcttgccaccatcttggaagcagcccgccacctttttggaagcggcccgccaccatcttgggagctctgggagcaagaacccccggtaacagagggaattttcacttgcttccatcaagaaaagacagtcctacaagagataccactggataatgctgaaattgaatggtatacagattggtcttatttaaaaggagaagatggaaattttagagcagtatatgctgtggtgtccttactagaggtaattgaagccagttctcttccccaagccagatcagctcaagcggctgaattgattgccatgacccaagcttgtcaactggcaaaatacaaagttgcaaacttatacactaacagctgtcatgcttttagggtgcccatgactttgggattctatggaaggagagaggatacttaa

SEQ ID NO: 13508 - DNA, 1375 bp, Homo sapiens
  SIMILAR (1184)..(1264): 591254mologous to Homo sapiens Human secreted protein encoded by gene 67,accession number Y00323,Smith-Waterman Score=68.
atggacaggagggagccaggaactagcaagtgtgccggagagtgcagctgtatgtgtgggagtcataggggcctcagagcttgctgctaagagtggctgcaaccagagcagacagccaagacaaaggcagatagtagctataacactcactgcgtggcccaagattccattccttggaatccgtgaggccaagaaccccaggtcagagaacaggaagcttgccaccatcttggaggtggcccaccgccatcttggaggtggcccaccaccatctttggagctttgggagcaaggaccccaggggaattttatacttgatgatgatgatgatgtgaaatttagtgatatgatctccctgggcaccaggtttttcttctgtgaaatgagaggacatgacccaaaatttagatcctccagagctcaagcagtcaaaataactggaagaacacagatctatgatgatgaaagggacggatgctggatttcatttggggaggagcaacaggaacggttgagaagttggcctactggggtcttcatgaccacccaaatctacttctccccaccccttgggacaggatggctaaagtgggctgcagctgactatttctcttcctcccagtggagcgctccagaaacaggaagagcggtccctttctcacgtaatatctctctccgccctctattgatgaaaaataacataattctcgctgttaagaagaaacgtttagagtctaagtcattatgtcagagccagcaccagggagtaaatttggagctgagaggagataaattggtcctgttggtgagtgtgcttattcagatggagcctagacagtttgtgaacactgattctgctcttatggagcttcttggtactggcactgaatggaaacataaggaaataatgaattgtgacacagttattaagagcttaaccaaggtggctatgtccttccctcgctgtcccagcggtggtggccacaggggtgtttgtgccaccacatccccagctctaggcagtgcagcacagagagcaactgtttgtgagaaagtaagggaagagaatgagattctctgcctggtaatccagaggattcttccagatcttatcaagaccaccaaggtggtacctcaacaagtcttcaagagccacgacattacttggcttgtgtttcccggcaagaataatgaagtaattataaatgcagcaagagaaaagaaacaagtaacacacaattgggatccaatacatctggcagcagctggaaatcaatcaatgcgatacatcattatcaatggtactacctctgttgaagagactttcaccccaagtcacacctgcttcctggggcagcccaaatccaatgactga

SEQ ID NO: 13509 - DNA, 450 bp, Homo sapiens
  SIMILAR (19)..(102): 391254mologous to Homo sapiens Neuron-associated protein,accession number B01390,Smith-Waterman Score=50.
  misc_feature (1)...(450): n = a,t,c or g
gttctcaagcaagcaagttttcagnctgcctcatttataaatatatgtatatattttattaccattatatacatggcatatctatacagttacatttacacttgatttagagtcaaagtcatatctccacacacaggacttggactcaaagcttttaatgacaagcatgcaaaatttcttagtatagaccctaagagtacccttaatataagtatgtttatttaaaaattctatgtatctactactgttaccagggggtccttgctcccagagctcccaagatggtggcaggccacttccaaaatggtggcaagcctcatgttctctgacctggggttcttggcctcacagattccaaggaatggaatcttgggccatgcggtgagtgttatagctctattagaagccgtgggtcacggaagagaaccgtgggaacccagtgacacgaaa

SEQ ID NO: 13510 - DNA, 891 bp, Homo sapiens
  SIMILAR (436)..(615): 551254mologous to Mus famulus reverse transcriptase,accession number AJ233597,Smith-Waterman Score=140.
atgggctgtctggaccaatcggctcccagatcagacatcatcaatggaacaaagccaagagcaactctggaggaggcaagtgctctttcccagggagaagggtgttttatctataagcccttgacaggagctgctgcctttctttcagagatgacctgcccagagaggaagaatctagagaggcagtctggctacagcggctttgccgagctgcgtgtgtgtgactgtaaggaatgctggatagggtttgttggttttgctcctacagccctatgctcttctttcagcaggttttatattgggctgtgcagttcaacgtacaatccagtaggtaaaaacttacagaagggtcaggtggctcagtctgctgatctagatgagggattgctcaaaattcctggagatacttttgggcctgaagcagataaggacttcttgcacaaagatctcagcacagaaattgcaggtcaggtctttcagcataagggaaacacagttactttaaaattttggctaggttatatcaactccctagcccgatgtcagaatttagttaacagggatcttgatcacctttcccttccacaagatagcacactggtccattacattgatgatattgtgctgaatggatttagcgaggaagagagctataacactcaccacatggcccaagattccattccttggaatccgtcaggccaagaaccccaggtcagagaacacgaggcttgccatcatcttggaagcggctcaccaccatcttgggagctctgtgagcaaggacccccggtaacagaatcatcccaggtgcttgtcaccagtggattggataaagaaaatatggcctatatgcactgtggaataatatgcagcaataaaaaaggatga

SEQ ID NO: 13511 - DNA, 953 bp, Homo sapiens
  SIMILAR (733)..(1281): 981254mologous to Cloning vector pSacBII SacB,accession number U09128,Smith-Waterman Score=963.
ttagttgactgtcagctgtccttgctccaggatgctgtttttgacaacggatgttttattgcctttgatgttcattaagaagcttggcgcaaatgttgcctttttatcctcgaagaagcctctgtttgtcatgtagcttgtgataaccacattgttgcctttggcttgcggcactgcgaagtgagagtaagtgaatgtcacatcgtttggatcaagacccatttgcagcacaagccctgttttgttcagcggcttgtaagggccggttaaagagtttgatacataaccaagcatgtaaatatcgtttgagttaataccatcgatcgtcatttttgaaccgcgtgaatcagtgaacaagtaccatttgccgttcattttgaaaacattcgcgcgctcgatttcatcagttaccgtgtttgaagtgatcagcggcttcattacttttttcaatgtgtaatcattatttaactctatgataccgagggcgccgttcgctaactcagcattgcggtttttagcgctctgctgaagcttctggctttggaaagaagtcgtgccgccgccgtaatcagctttgttaataaaactgggcttgaagcgtgctttggactctagaagaaccccaggccctttcagaggacagggcgcatggcccaagattccattccttcgaatccgtgaggccaagaaccccaggtcagagaacacgaggcttgccaccatcttggaagtggcctgccgccattttggaagtggcccaccaccatcttgggagctctcggagcaaggacccctggtaacactggcagtacttatactttcattggttatacttatacttccccggttatatttatactttcctggcagtacgtatactttcatggtttatactattttaaaattattttttattaaatggagccaaattttttaaaaaaaaaaaaaaaaaa

SEQ ID NO: 13512 - DNA, 1454 bp, Homo sapiens
  SIMILAR (80)..(412): 961254mologous to Cloning vector pZC320 SopA,accession number U26464,Smith-Waterman Score=549.
atgggcttcgagttccaagtccgggtttgtgattcttgttacgactccatcaaagatgaagatcggacttctctagcgacctttcatgaaggaaaacataacatttcccacatgtccatggacattgccaggggactgatggtgacctgtgggaccgaccgcattgtaaagatctgggtcatcacacctgtggtgggctgcagtctgcagtctgggttttctccgcactgatctgagagctggacggcgtcctcacctaagaacagcagctccaccaaatgaagtccctctcacgcagctccacagcgttgtctcgtgaatggacagtatccacttacaaccaaatcaacatttttaaaaagaaaatgtaaaggtgtgttttggggcatttgtggaacttacccatggggagtaatatggaaaaggtctgtccatagtggttccctgaagactggaattacttcagcagaacttccccatgaacagttaatgtgtagtgaaagaatgagctagctaatgagttttagcggggacaaaaaatcaaacaaaaaagtggaatgcttaggaaccttttcaaagcagtcacaagtacagacacttcacttagcctagggggcctttcaggggttcttggggctgttgtcaaagcaggagctgggggagggaagacttgttctctctttcttgaggggtggcattaggaacttacgaaaccagagacctttccctatgacttggcagtatgtgaatatcctctacacttagttattgataaacttcttaaagagatctgttattttcaggtagtgccataatctgcacttagcattggcttgcttcagttgtttctcttcccagccagtatgccacaggtgaactttcgaggttgtcattaagtaagttgtgaaatttcctgaataactacagcattcatattgttgcatttatgccattttacttaggccaaactcttacatggcgcctgaaaccatgggaaatatcactgccgggctaattggacagtctttggcatcagtagtgcattctaggagaaactcaagcaaatactgtcataccaaccttatcaggcgtaatgccttgcgtagcgcaatactctttactcaacagggtatccaattcatgttcttgtatagatctgagcgttacctggcaatgagttgtcgcagttacattggttggataagtttgcaaccgcgttaaccaaggtttctcctggaggatctctatatcaactggctcattgtgcggtgactgacaccgtggtggcgtaattcttagcctctctgtatatacttaaataacagagctgctcgtgggaactatgaaccaccgaaggattcagcaatacattacgcccttagctgttcactcagatattatcgtatataatactcggtattgtaaatgtccgtcaagcggtaagggacaaatcc

SEQ ID NO: 13513 - DNA, 1321 bp, Homo sapiens
  SIMILAR (2)..(340): 441254mologous to Homo sapiens C protein,accession number M16342,Smith-Waterman Score=183.
ttcgagatctactgccagtgggtcaacaggttctaaattgaaatcagatgagttacagaccatcaagaaagaattaacccagatcaaaactaaaattgactccttgctagggcgcctggagaagattgagaaacagcagaaggcggaggcagaagctcagaagaagcaattggaagagagtctagtgctgatccaagaggaatgtgtgtcagagattgcagatcactctacagaggagcctgctgaaggagggccagatgccgatggagaagagatgacagatgggatagaggaggacttcgatgaagatgggggtcatgagctgtttctacagataaagtgatcttgaaattaacgcatgatgccacaaagcaggaaaagaggaaactgttgacaacccccaggaatgttgaaagggaggttttctttactgggacagcagcatcttttggtttcaatttatataaaaacccaaataaataaaatggacagtattgctcagttttagaaattccatttcttctatgttttaagctgtacaattgtcaggtttttatggtttaaattgtaaatgtgttttcccctttgctaattatgttttttttttcagtcttaaaatgtgaaagggcatttatggaatgggtaaggggaaacactatatacaaatgtatatttgttaaaaggctatttttatggattaggcatgtttcactgttgatcatatataaagtcaggtgatattgcaattctgtatttaaagcttatttccaacaatgtcatgtaagaaaagatgcatcttatgctagtttttataatttatttataatttatagtttaaagtacttcagatcataatgataaaatacttgaaaaagttatatttctgccctgtataagcaccctttttattaataaagaatgccagatatttccagatgtggatataatagttaaaagaactgttggtttgatctgtgattaagttgagcaatcgcccgctctactgaaactaaaatgatcccaattattacttcagtctgggtatgagattccattggacaagtaaggactagattgccaaggaaaagactgtccttgcccttggatcccaaaagtttaaattagtgcatacatccatgtcatttcacctcctgttcctaggaactctccattcccaagcattgccagtgttttccagataatcttagctgttgtcttgtgctgtggaaatggaagaaaccatcttcacagactgtaggagaattcaacatataatttcttaataaatactgtttcttttaaaacaaaaaaaaaaaaaaaa

SEQ ID NO: 13514 - DNA, 2424 bp, Homo sapiens
  SIMILAR (1)..(558): 991254mologous to Cloning vector pZC320 SopB,accession number U26464,Smith-Waterman Score=929.
atgcaccagaccctctgcctgaaccccgagagcctgaaaatgtctgcgtgcagtgactttgtggagcacatctggaaacccgggtcctgcaagaactgcttctgcctgcggagcgaccaccagctggtggccggccctccccagcccagagcgggcagcctgccccctccaccgcgcctgcctcccaggcctgagaactgccgcctggaagatgaaggtgtgaacagctcaccttactccaagcccacaattgccgtgaagcccaccatgatgagctccgaggcctctgatgtgtggacagaggccaacctgagtgccgaagtctcgcaggtcatctggagacgagcccctggcaagctccccctcccgaagcaggaggatgcccccgtcgtctacctgggcagcttccgaggtgtacagaagcctgctggtccctctacctcccctgatggcaattctcgctgtcccccagcttacaccatggtcggcctgcacaaccttgagccccgcggcgagaggaacattgccttccacccggtgagcttcccggaggagaaggctgtgcacaaagaaaaaccctcatttccttaccaagaccggccctccacccaggagagcttccgccagaaactggctgcctttgctgggaccacatctggctgtcaccagggccctgggcccctgcgggaatccctgccctcggaggatgacagtgatcaaaggtgctcgccctccggggacagcgagggtggagagtactgctccatcctggactgctgccctgggagccctgttgccaaggctgcctcccagactgcaggttcccggggcaggcatggtggcagggactgctcacccacgtgctgggagcaggggaagtgttccgggcccgcagagcaggagaagcggggcccgagcttccccaaggagtgctgtagccagggccccactgcccacccatcctgcctgggccccaagaaactgtccctcacctcggaggctgccatttcttccgacggcctctcttgtggcagcggcagcggcagcggcgccagtagccccttcgtcccccacctcgagagtgattactgctccctcatgaaggaacctgccccagagaagcagcaggaccctggctgcccaggggtgacccctagcagatgccttgggctgacgggggagccccagcccccggcccacccccgggaggctacacagcctgaacccatctatgctgagagcaccaagaggaagaaggcagctccggtgccttccaagtcacaggccaagatagaacatgcagctgctgcccagggccaaggccaggtatgcacaggtaatgcctgggcccagaaagcagcatctggctggggccgggacagcccagacccaactccccaggtgtcagccaccatcacagtcatggcggcccacccggaagaggaccatcggacgatctacctgagcagccctgactctgcagtgggggtgcagtggccacgagggcctgtgagccagaactccgaggtaggtgaagaggagacttcggctgggcaggggctgagctccagggaaagccatgctcacagtgccagcgagagcaagcccaaggagaggcccgccattccccccaagttgtccaagagtagccctgtagggtccccggtgtcacgttctgctggagggcccccagtgtcaccgctggctgaccttagtgatgggagctctggcggcagcagcattgggccccagcctccatcccaaggtcctgctgaccccgctccttcctgccggaccaacggtgtcgctatcagtgacccatccaggtgtccccagcctgccgcctcgtcagcctcggaacagaggcggcccaggttccaggcaggcacctggagttgtcagtgccggatagaggaagaagaggaggtggagcaggaattgctgagtcacagctggggaagagagaccaaaaatggccccacggaccattcaaactccacgacctggcaccgtctccaccccacagatggctcctctgggcagaacagcaaagttgggaccgggatgagcaaatccgcctcttttgcctttgagttccccaaggacagaagtgggattgagacattctcacctcctcctccgcctccaaagtcgcgatgcagttcagcatctctagctgcaactaatctgtacaactcagagatccctgaaaaccccaggaagggacgtgacggcaaagatcagagagagaaaaaagtcttcttctggcttttaagtttcaaagattgtcacatcctcacagccattggcggcccagcaatattggctgggaaacggaggggtaggaagaagtggggcagcacacaaaagagggggcgagaatcaaagattctcgcagaaggtgttggggacacgcagcagtag

SEQ ID NO: 13515 - DNA, 941 bp, Homo sapiens
  SIMILAR (1)..(831): 801254mologous to Cloning vector pZC320 SopB,accession number U26464,Smith-Waterman Score=1082.
atgactcagaaactgtccctcacctcggaggctgccatttcttccgacggcctctcttgtggcagcggcagcggcagcggcagcggcgccagtagccccttcgtcccccacctcgagagtgattactgctccctcatgaaggaacctgccccagagaagcagcaggaccctggctgcccaggggtgacccctagcagatgccttgggctgacgggggagccccagcccccggcccacccccgggaggctacacagcctgaacccatctatgctgagagcaccaagaggaagaaggcagctccggtgaccaactcccctactgaagtgaccaaggggctgccagccctcagtcaattcataagcatacaaaaagacacatcatttctgttggaaaggaatgcttattccttgggtgctacaaagaaggaatcaggcattcagacaaaaagttttctcaggcaagacaattttactttctggcaggaaaggggtgctgcccattcaggcaatcctggccacgagagcacaatgaacaaagaaaggcaggaatatttatcccttatgcattgggtccttactgctgtgtcctgtctccattggttggagctggacctcacagtctaagctaaacccaattggctaacaacttaaaaaactttcttaaataggtaaaggcaatgggagaacaaaggaaaagaggaagttgcttgccaaaagacttggagaagtaataacatttccaaataaggaaagggcataagctgtgagctgggacatgcttgagcacgtcgagaccaaatatcttggttaatgtacaaggacacagaaggtaccttaatttcccttatatctaacaactacataagatatggtttaaaaaagagttactaacacaaagcaaagaggcttaaaaaaagttaattaaaaatattatttctaac

SEQ ID NO: 13516 - DNA, 1317 bp, Homo sapiens
  SIMILAR (82)..(285): 661254mologous to Homo sapiens mariner transposase,accession number U52077,Smith-Waterman Score=237.
atggttcgtaaagcagtggagactactcgcaacatcgacactgcattccacccaggaactgctaacgaacgtacagggcagtggtggtccaagaaagaagttctgcaggctggttttctgaatcccagcaaaaccattacatctgagaaatatgctcagcaaatcgagatgcaccgaaaactgcaatgcccacggctggcactgatcaacaaaaagggcccaattcttatccacaacaatgctcaaatgcacgtcacacaaccaacgcttcaaaagttgacagaggccaggcacggaatgaagctgcagaccctgatggtgagtgttacagctcataaaggtagtagtgccgacccaaagagtgagcagcagcaagatttattagtaattttccacctgcagtctgttgaatccaaggatacgaaaccatggatacagacggatgactgtatttgtggatccttagacactcctggactgaaggtcaagaacatatgctctgcactacctaaaaaagaattctcaagcctaaatggggaaacaggctatcttctttcattccttgttttcttcagctctactgcacaacaagctactgccatcaaagacagctacagattcattcttggaaagaggcgtggcctcggggtcctggcggccgccatttcagagctgaggaacccgctctcaggaagagcgctcgtaatggagaagagccggcgtctggccggcccggaggggccagagacccagatgggagaagaaggcctgcttgccagtattgcaaggcccagctatcaccagacgtgccccaggacacagagcacagtgtccagccttgacacgtcctctccggagtcgcttctgatgccaaaacacggctctgccacttgccggttatgtatgtgaacagttctgaacttaagccgccatttccttacctgtaaactgggggttcgttttccgccatcagattagcaaaaagaatgaatgataatgtccagtttagtccaaggcatattgaaacccgttgcgtgccctagcagctctaccaggagtggataattagagtaaaacttggcattacctacagacgtttttaaagtatatatcctttttcccggcagtttcacttctagacattagttataaagaataagtacacatatacaaaagtcatttgtgaagatgtttaatgccatattgtttgcgtgctagagaaacactgggtggggggggaatgtagattaacaggaaactggttaagtgaacgctgctacattcaatccgggttactaacatccatccaagaatgag

SEQ ID NO: 13517 - DNA, 568 bp, Homo sapiens
  SIMILAR (136)..(378): 931254mologous to Cloning vector pCMVLacI lac repressor,accession number U64448,Smith-Waterman Score=347.
atgtgctcttgtgctcttcgcacagaagatttagagtcagatacttttttgtgttttgaaattgaactactaggtcatgctacggtgcaaagtatgctgatttgtaaattaacagggattttgccgatttcggaaccacccatcaaacaggattttcgcctgctggggcaaaccagcgtggaccgcttgctgcaactctctcagggccaggcggtgaagggcaatcagctgttgcccgtctcactggtgaaaagaaaaaccaccctggcgcccaatacgcaaaccgcctctccccgcgcgttggccgattcattaatgcagctggcacgacaggtttcccgactggaaagcgggcaacataaaggttctccacgtccccaccagactcaggagcccagctggcttcacccagtggatcccgcaccggggctgcaggtggagctgcctgccagtcccgcgcgtgcgcccgcactcctcagcccttgggtggtcaatgggactgggtgccctggagcagggggcagcgctcatcggggaggctcgggccgcagaggagcctacggagggg

SEQ ID NO: 13518 - DNA, 513 bp, Homo sapiens
  SIMILAR (116)..(193): 571254mologous to Homo sapiens precursor polypeptide (AA -19 to 55),accession number X17117,Smith-Waterman Score=56.
cagaggctttcacttgccgaacatcagtgatgctttttagaattatagactgttagagttcagggttctaaaagatcaccagtccaatctacagcatgaagtttgactctccaacctcttcttgcatgctactaatgatggagcgctcacttccaccacgattccccaccctccaatgaggcagcctaccagtttgtgatggttctgaaatttttcttcatactgaactgaaacttctggaacctcctcatgcttggccacaatcctgtcctccaaggctgtagatgacacgccagcagcttctacccatgacattcctgctaaaggcacacagtaaagctggaattgagtctcctggcctcaaccccaggcctgggttctccctgcatcctgtactgccggcagcctcctctgcagctttcttgctaccaagtttccgttgactcaggaagctgtcatccctcttccagagtgtagtccggataccccaccccagccctatgctccacgaaa

SEQ ID NO: 13519 - DNA, 372 bp, Homo sapiens
  SIMILAR (1)..(657): 991254mologous to synthetic construct chloramphenicol acetyltransferase,accession number A02739,Smith-Waterman Score= 1193.
atgaagccgcggaccctcgtggtgagtgttacagctcttaaggtggcgcgtctggagtttgttccttctgatgttcggagtttcttccttctggtgggttcgtggtctcgctggctcaggagtgaagctgcagaccttcgcgactcaggagcccagctggcttcacccagtggatcccgtgcctgggctgcaggtggagctgcctgccagtcccgcgccgtgcgcccgcactcctcagcccttgggtggtcgatgggactcggcgccgtggagcagggggcggcgctcatccggcgcccatggaatagatgtagccttattgccttaatcaagtactctacacaggattctgaattaaatgataaactctaa

SEQ ID NO: 13520 - DNA, 528 bp, Homo sapiens; identical to SEQ ID NO: 628
  SIMILAR (784)..(1743): 911254mologous to Cloning vector pZC320 SopB,accession number U26464,Smith-Waterman Score=1425.

SEQ ID NO: 13521 - DNA, 1323 bp, Homo sapiens
  SIMILAR (556)..(645): 701254mologous to Homo sapiens Human secreted protein HLYES38, SEQ ID NO:220,accession number Y86305,Smith-Waterman Score =98.
atgcctgatctcccttgggttaatgtagaggaagggattcaaagacttagggagattgtgatggtggagtggattagtcactttaggcctactcatcccagcttggagaatctagaagatatagccttgaccaatgtcttgcaaaatagatttgtgagggcagaacctgcatctttgaagagccctgtaattgctcttctctgtatgtcagatctaacggtgggaaccacagtcactcaactacaacatttaaatacaatgggagtaattggatcccaagatggcagggaccaagtggcagcactcaaccatcaaaagcaaggagacctgtggccttttcccagggtaactgtgctatggagaaagggaattgatcagacattttggggactactgaacactggctctgagctgacattgattccaggggacccaaaatgtcgttgcagtcctccagttaaagtagaggctcatggatgtcaggtaattaatggagttttagctcagatccaacttacagtgggtctggtgggtccgcgcccagtcccatccaccacccaagggctgaggagtgcgggcgcacggcaccgggactggcaggcagctccacctgcagccccggtgtgggatccactaggtgaagccagctgggctcctgagtctggtggggacgtggagagtctttatatctggctcagggattgtaaatacaccaatcagcaccctgtgtttagctcaaggtttgtgagtgcaccaatggacactctgtatctagctgctctggtggggacgtggaggacctttatgtctagctcagggattgtaaatacaccaatcggcactctgtatctagctcaagttttatacttccctgacacatcctgtgataagcctcgtagtagagactctagtctggtggtgatacttgaaaatgtagaagaagctttggagctggataagaggcagaggttagaacagtttggagggctcagaagaagacaggaaagtttggcacttcctagacagttgttgaatagttgtgaccagaatgctgatagtgatatggaaaatgaaggccaggctaatgaggtctcagatggaaatgagaaacttattgggaactggagcaaagtagtgtggggcattgctgaaaagatacctgaaaatgtggaagtgactttggaactgggtaacaggcagaggttggaacagtttggagggcttagaaaaagacaggaaaatgtgggaaagtttggaacagtggcatatggaagcaaatgtagacaagtgggctacagggttctcaagaagtcatataactga

SEQ ID NO: 13522 - DNA, 982 bp, Homo sapiens
  SIMILAR (228)..(422): 401254mologous to Canis familiaris dopamine receptor D4,accession number AB044885,Smith-Waterman Score=85.
atgggcccacccttgggagatgttctccctgcaactgtggaaacccagggaggtgtggagggagaggcgcgagcgggaaccggggctgcgcgcggcgcttgcgagccagctggagttccagatgggcgtggtcttggcggcccgcactcggagcagccggccctgccgttgccgagcaatgaggggcttagcacccgggccagcggctgcagagggtgtactgggtcccccagcagtgccagcccaccggcgctgcgctcgatttctcgccggggccttagccgccttcccgtggggcagggctcgggacctgcagcccgccgtgcctgagcctcccaccccctcggtgggctcctgtgcggcccgagcctccccgatgagcgccgccccctgctccatggcgcccagtcccatcgaccacccaagggctgaggagtacgggcacaaagcaccgggactggcaggcagctccacctgcagccccggtgcgggatccactgggtgaagccagctgggctcctgagtctggtggggacgtggagaacctttatgtctagctaagggattgtaaatacaccgatgggcactctgtatctagctcaaggtttgtaaacacaccaatcagcaccctgtgtctagctcagtgtttgtgaatgcaccaatccacactctgtatctggctactctggtggggacttggagaacctttgtgtccacactctgtatctagctaatctagtggggatgtggagaacctttgtgtctagctcagggatcgtaaacgcaccaatcagcaccctgtcaaaacagaccacttgactctctgtaaaatggaccaatcagcaggatgtgggtggggcgagacaagagaataaaagcaggctgcctgagccagcagtgacaacccccctcgggtcccctcccacgccgtggaagctttgttctttcgctctttgcaataaatcttgctactgcccaaaaa

SEQ ID NO: 13523 - DNA, 1886 bp, Homo sapiens
  SIMILAR (1005)..(490): 981254mologous to synthetic construct chloramphenicol acetyltransferase,accession number A02739,Smith-Waterman Score=939.
atgcctgaacaaaaagagctgcagaaagaaactttgtctaatcttcttttgctgatgcctcctggccatcctcatcccccgcctggacctggtcatctccctggtgggctccgtgagcagcagcgccctggccctcatcatcccaccgctcctggaggtcaccaccttctactcagagggcatgagccccctcaccatctttaaggacgccctgatcagcatcctgggcttcgtgggctttgtggtggggacctaccaggccctggacgagctgctcaagcagaagactctcaccccttttccaactccaccacttttgttcgactcaggagcccagctggcttcacccagtggatcccacaccggggtgcaggtggagctacctgccagtcctgcgccgtgggcccgcactcctcacccttgggtggtcgatgggactgggcgccgtggagcagggggcagcgctatcggggaggctctggccgcacaggagcccatgaagcggggactacacagtgagctgaactccttggacaacggacctcagtcaccctcagagagcgcagtagcattacttcagagaatgtccatcctgctggagaagctggacttcactgcagaagacttttgtgaactatggagagccacgatgtacggccttgaaacctgcccgaacacctggctgagggcccagcagtgtggggaaggggattccatatcccagcaacctacccttgatggcaaactggaagaccttcttgctgttctttggtacagccatcttcacatttgaaggcgtcggtatggaatgtcatgggtgaagctgctggcgtgtcatctacagccttggaggacaggattgtggccagcatgaggaggttccagaagtttcagttcagtatgaagaaaaatttcagaccatcacaaactgatagaaaagctgaggccagaggccagagccagtttgaccactcagctgttagctctggtcatggagggggcttctctggagagcaggaaggagggtcccttgctcaggaggcctggatgcagcgctggtgtccaaaagcaatgggccctgtccaggcacctccttgtttacatgctgcctcttctgctgccaagatgggttccaaagggaggcactgggttttgctgtcatttttgattgctggcaacttggggctgggggccttaacctcctatctgtatagtgggtgcgtcgcccaggtagtacccaaaggccctttccaactcagacaggctgtgccagtttacttgcccttcagagctttggctgtgccagggacaggcaggaacagtggtgcttatgcagcctgtgtttatactttcagtgatggggaaatcactacccatcttttcatatcttgccggggggagaagcaaggaggaatgattataagagggaagaacagcatgagtcagtcagatttgcccattaatactagggtgcagtgtatcctggagagaaaagttgcaaaaatactacaaagttctgttcgtttcctctattgttgataagacacccgtggcctggccgggggttcagactgcagacccagagcttgtgcttgtgcataactggggggcactgccagcgacaaggaggtggcaaaagaataataaattaaaaaattttttttaaatctgagggcatgacattggtacactattattaactaagctccatactttacataatgatcctcccattctgatcaactcttccctttcacctagcccaactgaggtaggagaatagagtctgcaggcagggaacctaaggccatttcacgctgacttcctagaactaaatcgaaaggaaaaccctaactttccacacctaagtaacaagaggaccagag

SEQ ID NO: 13524 - DNA, 411 bp, Homo sapiens
  SIMILAR (1)..(411): 1001254mologous to Oryctolagus cuniculus protein phosphatase 2A1 B gamma subunit,accession number U09354,Smith-Waterman Score= 731.
tacatgctcacccgggactaccttacagtcaaggtctgggacctgaacatggaggcaagacccatagagacctaccaggtccatgactaccttcggagcaagctctgttccctgtacgagaacgactgcattttcgacaagtttgaatgtgcctggaacgggagcgacagcgtcatcatgaccggggcctacaacaacttcttccgcatgttcgatcggaacaccaagcgggacgtgaccctggaggcctcgagggaaagcagcaagccccgggctgtgctcaagccacggcgcgtgtgcgtggggggcaagcgccggcgtgatgacatcagtgtggacagcttggacttcaccaagaagatcctgcacacggcctggcacccggctgagaacatcattgccattgccgct

SEQ ID NO: 13525 - DNA, 1557 bp, Homo sapiens
  SIMILAR (646)..(1296): 971254mologous to Cloning vector pZC320 SopB,accession number U26464,Smith-Waterman Score=1040.
atgcctgcccaggacaccatgaacagagataactactggcccaaggtcccagggccagttagtgccagagccacaagcagtgcccagtctgtctttgaagagcctgaggaccccagtaaccgctcattcttctcggaaatcatctcctccgtgtccgacgtgaagttcagccacagcggccgctacatgctcacccgggactaccttacagtcaaggtctgggacctgaacatggaggcaagacccatagagacctaccagctcagaggtcagccgtgtgcctggtcgtgggcccccgataagatgagcagggctgtattgggctgtgtcacggtggaggtcagccgtgtgcctggtcgtgggccccccgataagatgagcagggctgtattgggctgtgtcacggtcggggtccatgactaccttcggagcaagctctgttccctgtacgagaacgactgcattttcgacaagtttgaatgtgcctggaacgggagcgacagctggctctgctctgcccggctggaacctctgtccttgtttgcctcccgcaatgggtggggtgccctggggggctactatgactcaacctgttctgagcccttcactggggacctcagcgtcatcatgaccggggcctacaacaacttcttccgcatgttcgatcggaacaccaagcgggacgtgaccctggaggcctcgagggaaagcagcaagccccgggctgtgctcaagccacggcgcgtgtgcgtggggggcaagcgccggcgtgatgacatcagtgtggacagcttggacttcaccaagaagatcctgcacacggcctggcacccggctgagaacatcattgccatcgccgccaccaacaacctgtacatcttccaggacaagccaacattgaccaattgccagctctgggatcttgcagatgtgattaaggtcatggacctgaagatggaatttagcctggattatccatgtgggacccatctaatcacccaagtccgtgaaagtgtaggaccgttcctggttgtattggagacagctgtagcaacagaaaaaggctcagcaaggcatgacatgaagactcgaccagcgagccccaaggtcttaattactaaactgtatcctggaccttctggctacctggtggggcctcaggcctcggaaggtgacattctgcccaggccccctggcactggcacggacacagatgctcgagagtcaaagaagggatcaaaacaaagagaacgggagctggaccgtggccttgaagatgggaagcaagaaggcacatgggggagtggaaacagcttagagactgagagagcagagcccaagcccgcgagaaaggaagcaaagatgttgccggaaaggggtcccaatccagaccccaagagagggctcttggatctcgtggaagaaagaattcagggcaagtccatggagaaaagtgaaagcaagtttattaggaaagtaaaggaatacaagaatggctactccatggacagagcagcccgagggctgctggttgcccatttttatggttatttctga

SEQ ID NO: 13526 - DNA, 366 bp, Homo sapiens; identical to SEQ ID NO: 12412
  SIMILAR (37)..(243): 451254mologous to Homo sapiens similar to calmodulin; similar to P24044 (PID:g115520),accession number AC004882,Smith-Waterman Score=147.

SEQ ID NO: 13527 - DNA, 969 bp, Homo sapiens
  SIMILAR (655)..(1407): 1001254mologous to unidentified cloning vector 29kD protein essential for the replication of mini F plasmid,accession number AB015619,Smith-Waterman Score=1309.
atgatcccagcctccaacaaggccttcgtggtcaacaacctggtgtcagggactggctacgacttgtgtgtgctggccatgtgggatgacacagccacgacactcacggccaccaacatcgtgggctgcgcccagttcttcaccaaggctgactacccgcagtgccagtccatgcacagccagattctgggcggcaccatgatcctggtcatcgggggcatcatcgtggccacgctgctggtcttcatcgtcatcctcatggtgcgctacaaggtctgcaaccacgaggcccccagcaagatggcagcggccgtgagcaatgtgtactcgcagaccaacggcgcccagccaccgcctccaagcagcgcaccagccggggccccgccgcagggcccgccgaaggtggtggtgcgcaacgagctcctggacttcaccgccagcctggcccgcgccagtgactcctcttcctccagctccctgggcagtggggaggctgcggggctgggacgggccccctggaggatcccaccctccgccccgcgccccaagcccagccttgaccgcctgatgggggccttcgcctccctggacctcaagagtcagagaaaggaggagctgctggactccaggactccagccgggagaggggctgggacgtcggcccggggccaccactcggaccgagagccactgctggggccccctgcggcccgggccaggagcctgctccccttgccgttggagggcaaggccaaacgcagccactccttcgacatgggggactttgctgctgcggcggcgggaggggtcgtgccgggcggctacagtcctcctcggaaggtctcgaacatctggacgaagcgcagcctctctgtcaacggcatgctcttgccctttgaggagagtgacctggtgggggcccgggggacttttggcagctccgaatgggtgatggagagcacggtctag

SEQ ID NO: 13528 - DNA, 1824 bp, Homo sapiens
  SIMILAR (1070)..(1183): 891254mologous to Bos taurus beta adaptin,accession number M34177,Smith-Waterman Score=182.
tcaggaggcctattctacctgttgtcccctccctgattcatgaaatttgaaaaagtccaagactagtccacagtacagcacccgcagcttcctacccagcccaggctggccctgcagtgctcctactcgccttcccaggccggcccaccctacagggctcccaccacctggccaccgctgcagcactgccctggccctggcagcagccagccgccctcctacctctctggcactctgcagtctccatcgctgccaccacgccaaccacagcgaggcaagccgtggtgtccctggctccagcctccagcatgtgcaggtggctactccttctcctggcacggagcaactggatgggcaaagccagaaaagcctagaacaggatgcagagtaactgctccctgatgttggcagtgcagccacggaaagtgcccccaaccagcctcccgccatgggaagtgactcccgggatagcgcccccaagcagaccctagccttgggcagtgacgcccgggtaggtcgcccaaccgccacccaccccgttgccgagagtgcagcaccagatagcgaccctaacatgccccccatctacaccgtctatggcatggagcggattgaggttgctaccctgggctgcagtgcccgtggctgggggcaagttgcaggtgccagcaggtgcttcagtgtccgaggcaggggcaggttgggggcgctatcaggtgctggtgatggggggcagggtgttggggtattgcatggctcagagcagcacgcatggacattcagcatctgtaaggggaccatgcagcagaggctgacagtggagagtgcagtgcacataaagacacgccagtgtttggtgagagggacttgatccagatcagcaaaagcgaagtgactgatgtgcacagcggtgtgcaaatggcgactatgaaacaccattggccacaagtctacagaggtcttggcgctgacctggatgcttcctttgaagctggtaaagttgtccatttataactatgatattggctgctttttttttttttttttgacagagtcttgctctgtcgccccacagttcatcaacaagctgctgacagccctgattgagtgcaccgagtggggccagatcttcatcctggactgcctcaccaactatacgcccaaggacgaccgcgaggcccagaggtgagcgggctgccctttgcttgccagcccagcctgaggacccttgtcctcaggggctccaaccaggcactgggcatggcctggcctgggagctaacagaagcccagggattgcatcaatgaccgtgggcaaagatgtcaggtgtgcaggagtaggcctggtggcagctggaagctggctgacgggagggtttatagctggggtccacttcagtcgcctcatcagcagtttttcctcctccctcctccgcattcttcctggtgcgtcatcttccaaggtgacacatacattgtggctttggcaggactcctgcctgttgggactcaggaagttctcctctatccatctgtgggaagaccccaagtttgatactgaagatgttaaaccatctccaaagtaagtggaaactgaggtgttgcggattcgatgacctggaccctagggtcagtccccacccctttgctgagctcgctcagcagcagctcagtccctgcttgtcaaccaccgacctccatacactccagccccggtccacatcccccaaggctcctcgtgggattcctaagcagcaccagtgcactgactgtcactctactcatttattgaaagaacagtaggcaaaataattgtattatatct

SEQ ID NO: 13529 - DNA, 2272 bp, Homo sapiens
  SIMILAR (2590)..(3207): 991254mologous to unidentified cloning vector 29kD protein essential for the replication of mini F plasmid,accession number AB015619,Smith-Waterman Score=1076.
atgtgggaaagtttggaacttcctagagacttgttgaatggttttgaccaaaattctgctagtggtatggacaaagaagtgcaggccaaggtggtctcagatggagatgaggaacttgtcggaaactggagtgaaggatccttagggtgtcgcttcaccagccagaaacctctgtggcaagtgttgcctttgcccaagttttgctcaggcccactgggcttgttctgcccacttgacccagcaggctgtgcttggttttcactactggcccagatcccacggctgccaacggcaagccaggtgcagagcagcaaggggtgcatgagtgagcgagcgcggggtacagtgtgcacagccaggcatggtggctgtggcggggcaggcaggtccaggtgccagtatgggcgccggctccttgctgtggctggaacaggtgtaccacaagtggctcccactacaagcactgtggaacatggtggcacccagaaacttggagatgccggcaactgcagagccacaaagaggatgtcacagccctggcttggggagctcctaagtccaggctccctgaagggctgcagctcttctctcctctcttgtctcctcatcgtcacccacaacatggcgagcagcagggtgtatttgacacagtttgtgttacagcttgtttggtcctgccatttggcaggcagttcctcccgacaactgcagctctcagcagagaagagacccggagtgggtacctcctctctgcaggcaggtcattttgtcgagtgtgcagtcctcagtggagaggagacccaagtgggtagctcttacctgcaggcaggtcgtcctatcatctgccagagtctggctgagtttgcggtttttatgggcttcagaggggaggaaagcaagcaggtccggctgtgccttcccaactgcagccagcatctttgcagcagctgctccagatgggctgcagctgccatcactgggacttggtgccctgtgtcccagctgttccagtaccagttgtggctaaaaggggccaaggttaccattaagaatatcgaaagggagctcatttgcccagcatgcaaggagctgtttacccacccattgattctcccttgccaacatagtatctgtcataaatgtgtaaaagaactcctgctgactctcgatgattcattcaacgatgtgggatcagacaactccaatcaaagcagtcctcgacttcggctcccctcccctagtatggataaaattgaccgaattaacagaccagagcctctggccgttctccggaaggacccctgtgaggccaggcaaaaacgacttgatgggggcccacatgatgtggatcttggagaacgaggaatcaatggtctgtttcgaaacttcactttggaaactattgtggaaagatatcgtcaagcagctagggcagccacagccattatgtgtgacctttgtaaaccaccacctcaagaatccacaaaaagctgcatggactgtagtgcaagttactgcaatgaatgcttcaaaattcatcacccttggggtactataaaagctcaacatgagtatgttggtccaactactaacttcagacccaagtgtaatggagagagggctaaagaagaagcaattacacattttgaaaagctctttgaagttctggaagagaggaaatcatctgttttgaaagcaattgactcctctaagaaactaagattagacaaatttcagactcaaatggaagagtaccagggacttctagagaacaatggacttgtgggatatgctcaagaagtgctaaaggagacagatcagtcttgctttgtgcagacagcaaagcagctccacctcagaatacagaaagccacagaatctttgaagagctttagacctgcagctcagacttcttttgaagactatgttgttaatacctctaaacaaacagaacttcttggagaattatcctttttctctagtggcatagacgtgccagagatcaatgaggaacagagcaaagtttataacaatgccttgataaattggcaccatccagaaaaggataaagctgatagctatgttcttgaatatcggaaaatcaatagagatgatgaaatgtcatggaatgagatagaagtgtgtggaacaagtaaaataattcaagacttggaaaacagtagtacctatgctttcagagtaagagcttacaagggttcaatctgtagtccttgcagcagagaattgattcttcatactcctccagctccag

SEQ ID NO: 13530 - DNA, 1830 bp, Homo sapiens
  SIMILAR (715)..(1467): 991254mologous to unidentified cloning vector 29kD protein essential for the replication of mini F plasmid,accession number AB015619,Smith-Waterman Score=1305.
atgaagtcttcctcactcatggatatcctgactcactggcctggctgttcctggaacaagtcagatgaactcctcagagcttttgcacttacggtgcctcagcctaaactcttccctcagccctgtggatggctgactcctttgcttcaggaaatgtctgatggaaatggtgccatgagggttcatgttcccctctcattacaggaccttaagcaaataaggggagacttaggccaattttctgatgaccccgatagatatatagaaactttccaaaatttaactcaggcgtttgacctcacacagagggatgttatgttgctcctaggtcagacccttactgcagccgaaaagcaggcagttctgcaggcagcagaaaaatgtggcgatgagcagcatgtctcctatagcagaccaaagagagaaaaggggatgggaaagtaccttcaaagtgacaatggctccgtgtttaaggcagctgtcacacaaggggtctcaaaagcactagacatagaatatcatctacgttgtgcttggagaccccagtctgcaggaaagccacaactggtactggaacagctgggacacagggcaccaagtcccagtgatggcagctgcagcccatctggagcagctgctgcaaagatgctggctgcagttgggaaggcacagccggacctgcttgctctgcagagccagcgggacccaggaacaggcaggagcccttctcccttccgagttggtgcggagggagccccatgctcctgggtgcaattgcagccacccagctgtggactagggcattcctatgctctcgggggcccaggatgcctctcttcccccacatgctcagaagtgcctgctcctactgcttggcctctccccattcccagtgcccactctgactttggagaaaagctgtggccaagcccgggcactgacatgacctggccaggcccacccatggccacccatgggccaatcagcacacacttcctcccctctgaagcccataaaaaccgcaaactcagccagactctggcagatgataggacgacctgcctgcaggtaagagctacccacttgggtctcctctccactgaggactgcacactcgacaaaatgacctgcctgcagagaggagttgtccatgtagctcattcttcctggacacagtacaggaactctggacctgccaaatggcaggaccaaacaagctgtaacacaaactgtgtcaaatacaccctgctgctcgccatgttgtgggtgacgatgaggagacaagagaggagagaagagctgcagcccttcagggagcctggacttaggagctccccaagccagggctgtgacatcctctttgtggctctgcagttgccggcatctccaagtttctgggtgccaccatgttccacagtgcttgtagtgggagccacttgtggtacacctgttccagccacagcaaggagccggcgcccatactggcacctggacctgcctgccccgccacagccaccatgcctggctgtgcacactgtaccccgcgctcgctcactcatgcaccccttgctgctctgcacctggcttgccgttggcagccgtgggatctgggccagtagtgaaaaccaagcacagcctgctgggtcaagtgggcagaacaagcccagtgggcctgagcaaaacttgggcaaaggcaacacttgccacagaggtttctggctggtgaagcgacaccctaaggatcctgtgataccgaggctgcacacagcagcagggccctgggcccactccactaaaacatttttctctcctaggcctccaggcctgtga

SEQ ID NO: 13531 - DNA, 426 bp, Homo sapiens
  SIMILAR (26)..(424): 981254mologous to Homo sapiens Human sphingosine kinase C,accession number Y96059,Smith-Waterman Score=679.
  misc_feature (1)...(426): n = a,t,c or g
ccctctggtccacgtggtggaattcggtctgattgggaggacgcagaggagcgccggggtcgaccagaaccacccccgggctgtgctggtccccagtagcctccggattggaatcattcccgcagggtcaacggactgcgtgtgttactccaccgtgggcaccagcgacgcanaaacctcggcgctgcatatcgttgttggggactcgctggccatggatgtgtcctcagtccaccacaacagcacactccttcgctactccgtgtccctgctgggctacggcttctacggggacatcatcaaggacagtgagaagaaacggtggttgggtcttgccagatacgacttttcaggtttaaagaccttcctctcccaccactgctatgaagggacagtgtccttcctcccttgacaacacacggtggn

SEQ ID NO: 13532 - DNA, 2241 bp, Homo sapiens
  SIMILAR (1)..(987): 1001254mologous to Cloning vector pZC320 SopA,accession number U26464,Smith-Waterman Score=1721.
atgattcatggctggttcccgccctatagacaagacagtcacaaggagctggcaggcctggcggacgagcccggcggcggagatgggggcgacgggggcggcggagccgctgcaatccgtgctgtgggtgaagcagcagcgctgcgccgtgagcctggagcccgcgcgggctctgctgcgctggtggcggagcccggggcccggagccggcgcccccggcgcggcctcaccaaggcccagccctccttcccagactcacctagcactggttattttgcagtatgttccaagactgggcagcgtttacaccttctgtttagctggtttctctggcactgctccagcagggaacggcgctggtactgccaggggcctgcacccaccctgctgccccatagctcagacgtccccgaggccagagctggagataaacccagctcccagctgctgactctgcacgctggcctctccagccagcgggcctgctgctgtggatctctggtgtccccggttcactgcctgtttcttgtatcttgtccagagctatcagtcatagcgggacgggaggctgatgcaggtttcccgcgacctgacagcatggagtggggacggcgggtgttctgtgttgagatgccagctgaaggacgtggtgtttttacagatgcctgctctgtgcctgtatctgagatcatcgccgttgaggaaacagacgttcacgggaaacatcaaggcagtggaaaatggcagaaaatggaaaagccttacgcttttacagttcactgtgtaaagagagcacgacggcaccgctggaagtgggcgcaggtgactttctggtgtccagaggagcagctgtgtcacttgtggctgcagaccctgcgggagatgctggagaagctgattactgaacatgctaatcaggccaaggagactctgtatgagattaacatagacaaatacgacggcatcgtctgtgtcggcggagatggtatgttcagcgaggtgctgcacggtctgattgggaggacgcagaggagcgccggggtcgaccagaaccacccccgggctgtgctggtccccagtagcctccggattggaatcattcccgcagagcatgtgggccccggtgagaacgctggtggcttggacgggtcaacggactgcgtgtgttactccaccgtgggcaccagcgacgcagaaacctcggcgctgcatatcgttgttggctgctgccccgaggctcggaaaccacccgcatcccgccatactgcctgtggcagtgggcacgggcagctgtgcctgggctgccagctgtggaacgcatgcctctgtgaggcctcgaggcttcagtccaggatgcagagccccggggactcgctggccatggatgtgtcctcagtccaccacaacagcacactccttcgctactccgtgtccctgctgggctacggcttctacggggacatcatcaaggacagtgagaagaaacggtggttgggtcttgccagatacgacttttcaggtataaagaccttcctctcccaccactgctatgaagggacagtgtccttcctccctgcacaacacacggtgggatctccaaggaataggaagccctgccgggcaggatgctttgtttgcaggcaaagcaagcagcagctggaggaggagcagaagaaagcactgtatggtttggaagctgcggaggacgtggaggagtggcaagtcgtctgtgggaagtttctggccatcaatgccacaaacatgtcctgtgcttgtcgccggagccccaggggcctctccccggctgcccacttgggagacgggtcttctgacctcatcctcatccggaaatgctccaggttcaattttctgagatttctcatcaggcacaccaaccagcaggaccagtttgacttcacttttgttgaagtttatcgcgtcaagaaattcctgtttacgtcgaagcacatggaggatgaggacagcgacctcaaggagggggggaagaagcgctttgggcacatttgcagcagccacccctcctgctgctgcaccgtctccaacagctcctggaactgcgacggggaggtcctgcacagccctgccatcgaggtcagggcggtggtgatggcaagaggctgtcgaaaggtcccaggaacaccggccaccccaggcagccgtgcacagggactttcctctgtcaactcatttgacaagtttgggaagtgggattatttttaa

SEQ ID NO: 13533 - DNA, 411 bp, Homo sapiens
  SIMILAR (2)..(406): 871254mologous to Homo sapiens Human sphingosine kinase C,accession number Y96059,Smith-Waterman Score=626.
aggggcaacggactgcgtgtgttactataccgtgggcttcaacgacacaaaaacctcggcgctgcatatggtggttggggactcgctggccatggatgtgtcctcagtccaccacaacagcacactccttcgctactccgtgaccctgctgggctacggcttttacggggacatcatcaaggacagcgacaagaaacggaggttgggtcttgccagatacgactttttatgtataaagacctttttctcccaccactgatatgaagggacagtgacctttcttcctgcacaacacacggtgggatctccaagggataggaagccctgccgggccggatgctttgtttgcaggcaaagcaagcagcagctggaggaggagcaaaagacagcactgtatggtttggaactgcg

SEQ ID NO: 13534 - DNA, 2186 bp, Homo sapiens
  SIMILAR (235)..(1296): 941254mologous to Homo sapiens putative p150,accession number U93563,Smith-Waterman Score=1728.
ttactgaacatgctaatcaggccaaggagactctgtatgagattaacatagacaaatacgacggatgctacactgcccattcaaggatgccctgtcctcgaaaccacagccccgctgggaaggctgccccggtgcaaggtgtaggctacggggaagggcaaagagccttcccatgggagccgggcccaaagcagatgcctgccaagggccaggtgtgcaggctgcccctcctgaagctggaagcctcaggcctgctgcgctcagagggccgcacctgcaggagccctgaccggctgtgttcctcctgcagcatcgtctgtgtcggcggagatggtatgttcagcgaggtgctgcacggtctgattgggaggacgcagaggagcgccggggtcgaccagaaccacccccgggctgtgctggtccccagtagcctccggattggaatcattcccgcaggctttgcaaatgacctggcaggggacgaggtgtctgtcctctctggccctgtgtctggccccgagggtggcggcatggtgcacactttcactctcgtcacagctctgggatgtgagcaccgcagtcatccccattttatggatgaagacaggaggactggggagcatgtgggccccggtgagaacgctggtggcttggacgggtcaacggactgcgtgtgttactccaccgtgggcaccagcgacgcagaaacctcggcgctgcatatcgttgttggctgctgccccgaggctcggaaaccacccgcgtcccgccatactgcctgtggcagtgggcacgggcagctgtgcctgggctgccagctgtggaacgcatgcctctgtgaggcctcgaggcttcagtccaggatgcagagccccggggactcgctggccatggatgtgtcctcagtccaccacaacagcacactccttcgctactccgtgtccctgctgggctacggcttctacggggacatcatcaaggacagtgagaagaaacggtggttgggtcttgccagatacgacttttcaggtttaaagaccttcctctcccaccactgctatgaagggacagtgtccttcctccctgcacaacacacggtgggatctccaagggataggaagccctgccgggcaggatgctttgtttgcaggcaaagcaagcagcagctggaggaggagcagaagaaagcactgtatggtttggaagctgcggaggacgtggaggagtggcaagtcgtctgtgggaagtttctggccatcaatgccacaaacatgtcctgtgcttgtcgccggagccccaggggcctctccccggctgcccacttgggagacgggtcttctgacctcatcctcatccggaaatgctccaggttcaattttctgagatttctcatcaggcacaccaaccagcaggaccagtttgacttcacttttgttgaagtttatcgcgtcaagaaattccagtttacgtcgaagcacatggaggatgaggacagcgacctcaaggagggggggaagaagcgctttgggcacatttgcagcagccacccctcctgctgctgcaccgtctccaacagctcctggaactgcgacggggaggtcctgcacagccctgccatcgaggtcagaaaccttgcctcccgtcaacctaaagtgacatcagagtgttctcctaagaaagagtttattcaggaacagcaaggggattgcagtcaggatatgcgtgctacactggaaggcattttggggggtgttcgcgataaaggcaacactttaaaaggcaaagaagtccatgtaagctgctctagaacgaagttcacaggtcacagcagctcctggcaggaggcagtactgttcaccgcaggagtggccgtcactgggcgggcgccctcgtcgcagtcccgagggttctgggcccctctggtagccaggtacagccgagagatgccgctgagtaagcctccaatgcccacgtccaacaggactctgcttctcagccccacctcaccccacagccgtcactcaggccgcatcagtacccaaacgccccgccgccggcagccgtggggccccagggagtggcgggctggcagcggcactgagggcctggggttggtggcccagctggctcaggccgcctacaatgcgtgtggccctgccaaggaggcagacagccctgagccttag

SEQ ID NO: 13535 - DNA, 1570 bp, Homo sapiens
  SIMILAR (348)..(4): 1001254mologous to Plasmid F Protein D,accession number M12987,Smith-Waterman Score=584.
aatacatggctgggctcaagatggaggctctgcctccttcctccttcaggccattgtccctgtgttaagctgaggactccacagtgagagaactccacagtgagacgcctccagcctagcagcacttaccccttctcctgctctcctcacctcggtgtgtcataggcattacgccctagtcttcgatactctcatttctaattaggagataaagaaccgggccaagaatctgagcaaacggagagcagctccctgcgggggctcaggaaacacttgccagcgtccaccggttggagagctggcgcctgctcatctgagggcaggtcatgtggacggcagtgggaccaccgagggctggcacacagaagaatgcggacggtcctctagaagcagaaggaactgccctctgagggttagtctcaaattgccggcaccaagcagcatccccgcacagcacgtggtgtgtggacatgccacagcatccgcgggagaaaacacacctgacccaggtggacagatgctgtgggaacatcttgcaaagggcggaagaggctgctgccccgaggctcggaaaccacccgcgtcccgccatactgcctgtggcagtgggcacgggcagctgtgcctgggctgccagctgtggaacgcatgcctctgtgaggcctcgaggcttcagtccaggatgcagagccccggggactcgctggccatggatgtgtcctcagtccaccacaacagcacactccttcgctactccgtgtccctgctgggctacggcttctacggggacatcatcaaggacagtgagaagaaacggtggttgggtcttgccagatacgacttttcaggtttaaagaccttcctctcccaccactgctatgaagggacagtgtccttcctccctgcacaacacacggtgggatctccaagggataggaagccctgccgggcaggatgctttgtttgcaggcaaagcaagcagcagctggaggaggagcagaagaaagcactgtatggtttggaagctgcggaggacgtggaggagtggcaagtcgtctgtgggaagtttctggccatcaatgccacaaacatgtcctgtgcttgtcgccggagccccaggggcctctccccggctgcccacttgggagacgggtcttctgacctcatcctcatccggaaatgctccaggttcaattttctgagatttctcatcaggcacaccaaccagcaggaccagtttgacttcacttttgttgaagtttatcgcgtcaagaaattccagtttacgtcgaagcacatggaggatgaggacagcgacctcaaggagggggggaagaagcgctttgggcacatttgcagcagccacccctcctgctgctgcaccgtctccaacagctcctggaactgcgacggggaggtcctgcacagccctgccatcgaggtcagggcggtggtgatggcaagaggctgtcgaaaggtcccaggaacaccggccaccccaggcagccgtgcacagggactttcctctgtcaactcatttgacaagtttgggaagtgggattatttttaa

SEQ ID NO: 13536 - DNA, 706 bp, Homo sapiens
  SIMILAR (1351)..(1779): 631254mologous to Homo sapiens neutral protease large subunit,accession number M27826,Smith-Waterman Score=408.
  misc_feature (1)...(706): n = a,t,c or g
cggcccacaagcacagactgtttttgccaaccctggcctctggagatgaccgtcctatcttggagatgatgaagcccctcntacagccntagaaaaatgacagatctccgtagcctgtttgggatgttgcntttaagtgacggagtcccacagatcgaatttgaacatgggactacatccggccaaacgagtagtatatgtagatggnaaagaaaaagatgcctatggaccgtatggtgcaatggtaaaaattggagaccagccggtggagtttgtagatgatggggactgaaactcacttcagtatcgggaaccatgactgttacataaaggctgtcagtagtgggaagcggaaagaagggattattcatactctcattgtggataatagagaaatcccagagattgcaagttaatgaattttcatcttaagaagtaaagatcaggactttttaattactgtggtaattaaatgtgttcagtatgtacttatcagtacatttagtctgcaatgttttaattttttaaaaagttacatgaaactaacattccaagggtcaggaaaaaaaccaattatgtatagtcataaaaattacaatttatgatgcaaataatgtaaaatgttttaaagacaaatggcaaataagatatggaccaaagtcactaatgttttacaacagtaacctttactataataaatactttt

SEQ ID NO: 13537 - DNA, 1095 bp, Homo sapiens
  SIMILAR (1)..(165): 831254mologous to Homo sapiens Human secreted protein, SEQ ID NO: 7348,accession number G03267,Smith-Waterman Score=227.
tcaatcgtaagcctttcggttctgccaccaggaaacttccatagaaggtgagattcccaggtcgagggatgattccacgaacacccagagagccagtgccaggacttcagggtcagacttcgtaaagcccaggcgtcgtcttctctcccggactcctgtccagggcttcaggggccgggcccgcaatccccatcggatcgtacctcgtccgcttccagctccgctcggctgcctaagagcgccatattcctcctctggctgctggggtccgtggaagcatccacctggtctttggtccggtgccagtccttttccctcgccaggtggccaccgcatctcgcagatggtgtggcctgagggcagccttgggtcacggtcactggtccccgagaggcctctgacacaccacccacctggactgtaggtggaaggactctgcttgcttttttggcaggtttgtaaagcgtccttcatggcagaaatgccgttctggatgtcctgttgctcgaaggtcaggacagcctgcaacaccacaatggtactgtagcccaaggcatggtacatactctccttagccttccgttttctgcacgtcactttcctttctctgtccataaatcttcttccaccacatggctgcactgcagtctccgagcctgctctggctccagagatcgactgattcacgaatctttcattgctcaattgaactcctttaaatttaattctgctgaagtttttatcatatgtcatgctaaggtatttgcatgttactttaaaggcaatgagaagctgtgcacagattttaagaggcaaggcgaaaatggacttgcattttagaaagagcagtctattgtcagctgctagcagtgaaacccgcagatgcacaccatgatctccacaatctgacatgaaagtctctgaacggcccttcttacctgtagtcccccaggttctgaagccttcatcctcagactgagttataccatcagcttccatggttttgaggcctctgtgcttggactgagccacgctaccagcctctgcagctctccagcttgcagacagcatatggtagggcttctcacgctccat

SEQ ID NO: 13538 - DNA, 768 bp, Homo sapiens
  SIMILAR (650)..(576): 521254mologous to Homo sapiens Amino acid sequence of salivary protein CON-2,accession number W50193,Smith-Waterman Score =69.
atggaggacagggctgagggtgaggaggaggaacgcggaggaggagggaggaatgtggaggaggagggaggaacggagttctatagaagccgaacagctttggggaattacagtacctggccgttattttttggcaagggtgagtttgtagatgatgggactgaaactcacttcagtatcgggaaccatgactgttacataaaggctgtcagtagtgggaagcggaaagaagggattattcatactctcattgtggataatagagaaatcccagagattgcaaaagcaagcagagtccttccacctacagtccaggtgggtggtgtgtcagaggcctctcggggaccagtgaccgtgacccaaggctgccctcaggccacaccatctgcgagatgcggtggccacctggcgagggaaaaggactggcaccggaccaaagaccaggtggatgcttccacggaccccagatacaggaaaaaatacacagttgtagaatctttctcaagtcttctttctagaggatccctggagcaactgagtgaaggggcggagctgcccaagaccatgggaacctacttcttgcatcagcgtaacctggacgtgagacatggaagcaaaggagatcattttggagctttaagatttgactgcctcgctgaatctcatgctagcatgcggcaagcggcgcccttcgttttggccaatttctctgatttgaaatgggtgtatttacccaatgcctgtacccccattgtatctaggaagtaa

SEQ ID NO: 13539 - DNA, 825 bp, Homo sapiens
  SIMILAR (1)..(117): 1001254mologous to Homo sapiens protein kinase C alpha (AA 1- 672),accession number X52479,Smith-Waterman Score=210.
gtgcgggagtccacaagatcgaatttgaacatgggactacatcaggcaaacgagtagtatatgtagatggaaaggaagagataagaaaagagtggatgttcaaattagtgggcaaagaaacatttctatgttggagctgcaaagacaaaagcgaccataaatatagacgctatcagtggttttgcttatgaatatactctggaaattaatgggaaaagtctcaagaagtatatggaggacagatcaaaaaccaccaatacttgggtattacacatggatggtgagaactttagaattgttttggaaaaagatgctatggacgtatggtgccattggtaaaaaaatccggagaccagcgggtgagtttgtagatgatgggactgaaactccactccagtatccgggacccatgacctgttacataaaggctgtccagtagtggggaagcggaaggaagggattattcatactctcattgtggataatagagaaatcccagagattgcaagttaatgaattttccatccttaagaagtaaagatcaggactttttaattactgtgggtaattaaatgtgttcagtatgtacttatcagtacatttagtctgcaatgttttaattttttaaaaagttacatgaaactaacgattccaagggtcaggaaaaaaaccaattatgcatagtcataaaaattacaattcatgatgcaaataatgtccaatcgttctaaagacaaatgcccaacaacatatgcgaccaaagcccctcatcttttccaacagtaacctttactataataaatacttttaaaaaaaaaaaaaaaa

SEQ ID NO: 13540 - DNA, 1969 bp, Homo sapiens
  SIMILAR (1489)..(791): 971254mologous to Cloning vector pBACe3.6 levansucrase,accession number U80929,Smith-Waterman Score=1198.
ctttgtcccatgtggtatgacaatttgcccccaggtccccaatttctccagccactcgaatgtcttgttgtaagggtccttccaccttctgccataataccattgccctaatacctcccctgtgtttgcctggggatctatagagtcgacatgcaggcatgcaagctcctaaatttccaaagcaagatgtcacattgatccagccgtcactggaagctgggccttgtggaggcagagagagctgtcttgcaggaagggagacctggtctcgacatgcatgcacacccctctctggcaagaggcagcctgcgcttgtcacagcttgaaggcgggatctatagagtcgaaaagcaggcatgtcaagccctaagttgcaaatgtggcttttaatctcggagaagctctgtttgtcagtagcttgtataaccaccattgttgctttggcatcgatcgtcatttttgaaccgcgtgaatcagtgaacaagtaccatttgccgttcattttgaaaacattcgcgcgctcgatttcatcagttaccgtgtttgaagtgatcagcggcttcattacttttttcaatgtgtaatcattatttaactctatgataccgagggcgccgttcgctaactcagcatcgcgttttttagcgctctgctgaagcttctggctttctttacggaagaagttcgtgccgccgccgtagtacgctttgttaaataaagattcttcgccttggtatccgttttctgttcccgtgttggcttcgaatacaaggtatttaatggcctttgtcacattgtcgcctttggcttgcggccctgcgaagtgagagtaagtgaatgtcacatcgtttggatcaagacccatctgcagcacaagctctgttttgttcagcggcttgtaagggccggttaaagagtttgatacataaccgagcatgtaaatatcgtttgagttaataccatcgatcgtcatttttgaaccgcgtgaatcagtgaacaagtaccatttgccgttcattttgaaaacattcgcgcgctcgatttcatcagttaccgtgtttgaagtgatcagcggcttcattacttttttcaatgtgtaatcattatttaactctatgataccgagggcgccgttcgctaactcagcatcgcgttttttagcgctctgctgaagcttctggctttctttacggaagaagttcgtgccgccgccgtagtacgctttgttaaataaagattcttcgccttggtatccgttttctgttcccgtgttggcttcgaatacaaggtatttatggcctttgtcttcaacgtagtgaggggctctcagcgtatggttgtcgccggatgtataattgccttcatcgataaactgctgaacgttctgatatgtttttccgtctccgtcaaaaatcgttttgtgatcttccactccgttgattttgagtgtgtcatcagattttgacacatttacctgcgctgaagtcaggggattggtgatctcttgtgtttcactaagccgaaactgcgtaaacgggttctgtaacccgataaagaagggaatgagatatgggttgatatgtacactgtaaagccctctggatggactgtgcgcacgtttgataaaccaaggaaaagattcatagcctttttcatcgccggcatcctcttcagggcgataaaaaaccacttccttccccgcgaaactcttcaatgcctgccgtatatccttactggcttccgcagaggtcaatccgaatatttcagcatatttagcaacatggatctcgcagataccgtcatgttcctgtagggtgccatcagattttctgatctggtcaacgaacagatacagcatacgtttttgatcccgggagagactatatgccgcctcagtgaggtcgtttgactggacgattcgcgggctatttttacgtttcttgtgattgataaccgctgtttccgccat

SEQ ID NO: 13541 - DNA, 1122 bp, Homo sapiens
  SIMILAR (4)..(312): 921254mologous to Homo sapiens epithelial glycoprotein (EGP) precursor,accession number M32306,Smith-Waterman Score=458.
atgcagaatgatgtggacatagctgatgtggctcattattttgaaaaagatgttaaaggtgaatccttgtttcattcttctaagaaaatggacctgagagtaaatggagaacaactggatctggatcctggtcaaactttaatttattatgttgatagaaatgcacctgaattttcaatgcaggctctaaaagctggtgtttgtgctgttattgtggttgtgatgatagcagttgttgctggaattgttgtgctggttatttccagaaagaagagaatggcaaagtatgagaaggctgagataaaggagatggcacataccatgatcacagtaatgttctttggagatataatcatcaaagagcatcccttggttagtgtggtacatgagaagggcataaataatgaaacagaacaggggccattaatccgttctgttttgttttctgtgcttggaggttggtttaccagatttttaagcagttttttaaaaacagaatatcgaaagtttgacaggtcagtgctaattaagaatgcagaagaggggccagccacggtaataggccccttagaagggaaaaagaagcccccaacacccgttattgggcatacgatcttccactggggtctccttccctctccataccctcttttcttctccaaagaatccctcaacactaggcacgagacagatgctccagctcttctggaggctgtggccagaaaggaggatggaccatttgcctgcatacagaaattggaagttgtgtcaaaagctaaattctactgccagccacctgctggcctactgccaggtcttataaatccaacacttaggtgtgcgtggggcctagggatttctatttctagcaaacgtgatgctaatgcttcccttcttggaccacatgagagtggccatcagcacactccctgcagtctttccctctccttgctgagcattgtgtcagtgaagcgagctgccttcaaagctagtgacaagcgcagggctgcctcttgccagagaggggtgtgcatgcatgtcgcgaccaggtctcccttcctgcaagacagctctctctgcctccacaaggcccagcttccagtgacggctggatcaatgtga

SEQ ID NO: 13542 - DNA, 1606 bp, Homo sapiens
  SIMILAR (1)..(3567): 991254mologous to Homo sapiens integrin alpha-11 subunit precursor,accession number AF109681,Smith-Waterman Score=6231.
agcggccgccctttttttttttttttttcagtttaaaatggttttatttcatagctcataaaaaagtatgtatgtacaagaactcaagtaaatagaaaggcagctttcaatcacaaatcagtttttcagattttactgtggaagccatttttaaggcacaccatttgaatgttaccacattaaataattttaacggatggagtccaagttctggattttacatttaaatctgcatatattagaacaccttggggtcaaatttcaagattggtaaagccagtttcaagctgcttatattttgagtacagggtttcactattacaaatatatgatgttaaactaacaaactcatgaccttcaaagatgtcttccgtcccacgcacacacatttgtaaatttgtgtccctttgcctatttcccttcttcttataatcttcaaattatattaggttatgcattggagttccctattgcatctcacccatctcctttatctcagcctttctcatacgtttgccattctcttcttttctgggaaataaccagcacaacaatttccagcaacaactggttattaccacaaccacaataacagcaataacaccagctttttagaacctgctttgagaattcagggtgctttttcatcaacattataaacttaaagtttgaccagggatcagcagatccagatccagttgttccccatttactgtcaggtccattttcttagaaatgaaacagggattcaccttttaacatctttttcaaaaataataagccacatcagctatgtccacatcatttctgagtttttttgagaagaaattttgaaacagattcaatagtgataacattattctcataccaaaatactcgtgataaaaatttggatccagttgataacgcgttgtgatctccttctgaagtcaagtccgcaaaacttttactatcaataaggtttttctcttgactttgtgttttagttcaatgacgatccagtaggttctcactcgctcagagcaggttatttcagtgtacttgtctgttcttctgaccccagcagtgttcacacaccagcacatgaaggtgccgttgcactgctaggccttaaagagcccgctctcatcgcagtcaggatcataaagcccatcattgttctggagggccccttcaggttttgctcttctcccaagttttgagccattcatttctgccttcatcaccaaacatttggcagccagctttgagcaaatgacagtattttgtgcaccaactgaagtacactggcattgacgattattattcacaaagcagtttacggccagcttgtagttttcacagacacattcttcctgagctgcggcaaaagtcgccgtcgccgcggcaagcagaagcccgaacgcgaggacctgcgggggcgccatgcctgcgcgcgcgccgagaagaggggcgcgggaggggcccgggactcgcgggagggcgtgcgccgggagtgggacacgaggagccggccgggcagcgcgaggcctggggcacgcgggtccgcgtcgggaggacagcgacgagggggtccccggaccgcgtcgaaggtgctcgctcgccg

SEQ ID NO: 13543 - DNA, 942 bp, Homo sapiens
tcaccttagggccttctccacgtgcgatctgatggccgcggacattagggccttctcgacttgccatctgatggctgtggacgttagggccttctcgacttgtgatctgatggctgtggacattagggccttctcgatgtgcgatctgatggccgcggatgttagggccttctcagtgtgcgatctgatggctgtggacattagggccttctcgacttgcgatctgatggctgtggacattagggccttctcactgtgcgatctgatggctgcggacattagggccttctcgatgtgcaatctgatggccgcggacgttagggccttctcgacgtacgatctgatggctgcggacgttagggccttctcgatgtacgatctgatggccgcagacgttagggctttctcgctgtgcgatctgatggccgcggacattagggccttctcgctgtgcgatctgatggctgcagacattaggaccttcttgatgtgcgatctgatggccgcggacgttaggaacttcttgatgtgcgaaatgatggctgcagctgctctgggcaaggcatggaggccgccttgcaaggcgcagcagacgtgggcatcgctgaggatggaggaagtacttgcaaggcgcagcagacgtgggcatcgctgagggtggaggaagtacttgcaaggcgcagcagacatgggcatcgctgagggtggaggaagtgtctggagtagttgggccagctcttctctgatttccgtgccagtgcggtaactctgtgagtccacccagcggtcagccccaggctggcccccgctcacaggaggctcctgctcagagtctgttgctctgtggctttgtgtgaatgactttgaattccagatgaggctgatgcccagcagggattcagagcctgcttgttgatggattgactggctgttcccctccat

SEQ ID NO: 13544 - DNA, 822 bp, Homo sapiens
  SIMILAR (179)..(358): 981254mologous to Rattus norvegicus glycoprotein specific UDP -glucuronyltransferase,accession number D88035,Smith-Waterman Score =312.
tcatgtgggggaccgagctcgaattcggaacatgggcatagctgcctcctgcgcgaaatggttttcggtcacaattcccacaacaaaccagccggaagctgtagaggataacactcggcacgcgcggccgtcctcatctgtagtgccggcgccctgactctggaccccccccttgtagatgcgcagcaccaggagggtgtccgtgtggcccgtcgccttcgtgggtggcctgcggtacgaggccccacgggtgaacggggcagggaaggtggtcggctggaagacggtgtttgacccccaccggccatttgcaatagacatggctggatttgccgtcaacctgcggctcattcttagggccttctccacgtgcgatctgatggccgcggacattagggccttctcgacttgccatctgatggctgtggacgttagggccttctcgacttgtgatctgatggctgtggacattagggccttctcgatgtgcgatctgatggccgcggatgttacggccttctcagtgtgcgatctgatggctgtggacattagggccttctcgacttgcgaactgatggctgtggacattagggccttcatctcatcatatccatgtgtctcatcatctttatgcttctcacctccatgcacctcatctccgtatctctcatcatctctgtagagttccatctccatgtgtcttatcatctcttgtgtctcatctccatgtgtctcatctccgtgtgtttcatctgcatctgtctcatctccacgtgtcttatcatccccatggatctcatctctgtgtctcattatctccat

SEQ ID NO: 13545 - DNA, 7790 bp, Homo sapiens; identical to SEQ ID NO: 7229

SEQ ID NO: 13546 - DNA, 8962 bp, Homo sapiens; identical to SEQ ID NO: 7234
  SIMILAR (502)..(1002): 301254mologous to Haliotis rufescens lustrin A,accession number AF023459,Smith-Waterman Score=109.

SEQ ID NO: 13547 - DNA, 9026 bp, Homo sapiens; identical to SEQ ID NO: 7231
  SIMILAR (956)..(2008): 851254mologous to Homo sapiens putative helicase RUVBL,accession number AF218313,Smith-Waterman Score=1534.

SEQ ID NO: 13548 - DNA, 2460 bp, Homo sapiens
  SIMILAR (10)..(2349): 1001254mologous to Homo sapiens striatin,accession number AJ223814,Smith-Waterman Score=4048.
atgatgaaatttattcctgctgccttaaaaatatgtatcccttcttcacccatcatgactgtccccaggtacaggcatccttcacctgctattgttgcaagaacagtcagaattttacatacactactaactctggttaacaaacacagaaattgtgacaaatttgaagtgaatacacagagcgtggcctacttagcagctttacttacagtgtctgaagaagttcgaagtcgctgcagcctaaaacatagaaagtcacttcttcttactgatatttcaatggaaaatgttcctatggatacatatcccattcatcatggtgacccttcctataggacactaaaggagactcagccatggtcctctcccaaaggttctgaaggataccttgcagccacctatccaactgtcggccagaccagtccccgagccaggaaatccatgagcctggacatggggcaaccttctcaggccaacactaagaagttgcttggaacaaggaaaagttttgatcacttgatatcagacacaaaggctcctaaaaggcaagaaatggaatcagggatcacaacaccccccaaaatgaggagagtagcagaaactgattatgaaatggaaactcagaggatttcctcatcacaacagcacccacatttacgtaaagtttcagtgtctgaatcaaatgttctcttggatgaagaagtacttactgatccgaagatccaggcgctgcttcttactgttctagctacactggtaaaatataccacagatgagtttgatcaacgaattctttatgaatacttagcagaggccagtgttgtgtttcccaaagtctttcctgttgtgcataatttgttggactctaagatcaacaccctgttatcattgtgccaagatccaaatttgttaaatccaatccatggaattgtgcagagtgtggtgtaccatgaagaatccccaccacaataccaaacatcttacctgcaaagttttggttttaatggcttgtggcggtttgcaggaccgttttcaaagcaaacacaaattccagactatgctgagcttattgttaagtttcttgatgccttgattgacacgtacctgcctggaattgatgaagaaaccagtgaagaatccctcctgactcccacatctccttaccctcctgcactgcagagccagcttagtatcactgccaaccttaacctttctaattccatgacctcacttgcaacttcccagcattccccagaatgtgtccccgttgttaagcgacacatgactgcaatgaaattcagtcctggaaggaaaagaagaagtaactggctgttctctttttctccaggaatcgacaaggagaacgttgaactctcccctaccactggccactgtaacagtggacgaactcgccacggatccgcaagccaagtgcagaagcaaagaagcgctggcagtttcaaacccttatccatacctgtaagtgggctgcagtctgtacttttcacttctctgcaggagcacatgggagaggtggtcaaggtgggcaaggagcggggtggtcatgaaaggcttccgcatacccaacacaacgtaggtgctcaacaaaaacgtgacaaccccagaaagaatgcctgtgacgtgctttgctggccccagcagcacagcgcttcctccgggatgaatgcagtcacggaacgcgccaatgcaggaggcccccaggacatcctgagcgctcgggagacgccaggcgcggcagcgggcacgggtagcggaaaggggcgcgaccccgcggaatcctccggcagggcagggcctttgggtggctccgggtgtccagaggaaggggagccaagacttcggccccccccgggtatcctggccaagccggcccctgctttctgccccccggagcccgtgcccgagcgtcacgcgtcacgcctagggtggctttgcgcccaccttccttcctcggccatgcaggtccttctgagcggtctgcacatccacccttgtctgggggagagagctgccagaatccgggccataggctccccaccccacccggcgctgcggagaccaagatgcaagggtctgtgtacgtcctgctggaccgggccagggggtgaaagggaccggccagccaagcccttccgtttttccagtggctcccatctggggcaggctgagcagactcctggcatggggatagtcgcgctccttcctctcagaacacagactgcaggtcggataaagaagctaccagctctggctgaaacctggagtccccgaacccagagcctcagtagtgggaagggcctcccaacaacctctggcaggggccaccggcctcagccacgtgcccagcaagcctcacccacttctcccccagctggacagttcctgccattagaaccttctccctcatacactctagagacagacctgcttgtcacttag

SEQ ID NO: 13549 - DNA, 571 bp, Homo sapiens
  SIMILAR (42)..(569): 571254mologous to Homo sapiens unknown,accession number AF007170,Smith-Waterman Score=613.
aaattcagaagaacaaacttcagcaggaattcttctatgagtttgaagggggtgtcaagcttggcagtggggcctttaatttgatgctgtcccttttaccagcaaggattatcagactactagaatttattggattttctgggaatagggagttgggcctcctgcagttacgtgaaggtgcttcaggaaggagcatgaggtctgcactgtgctgcttaaccatcttagcttttcatacttacatctccctaatacttggtacaggagaagtgaatgttgcggaagcagagcgtctcctggcacccttcctccagcagtttccaaatggctcactcgtgttgttttatcatgcccgaatagagttgctgaaagggaatcttgaagaggcacaagaagtatttcaaaaatgcgtttcagttcaagaagaatggaaacagtttcaccatctctgctactgggagctaatgtggattaatgttttccaacaaaactggatgcaggcatattactattcagatctgctttgcaaagagagtaaatggtccaaggcaacttatgtgttcttgaaaac

SEQ ID NO: 13550 - DNA, 870 bp, Homo sapiens
  SIMILAR (1298)..(2083): 701254mologous to Mus musculus Pro-Pol-dUTPase polyprotein,accession number Y12713,Smith-Waterman Score=1016.
atgatcaacttcatcaaaggtggactcaaaattagaacaagttaccaaatatataaagaatgtctttctatcctgcatgaaattcagaagaacaaacttcagcaggaattcttctatgagtttgaagggggtgtcaagcttggcagtggggcctttaatttggagttgggcctcctgcagttacgtgaaggtgcttcaggaaggagcatgaggtctgcactgtgctgcttaaccatcttagcttttcatacttacatctccctaatacttggtacaggagaagtgaatgttgcggaagcagagcgtctcctggcacccttcctccagcagtttccaaatgtacgctcagtatttcaaagtggctcactcgtgttgttttatcatgcccgaatagagttgctgaaagggaatcttgaagaggcaacttatgtgttcttgaaagcagcaattttgagtatgcttccagaggaggatgtagtagcaacgaatgagaatgtggtaactttattcagcttaagcattctagggatctgtaccttcagatctggggcagaattagttgcaggtatttatatgtcctatatgtttggccacaaagtacttacacttctacagaataatgttccacaagcagagacaaaagggggaaagagggaagaaggaaaaagaaaggagaccagagaggctgatgattttcggaacacaagcaatgaagaagtttggcgcatttcaaaagacaaagctcccaagtatatgcttttgggtgttttattagtcatcttaggttcctatttttatcgtgaggtagatgaaaagggaatggatgaaggcgtcagaaaaaaaaaaaggatgtcaggtgaaacagggtaa

SEQ ID NO: 13551 - DNA, 2241 bp, Homo sapiens
  SIMILAR (431)..(535): 971254mologous to Homo sapiens Human BS274 protein epitope 3,accession number Y08477,Smith-Waterman Score=171.
atggggctctttggggagagcaggcagctcccaaatgggtttaaatggcttctgagaacagggaaagggtaccgagctcgaattcgtatattggaaagtctgattcagttacgatcagtgtatggaatcacaagaagatccataagaaacaaggtgctggatttctcggttgtgttcgtcttctttccaatgccatcaaccgcctcaaagacactggttgatttcttaccattttgtaaaattttatctgaaaactatggagcaaaagagtgtgattttctgaggcacagaacaaaaacttcacgtcttacgcggcagccatgtgaaagttttcccaagccatgggtctacaataatcgttgctgcagtgtgtgcagtggtggaggagctgagcgcttgcagggagtccgctgtgatatgctgccggaagctgtgggatggcagcctgtggtcctgcggctcctggctgagtcatggtcaacttatgctgtcactttttttcttcaacccagagaatgtctttctatcctgcatgaaattcagaagaacaaacttcagcaggaattcttctatgagtttgaagggggtgtcaagcttggcagtggggcctttaatttgaccaaagagagtctacagtatgcattacaaaccttgactatgaatggctgctcagttgaagatctaggactggatttcactctgccagggtttcccaatatcgaactgaagaaaggagggaaggatataccagtcactatccacaatttagaggagtatctaagagtatgtaactgtgtctttggggggttcgtggcctgttacaaccggaccacaaagcatgaagtgagcggtgggagaggctcactcgtgttgttttatcatgcccgaatagagttgctgaaagggaatcttgaagaggcaacttatgtgttcttgaaagcagcaattttgagtatgcttccagaggaggatgtagtagcaacgaatgagaatgtggtaactttattcagacaggtggacagcttgaagcagagaattgccgggaaatctatccctactgagaagtttgctgtgaggaaggctcggcgttactccgcctccttacctgcacctgtgaagctcatcttacctgccctggaaatgatgtatgtctggaatggtttttcaatagtgagcaaaagaaaagacctttctgaaaatctgttagtaactgttgaaaaagctgaggcagctttacaaagtcaaaattttaacagcttctctgtggatgatgagtgcttagtgaagttacttaaaggatgttgcctcaagaacttacagcggcccttgcaagctgaactatgttacaatcatgttgtggaaagtgaaaagctactgaagtatgaccactacctagtgccgttcactctatttgaattggcatctttgtataaaagccagggggaaattgacaaggccataaagttcctagaaactgcaagatgttcaggttgcctgaatacgtctgccctggtggattacttcaggcacccctgcccaagaacattcatggatgccacacctggaacctacttgaccaacacttctaatgattttcatgccaagttgtctggagtacagcagaaagcttggcaaagtggattgaagcacttgcctgagcctgctgctcctgcagctccaaaaccaaatgggagattttcagtggggcagacccctctcatggacgaacttcacacaggtggaagacaagaatatgacaaagctagcgagttaagatggaaattgtttggaaaagccttagtaggtgatgcagctttcctcactctgtgtcagttctacgatcaggatggcagtttctatgatctggaggcagaggagtcaggatgctcctctgagtgtgcgtgttgtaactggagggcacacggtgagcccaccagtactggggagctaagggaaaccaacactggaggagcactaggaaatttatgtaagtattttagtgtccatgctgaggtttgtgaggaggaggagaaggcacagaaggctcccaggagtgggctgtccatgtaccctattgttggacgttttcgaagatgccttggaaaccatctcaatatgcctgtgtttgcacaaaaacaactcttttgttcaaccgagttagatggtttaatattagcattgtctggttctcagaacatcatccaaaatgactcctgtgatggagatgcttttgattcgtga

SEQ ID NO: 13552 - DNA, 574 bp, Homo sapiens
  SIMILAR (1339)..(1551): 1001254mologous to Homo sapiens lymphocyte-specific protein 1,accession number AF043350,Smith-Waterman Score=361.
  misc_feature (1)...(574): n = a,t,c or g
cccccacatcagcacgggttgttggccttggggggcggcacagctgacccctgtatccgcttttggaacacgtgccagggccaaccactgcagtgtattcgacacgggctcccaagtgtgcaatctggcctggtccaagcacgccaacgagctgggtgagcacgccggnctactcacagaaccagatccttgtttggaagtaccctcccctgacccaggtggccaagctgaccgggcactcctaccgcgtgctgtacctggcaatgtcccctgatggggaggccatcgtcactggtgctggagacgagaccctgaggttttggaacgtctttagcaaaacccgttcgacaaaggagtctgtgtttgtgctcaaccttttcaccaggatccggtaaacctgccgggcaggaccgtgccacaccagctgtccagagtcggaggaccccagctcctcagcttgcatggactttgccttcccagcgcttgtcccccgaggaaggcggctgggcgggcggggagctgggcctggaggatcctggagtctcattaaatgcctgattgtgaaaaaaaaaaa

SEQ ID NO: 13553 - DNA, 3940 bp, Homo sapiens
  SIMILAR (818)..(441): 781254mologous to Homo sapiens lymphocyte antigen,accession number X55188,Smith-Waterman Score=464.
atgcagccccagagcgtctccactgaggccttaccagaggccagacccagagccagccagctaagccaggcccagagcaactgtgtgcgacactgtttactgttgttgaaggtaaccaatcaacgaatccctgagaccggattccctaacgaggcgctcccggtgccaccgcccgccagacccgggccccacaccgtgatcgccgcctccgggacgcctcaccgagctctggagactcaggacccgtcggcccggccagtaaccgcaggcgcctctgccaccaccgcttcacctgccgcgacgcccgcagtgcggtctgggggccgccattttctcgcccacgtgaccgtgccggacggcaccaacgcagccgcgggctgtttacggaggacttcccgtggaccaggagctgtgctgactcaggaaggctacgagggcagggtgccaggtgtgactggccccaaggatgctccccaggaggagataatcccagggtgcaggacgcagatatcgaagcctcagccaaaagcaaggcctgtgggacatttggcagtatttgagccaggcatgctgctcagtgcccccactgtgcccagaacggcccagtacagaaagcagcctgtccccaatgtctggactgtgagccccgtgagggcaccactggactcagcacagagccagagccccttcctgggccacttatgttctcgtccagggacgttcatgtccccagtggccccaggtccctgtgtgcgttggcagacccaggtgtcttttaggtctgaaggtgtcatcaagtcagacagggctgtgggtactcggtggtaccaggaggctggagatgagcaacctcgggtcttttatctgcaggcaccatttggaagtgtggagagcagttctcacgggagtgggctggaggtgggagctgccccccacacagggaagaggaggtcagaggccgccagctcagcttgttcttctgcagcgcagctgagcgaggggcttagaggggtcgctgggggtcccggagctgagctgagcaccgctagcagcaccgggcaagtgtccaggcggtgggcgctggcacccgtccatgaggccttgcagaggggacacgagataagccacgaaaacccactaccacaggactgtgggctgcatgctcttgtccctcagagcctgactggccccatgtggccgagccagggaccacatgcgtcccttgactgcgggcccagtcagcgctgcctgcgggctcttgcagaagaaacagccctgcggttgatcctatctccaaccccaggccgggagctcgtcagaggccacctggagctgtggaggctaaccttgccgcgggccgagccctgcctcgccatggaccaggactatgagcggcgcctgcttcgccagatcgtcatccagaatgagaacacgatgccacgcgtcacagagatgcggcggaccctgacgcctgccagctccccagtgtcctcgcccagcaagcacggagaccgcttcatcccctccagagccggagccaactggagcgtgaacttccacaggattaacgagaatgagaagtctcccagtcagaaccggaaagccaaggacgccacctcagacaacggcaaagacggcctggcctactctgccctgctcaagaatgagctgctgggtgccggcatcgagaaggtgcaggacccgcagactgaggaccgcaggctgcagccctccacgcctgagaagaagggtctgttcacgtattcccttagcaccaagcgctccagccccgatgacggcaacgatgtgtctccctactccctgtctcccgtcagcaacaagagccagaagctgctccggtccccccggaaacccacccgcaagatctccaagatccccttcaaggtgctggacgcgcccgagctgcaggacgacttctacctcaatctggtggactggtcgtccctcaatgtgctcagcgtggggctaggcacctgcgtgtacctgtggagtgcctgtaccagccagaagggagagcggatgggagagcggatgggtgagcagatgggtgagcggatgggagagcgcatgggagagcgcatgggagagcggatgggagagcgcatgggagagcgcatggatgagcgcatgggagagcgcatggactggggcttcgagaccagcggcaaagctcacactgacctctgcctccaggtgacgcggctctgtgacctctcagtggaaggggactcagtgacctccgtgggctggtctgagcggggtcgagtgggctttagttccattttagattatgatgaaaacatctcagcagcagctttgaagcatatcatggggagggggaacctggtggcggtgggcacacacaagggcttcgtgcagatctgggacgcagccgcagggaagaagctgtccatgttggagggccacacggcacgcgtcggggcgctggcctggaatgctgagcagctgtcgtccgggagccgcgaccgcatgatcctgcagagggacatccgcaccccgccactgcagtcggagcggcggctgcagggccaccggcaggaggtgtgcgggctcaagtggtccacagaccaccagctcctcgcctcggggggcaacgacaacaagctgctggtctggaatcactcgagcctgagccccgtgcagcagtacacggagcacctggcggccgtgaaggccatcgcctggtccccacatcagcacgggctgctggcctcggggggcggcacagctgaccgctgtatccgcttctggaacacgctgacaggacaaccactgcagtgtatcgacacgggctcccaagtgtgcaatctggcctggtccaagcacgccaacgagctggtgagcacgcacggctactcacagaaccagatccttgtctggaagtacccctccctgacccaggtggccaagctgaccgggcactcctaccgcgtgctgtacctggcaatgtcccctgatggggaggccatcgtcactggtgctggagacgagaccctgaggttctggaacgtctttagcaaaacccgttcgacaaaggcagcttcctccctgggcctgcggctcagcgcatctgccatccccatgtgtctgcaggagtctgtgtctgtgctcaacctcttcaccaggatccgggcgagaaccacattggacggtcccggctcagaccgtctgtactcagagcgacggatgccccctgggaccctcactgcctccgtctgttcatcacctgcccaccggagccgcatgctcttcctggaactgcccacgtctgcacagaacagaccaccagacgccagggctgattgcagtctctctggaagcatctgtgtcatggccatcgcccggcggtcagtgggcttcagatgggcctgtgcatcctggccaagcgtcaccctcacactggaggaggatgtctgctctggacttatcaccccaggagaactgaacccggacctgctcactgccctggctggagaggagcacaacagatgccacgtcttcgtgcattcgccaacacttgttaaatactcagaacgactctccagcccttccctcgaggccacctcaccccgcagctgggaggagggagtggtcagcgtggttgccgagacactgggtggcctttatgctgtcaacggtggcctcagaggccttctggcaggagcccgggggatccaggcagacatgcaaaccctcaggcaagaggctgcacggccctgtatcccctcggggaccctcgaggccagcttcccagcaccgctgtacagtggccgctcactgtggggtctacagacctggagacaggccaagaacaaatgtgtctgcggccgtctccaaggactgcaaacgcactgggagcttcggccacagaaatgttcgccctctgaaatccaggcct

SEQ ID NO: 13554 - DNA, 619 bp, Homo sapiens
  SIMILAR (203)..(781): 781254mologous to Homo sapiens TRIAD3,accession number AF228527,Smith-Waterman Score=778.
caaggatgccgtgaagcccaggtggggactgtctcttggatccacagactggctccgccagtggccccgagccaccttgcccaggccttacatgccttggtctggccttggggcctggtccttgggtttgaacatggtggggtgcaagcccatgaaatgggcaaaccgggggtcctcaggccccccaccaatcagcccctggcgtctggtggtctgttctgtgcagacgtgggcagttcccaggaagagcatgcggctccggtgggcaggtgatgaacagacggaggcagtgagggtcccagggggcatccgtcgctctgagtacagacggtctgagccgggaccgtccaatgtggttctcgccctttgggaagggagacagagcccctgctgctgagggtccccgaccacgtgcccaccccagatactggtggacatggttcacaatcaggcatttaatgagactccaggatcctccaggcccagctccccgcccgcccagccgccttcctcgggggacaagcgctgggaaggcagagtccatgcaagctgaggagctggggtcctccgactctggacagctggtgtggcacggtcctgcccggcaggtttaccggat

SEQ ID NO: 13555 - DNA, 1359 bp, Homo sapiens
  SIMILAR (355)..(266): 861254mologous to Homo sapiens Human secreted protein, SEQ ID NO: 6408,accession number G02327,Smith-Waterman Score=139.
gcaatgtcccctgatggggaggccatcgtcactggtgctggagacgagaccctgaggttctggaacgtctttagcaaaacccgttcgacaaaggcagcttcctccctgggcctgcggctcagcgcatctgccatccccatgtgtctgcaggagtctgtgtctgtgctcaacctcttcaccaggatccgggcgagaaccacattggacggtcccggctcagaccgtctgtactcagagcgacggatgccccctgggaccctcactgcctccgtctgttcatcacctgcccaccggagccgcatgctcttcctggaactgcccacgtctgcacagaacagaccaccagacgccagggctgattgcagtctctctggaagcatctgtgtcatggccatcgcccggcggtcagtgggcttcagatgggcctgtgcatcctggccaagcgtcaccctcacactggaggaggatgtctgctctggacttatcaccccaggagaactgaacccggacctgctcactgccctggctggagaggagcacaacagatgccacgtcttcgtgcattcgccaacacttgttaaatactcagaacgactctccagcccttccctcgaggccacctcaccccgcagctgggaggagggagtggtcagcgtggttgccgagacactgggtggcctttatgctgtcaacggtggcctcagaggccttctggcaggagcccgggggatccaggcagacatgcaaaccctcaggcaagaggctgcacggccctgtatcccctcggggaccctcgaggccagcttcccagcaccgctgtacagcgatgactacctgtccctggagggttcccgctggccaccagccatcaggcaggccacacgctggaagtacacgcccatgggacgggacgcagccggccagctgtggtacacaggcctgaccaactcggacgcctgggaagcctggtacaacctgccacgggccccggccagccccttccgcgaggcctacaaccgctggcacagctgctaccaacacccctacacccagcacctgcgggagaccgcctggcatgaccccatcgtccctgcccagtaccaggcccccagcacccggtgggggagcgcgctgtggaaagacaggccaatccggggcaaggaatacgtgctcaacaggaaccggtacggggtggagccactgtggagggcatcagactacgtgccctccctgtcggcaccccagcgcccgcccggcaccacccagaactaccgggaagtgggtcctggaaccatactgcccctccaccttgcctggttccccgcttcccttacaacccactccccgttaaagccatgc

SEQ ID NO: 13556 - DNA, 359 bp, Homo sapiens
  SIMILAR (6)..(212): 851254mologous to Homo sapiens mevalonate kinase,accession number M88468,Smith-Waterman Score=289.
  misc_feature (1)...(359): n = a,t,c or g
ggcacgaggtggccaggcttcagtcactggacacaagctttctggagcaaggtgatgtcacaacacccacctcagagcaagtggagaagctaaaggaggttgcaggcttgcctgacgactgtgctgtcaccgagcgcctggctgagctggcctttctttacttatacctgtgcatctgccggaatcatagaggcctgtagatccaggatgtcnnnnnnnnnnnnnnnnnnnnnnnnnnnnnnnnnnnnnnnnnnnnnnnnnnnnnnnnnnnnnnnnnnnnnnnnnnnnnnnnnnnnnnnnnnnnnnnnnnnnnnnnnnnnnnnnnnnnnnnnnnnnnnnnnnnnnnnnnnnnnnnnnng

SEQ ID NO: 13557 - DNA, 513 bp, Homo sapiens
  SIMILAR (217)..(420): 891254mologous to Homo sapiens mevalonate kinase,accession number M88468,Smith-Waterman Score=325.
gccttctcatgatcactccaagcttggcacgagggcgtccgggaaagtcatccttcatggagaacatgccgcggtacatggcaaggtagcactggctgtatccttgaacttgagaacattcctccggcttcaaccccacagcaatgggaaaggggacctcagcttacccaacattggtatcaagcgggcctgggatgtggccaggcttcagtcactggacacaagctttctgggtggaccaaggaggatttggagctaattaacaagtgggccttccaaggggagagaatgattcacgggaacccctccggagtggacaatgctgtcagcacctggggaggagccctccgataccatcaagggaagatttcatccttaaagaggtcgccagctctccagatcctgctgaccagcaccagagggcgctcgcaatatcagggcccttgtgggtggggggagaaacaggcttgctcgaggtgccagatatggggggccccctcctgctctcatggg

SEQ ID NO: 13558 - DNA, 1333 bp, Homo sapiens
  SIMILAR (1)..(1413): 821254mologous to Homo sapiens secretogranin III,accession number AF078851,Smith-Waterman Score=1857.
cccgggtcgacgatttcgttggggagctgctacggcttcggcgcggaggggcggctgacgtggaggcggcggcggccgcaggattcccaggagccatgttgtcacaagtcctactggtgtctgctccggggaaagtcatccttcatggagaacatgccgtggtacatggcaaggtagcactggctgtatccttgaacttgagaacattcctccggcttcaaccccacagcaatgggaaagtggacctcaacttacccaacattggtatcatgcgggcctgggatgtggccaggcttcattcactggacacaagctttctgggtgagtgcaaggaggagaaaccagagcaaggtgatgtcacaacacccacctcagagcaagtggagaagctaaaggaggttgcaggcttgcctgacgactgtgctgtcaccgagcgcctggctgtgctggcctttctttacttatacctgtccatctgccggaagcagagggccctgccgagcctgggatatcgtagtgtggtcggagctgccccccggggcgggctttgggctccagcgccgcctactcggtgtgtctggcagcagccctcctgactgtgtgcgaggagatcccaaacccgctgaaggacggggatttgcgtcaacaggttggaccaaggaggattttggagctaattaacaagttgggcctttccaaggggagagaatgattcacgggaaccccctccggagtgggacaatgctgttcagcacctgggggagggagccctccgattaccatcaaggggaagattttcattcctttaaagaggttcgccagttttccagatcctggtttgaccaacaccaaagttccttcggcaattaccagggcccttgtggctggcgtcagaaacaggctgctcaagttcccagagatcgtggcccccctcctgacctcaatagatgccatctccctggagtgtgagcgcgtgctgggagagatgggggaagccccagccccggagcagtacctcgtgctggaagagctcattgacatgaaccagcaccatctgaatgccctcggcgtgggccacgcctctctggaccagctctgccaggtgaccagggcccgcggacttcacagcaagctgactggcgcaggcggtggtggctgtggcatcacactcctcaagccagggctggagcagccagaagtggaggccacgaagcaggccctgaccagctgtggctttgactgcttggaaaccagcatcggtgcccccggcgtctccatccactcagccacctccctggacagccgagtccagcaagccctggatggcctctga

SEQ ID NO: 13559 - DNA, 2780 bp, Homo sapiens
  SIMILAR (147)..(638): 961254mologous to Homo sapiens glutathione transferase M4,accession number M96233,Smith-Waterman Score=835.
atgttgtcagaagtcctactggtgtctgctccggggaaagtcatccttcatggagaacatgccgtggtacatggcaaggtagcactggctgtatccttgaacttgagaacattcctccggcttcaaccccacagcaatgggaaagtggacctcagcttacccaacattggtatcaagcgggcctgggatgtggccaggcttcagtcactggacacaagctttctgggtgagtgcaaggaggagaaaccagagcaaggtgatgtcacaacacccacctcagagcaagtggagaagctaaaggaggttgcaggcttgcctgacgactgtgctgtcaccgagcgcctggctgtgctggcctttctttacttatacctgtccatctgccggaagcagagggccctgccgagcctggatatcgtagtgtggtcggagctgccccccggggcgggcttgggctccagcgccgcctactcggtgtgtctggcagcagccctcctgactgtgtgcgaggagatcccaaacccgctgaaggacggggattgcgtcaacagcaattctgacgacaatatgttgaaaaacattgaactgtttgataagctgtctctgcgctttaacggaagggtcctgttcataaaggatgttattggggatgaaatctgctgctggtccttttatggtcagggccggaagattgctgaagtctgttgtacctccatcgtctatgccactgagaagaaacagaccaaggtggagtttcccgaagcccggatttatgaggagaccctgaacattttgctgtatgaggcccaggatggccggggacctgacaatgcgctcctgggaggccacaggcggggcggcggggcgcttcccaccacctgggacgaggacgaggagcgggagcggatcgagcgcgttgcggaggatccacattcaagcgcccttgattgaccgggcccaccttgcaccagttgagcaggcaagagaccgagccgccctcctctcaccgcccccactccctgccgtgctacacccagattcctgttgcaggctgccgggccccttctgcttcccttggagcctggagatacttttgtaacaagccagatgattattttggtattgcttgacaaggcaaattgattgtcttgacccaggcgtatgacccctgtcgttgaacaagctgtgtctaagatctctacttttcatgagaatctgagactctttggagccaggctttctcggttctcagaggaaaagtatgaatgagtgtgaagtgtatgtgagaacttttgtttgcaatatttatttttgtgggtgtcgacttcctatgtgggctttttgggtgacactcccttaagggttcagtttgacaattctgagagttgtcctgcagttggaggccaccagaggtatctgagctccctgcttcctatttcataatcctccagccccagcaggtccactcctggttcctgtgtgtttggcccgggcacaatccccactgctttgctagacgtgctttctgccatgtggctttgggcctaagagcttgttgataattgcagcttgtggcagtgggaaatatggctgaatgagcgtctaaatccgttgagaccagtgcaacttttgggtgcaaaggctttgtttagggatcaagccttttgccaccttgggctgggtctttgggcctgggtgctcactgggaccccatatgtctgcgtaggagcagaactttccatgggcagtaagtgtccagctctgtttctggttctttccccaactccagccccgtccagttgttctcctgattgacccgactccactccagggaaggccatcttgaccctgtgacagggcatagctcataaactacccctccctgggatcccgctcctcttcagcctccttccccatgaagctgggctaactttctaagtcattttgcttaaaaaatcaggtgtggcccataccctttgtcctcccagccaggcatccaggcagggaaccccttaaaaccaccagccccagggaagcttccctgctataaacacagacccccttgtctttgcctctgatttttacacagtgtaggagtgggccagcagtgaacaggttgagggatgtgcgggtaggataggataactttggggtctgggtttgtgtctgtgtttcatgtttgttttaaggggatatgtgtgactgtggggtgggggacgtgtgcttgttgggggcacaggtggcggcccccctgctggaaccccggctgggcgcaacgccctatgtaggaacgggtgttcctccagtgaccctacctccccggctccctcctgcaccctgcaaaggaacaggagtgaagtcgtgacctgaacaggggtggttgaagactagactagggtagagtagttacccaggagatgtgaatgtgccgtcaggtgatggatgggttttgtcaagggaattcgttacccgtttttataccaaaggtattaacatggggcagcctttgacacatgtattccgaaaaacgagtttatattttcaaacggtttttacagcttagactttgtacttactgccctgcctgtgacagttgtatgccttcattttgtatccaacagcaaagttctacaataaaactttaaaacaatcatgactgaatgtcaaaatcgtgtattgggcagatgctttaactgtcggtgagaaccttatataggccactgggattattaggccagggagagggctccaaaagttcggaaaatttaaccgtaagggta

SEQ ID NO: 13560 - DNA, 1656 bp, Homo sapiens
  SIMILAR (670)..(1155): 251254mologous to Rattus norvegicus serine-arginine-rich splicing regulatory protein SRRP86,accession number AF234765,Smith- Waterman Score=132.
atgataccccaaaaccaaaaggccattgctaattatctgaaatcctggaatgagaccctcacctccaggctggctactttacctgagaatccaccagctattgactggacttactacaaggccaatgtggccaaggcaggcttggtggatgactttgagaagaagtttaatgtcctgaagcttcctgtaccagaggataaatatactgcccaggtggatgctgaagaaaaagaagatgggaaaacttgtgctgagtgggtgtctctctcaaaggccaggcagatgctgccatgcctgctgagtagcctgcgtcatgtgcccaacctgaactgtagccagttagtgctgtctaataaattggtctccaaagggggcaagcttctttttccactgttagggctagaagtggccctcacagacctccagagctccagaaataatgtgcggcaccacacggaggagatcactgtggaccacctgcttgttcgccggggccaggccttcaacctcaccctgtacttcaggaaccggagcttccagccaggcctggacaacatcatcttcgtggttgaaactgaggtgagcttgtgcgctcctcccacggcggccgtgggtcggtacctcttgaaaatccacatcgactccttccaggggtctgtgacggcctaccagctaggggagttcatcctgcttttcaatccctggtgcccagacggcgccaaccctgcggagtggacgggcagcgtggccatcctgaagcagtggaacgccacaggctgccagcccgtgcgctacgggcaatgctgggtctttgctgccgtcatgtgcacagtgatgaggtgtctggggatccctacccgtgtgatcaccaacttcgactctggccacgatacagatggaaacctgatcatagatgagtattatgacaacacaggcaggattttggggaataagaagaaggatactatctggaacttccatgtctggaatgagtgctggatggcccggaaggatctgccccctgcatatggaggctggcaggtgctggacgccacacctcaggagatgagcaacggcgtctactgctgtggccctgcctctgtcagagccatcaaagaaggagaagtggacctgaactatgacacgccctttgtgttttcgatgtacagccagtacctgtcaacagacaagctgatccgcatcagtgccctgggtgaagagaaaagcagtcctgagaaaatcctggtgaacaagatcatcaccttatcttatccaagcatcacgattaataattcttatgccaaagtggcatatttggaggtggcatatcctgccaccttacagaatggtgcccttcgtaaatatctggttctaggagcagccgttgtgaaccagccactctccatacaggtgatattttcaaaccccctctcggagcaggttgaggactgtgtgctgactgtggaaggaagtggcctcttcaagaaacagcagaaagtcttccttggagtcctcaaaccccaacaccaagcaagcatcattctggagaccgtccccttcaagagtggacaaaggcagatccaagctaatatgagaagcaacaagtttaaggacattaagggttacaggaatgtttatgtagactttgcattataa

SEQ ID NO: 13561 - DNA, 2604 bp, Homo sapiens
  SIMILAR (3)..(2375): 981254mologous to Rattus norvegicus glutamate receptor delta- 1 subunit,accession number U08255,Smith-Waterman Score=4046.
atgataccccaaaaccaaaaggccattgctaattatctgaaatcctggaatgagaccctcacctccaggctggctactttacctgagaatccaccagctattgactggacttactacaaggccaatgtggccaaggcaggcttggtggatgactttgagaagaagtttaatgtcctgaagcttcctgtaccagaggataaatatactgcccaggtggatgctgaagaaaaagaagatgggaaaacttgtgctgagtgggtgtctctctcaaaggccagcaacactgccaagaaaaacctgagggcaaggctagaagtggccctcacagacctccagagctccagaaataatgtgcggcaccacacggaggagatcactgtggaccacctgcttgttcgccggggccaggccttcaacctcaccctgtacttcaggaaccggagcttccagccaggcctggacaacatcatcttcgtggttgaaactggaccgctgccagacctggccttggggactcgggctgtgttcagcctggcacgccatcacagccccagcccctggattgcctggctggagaccaatggggccacctccacagaggtgagcttgtgcgctcctcccacggcggccgtgggtcggtacctcttgaaaatccacatcgactccttccaggggtctgtgacggcctaccagctaggggagttcatcctgcttttcaatccctggtgcccagaggatgctgtctacttggacagtgaaccccagaggcaggagtatgtcatgaatgattatggcttcatctaccaaggcagcaagaactggatccgcccatgtccctggaactatggacagtttgaagacaaaatcatagacatctgcctgaagctgctagacaagagcctgcacttccagactgacccagccacagactgtgctctgcggggaagccccgtctacgtcagcagagtggtgtgtgccatgatcaacagcaatgatgataatggggtgctcaatggaaactggagtgagaattacacagacggcgccaaccctgcggagtggacgggcagcgtggccatcctgaagcagtggaacgccacaggctgccagcccgtgcgctacgggcaatgctgggtctttgctgccgtcatgtgcacagtgatgaggtgtctggggatccctacccgtgtgatcaccaacttcgactctggccacgatacagatggaaacctgatcatagatgagtattatgacaacacaggcaggattttggggaataagaagaaggatactatctggaacttccatgtctggaatgagtgctggatggcccggaaggatctgccccctgcatatggaggctggcaggtgctggacgccacacctcaggagatgagcaacggcgtctactgctgtggccctgcctctgtcagagccatcaaagaaggagaagtggacctgaactatgacacgccctttgtgttttcgatggtgaatgctgactgcatgtcctggctcgtccagggagggaaggagcagaagcttcaccaggacacgagttctgttggcaattttatcagcacaaagagcatccagagtgacgagcgggatgacatcacagagaactacaagtatgaagaaggatccctccaggagaggcaggtgtttctgaaggctctgcagaagctgaaggctagaagcttccatggctcccaaagaggagcagagttgcaaccttccaggcccacatcactgagccaggacagccctcggagcctgcatacaccttcccttcgacccagtgatgtggtgcaagtctccctgaaattcaagctgctcgacccgcccaacatgggccaggatatatgctttgtcctgctggccctcaacatgtcctcccagttcaaggacctcaaagtgaacctgagtgcccagtctctgctgcacgatggcagccccctgtccccattctggcaggacacagcgttcatcacactctctcctaaagaagcaaagacctacccctgcaaaatctcctattcccagtacagccagtacctgtcaacagacaagctgatccgcatcagtgccctgggtgaagagaaaagcagtcctgagaaaatcctggtgaacaagatcatcaccttatcttatccaagcatcacgattaatgcaaataaagggaaactagagagcttttcttatatctgcttcttctcaattgtcttcggctcaaagaattcttatgccaaagtggcatatttggaggtggcatatcctgccaccttacagaatggtgcccttcgtaaatatctggttctaggagcagccgttgtgaaccagccactctccatacaggtgatattttcaaaccccctctcggagcaggttgaggactgtgtgctgactgtggaaggaagtggcctcttcaagaaacagcagaaagtcttccttggagtcctcaaaccccaacaccaagcaagcatcattctggagaccgtccccttcaagagtggacaaaggcagatccaagctaatatgagaagcaacaagtttaaggacattaagggttacaggaatgtttatgtagactttgcattataa

SEQ ID NO: 13562 - DNA, 599 bp, Homo sapiens
  SIMILAR (29)..(514): 1001254mologous to Homo sapiens 09-OCT-1997 cDNA encoding a human ATP synthase d subunit (ASYSD),accession number Z22095_cd1,Smith-Waterman Score=845.
gcagccagggtcggtgaaggatcccaaaatggctgggcgaaaacttgctctaaaaaccattgactgggtagcttttgcagagatcataccccaaaaccaaaaggccattgctagttccctgaaatcctggaatgagaccctcacctccaggttggctgctttacctgagaatccaccagctatcgactgggcttactacaaggccaatgtggccaaggctggcttggtggatgactttgagaagaagtttaatgcgctgaaggttcccgtgccagaggataaatatactgcccaggtggatgccgaagaaaaagaagatgtgaaatcttgtgctgagtgggtgtctctctcaaaggccaggattgtagaatatgagaaagagatggagaagatgaagaacttaattccatttgatcagatgaccattgaggacttgaatgaagctttcccagaaaccaaattagacaagaaaaagtatccctattggcctcaccaaccaattgagaatttataaaattgagtccaggaggaagctctggcccttgtattacacattctggacattaaaaataataattatacaaaaaaaaaaaaaaaaa

SEQ ID NO: 13563 - DNA, 435 bp, Homo sapiens
  SIMILAR (71)..(367): 1001254mologous to Homo sapiens 30-SEP-1996 Human monocyte chemoattractant protein 4 encoding cDNA,accession number V28591_cd1,Smith-Waterman Score=512.
gccggcggaacagccagaggagcagagaggcaaagaaacattgtgaaatctccaactcttaaccttcaacatgaaagtctctgcagtgcttctgtgcctgctgctcatgacagcagctttcaacccccagggacttgctcagccagatgcactcaacgtcccatctacttgctgcttcacatttagcagtaagaagatctccttgcagaggctgaagagctatgtgatcaccaccagcaggtgtccccagaaggctgtcatcttcagaaccaaactgggcaaggagatctgtgctgacccaaaggagaagtgggtccagaattatatgaaacacctgggccggaaagctcacaccctgaagacttgaactctgctacccctactgaaatcaagctggagtacgtgaaatgacttttccattctcctctggcctcc

SEQ ID NO: 13564 - DNA, 636 bp, Homo sapiens
  SIMILAR (1)..(93): 871254mologous to Homo sapiens monocyte chemotactic protein 4 (MCP-4),accession number AJ001634,Smith-Waterman Score=130.
atgaaagtctctgcagtgcttctgtgcctgctgctcatgacagcagctttcaacccccagggacttgctcagccaggccttgggctcccctctgtaaatgaagttgctgcacaggatgtgtggtttgcacgctggggaacagccaaagcaccaggagcttatgaattgaatttcctggacccctctcctggtttcaatttggtgtatcagggtggggctgaacagcctgaaaacattctgacgattagctccttgtccgcagaaggtgctcagaagccacggcctcctataggaaagggagcctttcttaagtccctgaaagagacaatgaaggctcataatcttaagggttgccaaaagtctttgcaaaattctgccttgaccagcgctaaagcctcacacaccattgctgagtacgtgcagtgtctgaaggacaagttagtatcaagctgtggagagaagttttcgcagaagcagggcctctccctctgtgccagcatcaagctgaaatcagtgctcatgagtgggctacagagggagccagctgttaaaacatttaccagcataaaggactcggtgaaggacttgcccagcgaagtccagccacaggactccacacttcagcacaatggatga

SEQ ID NO: 13565 - DNA, 1291 bp, Homo sapiens
  SIMILAR (898)..(1191): 721254mologous to Rattus norvegicus glutamate receptor subtype delta-1,accession number Z17238,Smith-Waterman Score=339.
atgggcgacaaagggacgcgggtgttcaagaaggccagtccaaatggaaagctcaccgtctacctgggaaagcgggactttgtggaccacatcgacctcgtggaccctgtggatggtgtggtcctggtggatcctgagtatctcaaagagcggagagtctatgtgacgctgacctgcgccttccgctatggccgggaggacctggatgtcctgggcctgacctttcgcaaggacctgtttgtggccaacgtacagtcgttcccaccggcccccgaggacaagaagcccctgacgcggctgcaggaacgcctcatcaagaagctgggcgagcacgcttaccctttcacctttgagatccctccaaaccttccatgttctgtgacactgcagccggggcccgaagacacggggaaggcttgcggtgtggactatgaagccaaagccttctgcgcggagaatttggaggagaagatccacaagcggaattctgtgggtctggtcatccggaaggttcagtatgccccagagaggcctggcccccagcccacagccgagaccaccaggcagttcctcatgtcggacaagcccttgcacctagaagcctctctggataaggagatctattaccatggagaacccatcagcgtcaacgtccacgtcaccaacaacaccaacaagacggtggagaagatcaagatctcagtgcgccagtatgcagacatctgccttttcaacacagctcagtacaagtgccctgttgccatggaagaggctgatgacactgtggcacccagctcgacgttctgcaaggtctacacactgacccccttcctagccaataaccgagagaagcggggcctcgccttggacgggaagctcaagcacgaagacacgaacttggcctctagcaccctgttgagggaaggtgccaaccgtgagatcctggggatcattgtttcctacaaagtgaaagtgaagctggtggtgtctcggggcggcgacgtggccgtggaactgcccttcaccctaatgcaccccaaggcccaaagaggaacccccgcatcgggaagttccagagaacgagacgccagtagataccatatctcatagaacttgacacaaatgatgacgacattgtatttgaggactttgctcgccagagactgaaaggcatgaaggatgacaaggaggaagaggaggatggtaccggctctccacagctcaacaacagatagacgggccggccctgcctccacgtggctccggctccactctcgtgcactcggatgct

SEQ ID NO: 13566 - DNA, 1098 bp, Homo sapiens
  SIMILAR (754)..(879): 711254mologous to Homo sapiens beta-arrestin 1A,accession number AF084040,Smith-Waterman Score=145.
  misc_feature (1)...(1098): n = a,t,c or g
atggcatgctcttggggaatgtggtggctgctgctgttgtttgaggaagccatcagagtcctgcttcctgaaggaggtggtcctggtgctgacaagaccatgggctcccgaggcttctggaagcagagtgttcaagaaggccagtccaaatggaaaggtagtgggaaacgnctcacccacagggtccacgaggtcgatgtggtccacaaagtcccgctttcccagatgaggacactgaggcccggagagatcttcatgccaagcaccactgccagtggagcagcagcggcagagaagctggggagctgcagcgacatctattggccgatccgtgtgggagccgagtcagctttaacttttcttggtatacatgcgtcatctgctggtggagatgggaaagtgcctttcttcgttcagtcaacaatccaacaagtatgtgctctcatggcacgctgtgactacacaacaggccccctctgcaatactcctcatcagcaattccaaacctttagcatcatgccttatcccccaattaatctcccgtgggaacccagagagccttctcaggaaagaggaggcttccatttctttttgggaccagaggaagtctcctcgtccagctcccaggcagaccgaggctccgagtggcagaactggggctggagggcatcttttggatctacctcctctgacggcaaaaccctctgcagtcctcggactgacagggcatcgacatcaagtctcacagcctgtgagtccgctcaaggctcactgggtctgggtctctgtttcagcgacgtggccgtggaactgcccttcaccctaatgcaccccaagcccaaagaggaacccccgcatcgggaagcaacccatgggcagaaagggccacacggggagttcacagagggcgaggcagctggggtggggtgggggccatcagagaaggacttctccgcagaggtggtgcttcagctgggtcttgaagatggacacacggaccacttgggccagcccagctcgggcaaggagaccactgccactcaaaagaggcacatctacattctacgcacaaacaggactgaatctcggatattctaa

SEQ ID NO: 13567 - DNA, 858 bp, Homo sapiens
  SIMILAR (1)..(1179): 971254mologous to Homo sapiens putative p150,accession number U93563,Smith-Waterman Score=1958.
atgcagatctttgtgaagaccctcacaggcaagaccatcaccctcgaggtcgagcccagtgacaccactgagaatgtcaaggccgaaattcaagacaaggagggcgttccacttgaccagcaatgtctgatatttgtgggcaaacagctggaggatggccgtactctctcagactgcaacatccagaaagagtccatcctgcacctggggctgcacctagcgcagctgagggtgctgatggacgcagaaatccgaggaactgagcttttcctcaaggtggcaacagtcaaggcagaaagagggcactggcgtcccaaaatgctgacctgggaagttgatgccacagagggagatttggtggggcagcaaagagcagaagatgctgaggctcacgttgaaaaaggagggaaaaccaggccttacggagaagttctttacaggcaaaacaagagggcaaagacacaaaacttgtcctatcccctaaaaggtgtagagaaagaaactttggtagtagtgattgacagtggtggtggtgatgctcaaatatggtggaaaggcgaggctgggcgaggtctaagaacagtatgtgctgtgatggctacatcacttagcattagagtcaaagaagccgagtttggaggggacctgggtttgtctgtacagggagctgcagagggcagcatggtggccttccccttgtcgaagcaggtagcccagggagcccaagggggcaacgatggatctggatgggaaccacatgaccaggaagtaaaagaagtacttttaccttttacagactaccggctgctggtaggtcttcctaatgtcatgttcacagacctcattctttatgattga

SEQ ID NO: 13568 - DNA, 450 bp, Homo sapiens
  SIMILAR (57)..(434): 981254mologous to Homo sapiens ubiquitin-52 amino acid fusion protein,accession number X56998,Smith-Waterman Score=646.
tcgggtcgacccacgcgtccgcggacgcgtggggaggcggccgagctgacgcaaacatgcagatctttgtgaagaccctcactggcaaaaccatcacccttgaggtcgagcccagtgacaccattgagaatgtcaaagccaaaattcaagacaaggagggtatcccacctgaccagcagcgtctgatatttgccggcaaacagctggaggatggccgcactctctcagactacaacatccagaaagagtccaccctgcacctggggttgcgcctgcgaggtggcattattgagccttctctccgccagcttgcccagaaatacaactgcgacaagatgatctgccgcaagtgctatgctcgccttcaccctcgtgctgtcaactgccgcaagaaaaagtgtggtcacaccaacaacctgcgttccaagaagaaagattaataaggttgtc

SEQ ID NO: 13569 - DNA, 472 bp, Homo sapiens
  SIMILAR (8)..(208): 981254mologous to Homo sapiens mitochondrial ATP synthase subunit 9 precursor,accession number U09813,Smith-Waterman Score= 325.
ggaggcaggagatggctctacggtatttaatggggcccagaatggtgtgtctcagctaatccaaagggagtttcagaccagtgcaatcagcagagacattgatactgctgccaaatttattggtgcaggtgctgcaacagtaggagtggctggttctggtgctggtattggaacagtctttggcagccttatcattggttatgccagggtaatcatttctatccctaaataagttaagagcatgcttgcagtagttgggaaacttaggctactgaaataataggctactttgcattaagtgcttactctgtgtcttgcattatatttaaaggggctttgtatggcattatctcacttaattctcataacaccatttgggatgttatgagaataacatctatgaaggactagagacacagaggccacattacttgcccaggtcatagctagtaaatgtcagaaaatgaatttt

SEQ ID NO: 13570 - DNA, 743 bp, Homo sapiens
  SIMILAR (475)..(906): 451254mologous to Xenopus laevis p33 ringo,accession number AJ249978,Smith-Waterman Score=272.
ggcagagttcgacctctgctgcagcccgtgccgccgccgcctcctgggaagagaggaagcgggagaggagcccacgtcgcctgtcacccaatatctccagccgcgcagtcccgaagagtgtaagatgttcgcctgcgccaagctcgccatgcacccccatctctgatccgagctggatccagagttgcatacagaccaatttctgcatcagtgttatctcgaccagaggctagtaggactggagagggctctacggtatttaatggggccccagaatggtgtgtctcaagctaatcccgaagggaagtttcaagaccagtgcaatcagcaagaagacattggatactgctggccaaatttattgggtgcaggtgctggcaacagctagggagtgggctggtttctggtggctggtattgggaacagtcttttgggcaagccttatccattgggttatggccagaaaaccctttcgctggaagcagcagctggttctcatatggctatcctggggatttgccttgttttgaaagctatggggtctccttttgttttgatggttgctttcttgattttgtttgcccatgtaacagaaattactgcttgacatgttgggcattcatattaattacgggatgtaattctgtgtatcttactgtgactccgaaaactgtagtattggtgtcatgggaatgtacgttatttccacagtcatttcattaaagatgaaaactttaaaaaaa

SEQ ID NO: 13571 - DNA, 4491 bp, Homo sapiens
  SIMILAR (1534)..(1427): 971254mologous to Homo sapiens homologue of yeast PMS1,accession number D38435,Smith-Waterman Score=188.
aaatgtagagaagcagccgataaaatagcattgcctgaagaagtttggaggctgagagcagcagtagactggccaactgcagagcaagttgtttctccagccgtgcggtgcagcctcatgcccccaacccagcttagccactgtaagaagacgttcactgtacagacgaccaaacttgccgtggaagagacagttgtgagattcccttgcaaatttacatacgagaatggcttgtgaaatcatgcctctgcaaagttcacaggaagatgaaagacctctgtcacctttctatttgagtgctcatgtaccccaagtcagcaatgtgtctgcaaccggagaactcttagaaagaaccatccgatcagctgtagaacaacatctttttgatgttaataactctggaggtcaaagttcagaggactcagaatctggaacactatcagcatcttctgccacatctgccagacagcgccgccgccagtccaaggagcaggatgaagttcgacatgggagagacaagggacttatcaacaaagaaaatactccttctgggttcaaccaccttgatgattgtattttgaatactcaggaagtcgaaaaggtacacaaaaatacttttggttgtgctggagaaaggagcaagcctaaacgtcagaaatccagtactaaactttctgagcttcatgacaatcaggacggtcttgtgaatatggaaagtctcaattccacacgatctcatgagagaactggacctgatgattttgaatggatgtctgatgaaaggaaaggaaatgaaaaagatggtggacacactcagcattttgagagccccacaatgaagatccaggagcatcccagcctatctgacaccaaacagcagagaaatcaagatgccggtgaccaggaggagagctttgtctccgaagtgccccagtcggacctgactgcattgtgtgatgaaaagaactgggaagagcctatccctgctttctcctcctggcagcgggagaacagtgactctgatgaagcccacctctcgccgcaggctgggcgcctgatccgtcagctgctggacgaagacagcgaccccatgctctctcctcggttctacgcttatgggcagagcaggcaatacctggatgacacagaagtgcctccttccccaccaaactcccattctttcatgaggcggcgaagctcctctctggggtcctatgatgatgagcaagaggacctgacacctgcccagctcacacgaaggattcagagccttaaaaagaagatccggaagtttgaagatagattcgaagaagagaagaagtacagaccttcccacagtgacaaagcagccaatccggaggttctgaaatggacaaatgaccttgccaaattccggagacaacttaaagaatcaaaactaaagatatctgaagaggacctaactcccaggatgcggcagcgaagcaacacactccccaagagttttggttcccaacttgagaaagaagatgagaagaagcaagagctggtggataaagcaataaagcccagtgttgaagccacattggaatctattcagaggaagctccaggagaagcgagcggaaagcagccgccctgaggacattaaggatatgaccaaagaccagattgctaatgagaaagtggctctgcagaaagctctgttatattatgaaagcattcatggacggccggtaacaaagaacgaacggcaggtgatgaagccactatacgacaggtaccggctggtcaaacagatcctctcccgagctaacaccatacccatcattggttccccctccagcaagcggagaagccctttgctgcagccaattatcgagggcgaaactgcttccttcttcaaggagataaaggaagaagaggaggggtcagaagacgatagcaatgtgaagccagacttcatggtcactctgaaaaccgatttcagtgcacgatgctttctggaccaattcgaagatgacgctgatggatttatttccccaatggatgataaaataccatcaaaatgcagccaggacacagggctttcaaatctccatgctgcctcaatacctgaactcctggaacacctccaggaaatgagagaagaaaagaaaaggattcgaaagaaacttcgggattttgaagacaactttttcagacagaatggaagaaatgtccagaaggaagaccgcactcctatggctgaagaatacagtgaatataagcacataaaggcgaaactgaggctcctggaggtgctcatcagcaagagagacactgattccaagtccatgtgaggggcatggccaagcacagggggctggcagctgcggtgagagtttactgtccccagagaaagtgcagctctggaaggcagccttggggctggccctgcaaagcatgcagcccttctgcctctagaccatttggcatcggctcctgtttccattgcctgccttagaaactggctggaagaagacaatgtgacctgacttaggcattttgtaattggaaagtcaagactgcagtatgtgcacatgcgcacgcgcatgcacgcacacacacacacagtagtggagctttcctaacactagcagagattaatcactacattagacaacactcatctacagagaatatacactgttcttccctggataactgagaaacaagagaccattctctgtctaactgtgataaaaacaagctcaggactttattctatagagcaaacttgctgtggagggccatgctctccttggacccagttaactgcaaacgtgcattggagccctatttgctgccgctgccattctagtgacctttccacagagctgcgccttcctcacgtgtgtgaaaggttttccccttcagccctcaggtagatggaagctgcatctgcccacgatggcagtgcagtcatcatcttcaggatgtttcttcaggacttcctcagctgacaaggaattttggtccctgcctaggaccgggtcatctgcagaggacagagagatggtaagcagctgtatgaatgctgattttaaaaccaggtcatgggagaagagcctggagattctttcctgaacactgactgcacttaccagtctgattttatcgtcaaacaccaagccaggctagcatgctcatggcaatctgtttggggctgttttgttgtggcactagccaaacataaaggggcttaagtcagcctgcatacagaggatcggggagagaaggggcctgtgttctcagcctcctgagtacttaccagagtttaatttttttaaaaaaaatctgcactaaaatccccaaactgacaggtaaatgtagccctcagagctcagcccaaggcagaatctaaatcacactattttcgagatcatgtataaaaagaaaaaaaagaagtcatgctgtgtggccaattataatttttttcaaagactttgtcacaaaactgtctatattagacattttggagggaccaggaaatgtaagacaccaaatcctccatctcttcagtgtgcctgatgtcacctcatgatttgctgttacttttttaactcctgcgccaaggacagtgggttctgtgtccacctttgtgctttgcgaggccgagcccaggcatctgctcgcctgccacggctgaccagagaaggtgcttcaggagctctgccttagacgacgtgttacagtatgaacacacagcagaggcaccctcgtatgttttgaaagttgccttctgaaagggcacagttttaaggaaaagaaaaagaatgtaaaactatactgacccgttttcagttttaaagggtcgtgagaaactggctggtccaatgggatttacagcaacattttccattgctgaagtgaggtagcagctctcttctgtcagctgaatgttaaggatggggaaaaagaatgcctttaagtttgctcttaatcgtatggaagcttgagctatgtgttggaagtgccctggttaatccatacacaaagacggtacataatcctacaggtttaaatgtacataaaaatatagtttggaattctttgctctactgtttacattgcagattgctataatttcaaggagtgagattataaataaaatgatgcactttaggatgtttcctatttttgaaatctgaacatgaatcattcacatgaccaaaaattgtgtttttttaaaaatacatgtctagtctgtcctttaatagctctcttaaataagctatgatattaatcagatcattaccagttagcttttaaagcacatttgtttaagactatgtttttggaaaaatacgctacagaatttttttttaagctacaaataaatgagatgctactaattgttttggaatctgttgtttctgccaaaggtaaattaactaaagatttattcaggaatccccatttgaatttgtatgattcaataaaagaaaacaccaagtaagttatataaaat

SEQ ID NO: 13572 - DNA, 640 bp, Homo sapiens
  SIMILAR (242)..(628): 431254mologous to Homo sapiens GAP-like protein,accession number AF251038,Smith-Waterman Score=230.
  misc_feature (1)...(640): n = a,t,c or g
tttcgtcagctgcctgcagttatcgggaagagcagcctggggaaagttaaaggagcacagatggacagttgctttctgcatgcaagtggccagctaggatccggggggcatcaagccatgatttttatttctgtgctggatgcattagcagctgtgacttggaaggttttatcctgaaggagtggaattgctgcagacgtcttggggttttggtgagcagtagatatttggggacattgtgctgttattgcagagccccacaatgaagatccaggagcatcccagcctatctgacaccaaacagcagagaaatcaagatgccggtgaccaggaggagagctttgtctccgaagtgccccagtcggacctgactgcattgtgtgatgaaaaaaactgggaagagcctatccctgctttctcctcctggcagcgggagaacagtgactctgatgaagcccacctctcgccgcaggctgggcgcctgatccgtcagctgctggacgaagacagcgaccccatgctctctcctcggttctacgcttatgggcagagcaggcaatacctgnatgacacagaagtgcctgcttccgcaccaaactcccattctttcatgaggcggcgaagctcctctctgggtcct

SEQ ID NO: 13573 - DNA, 1704 bp, Homo sapiens
  SIMILAR (139)..(288): 981254mologous to Homo sapiens PRO0813,accession number AF116652,Smith-Waterman Score=259.
atgaagatccaggagcatcccagcctatctgacaccaaacagcagagatatcaagatgccggtgcccaggaggagagctgtgtctccgaagtgccccagtcggacctgactgcattgtgtgatgaaaagaactggaaagggttacttcgtgacaaactgggctcctatgatgtggcattctacctcgctggagtccctccccttattggaggtgctgtgctttgttttatcccgtggatccatagtaagaagcaaagagagatcagtaaaaccactgggaaaagaaaagatggagaaaatgttggaaaaccagaactctctgctgtcaagttcatctggaatgttcaagaaagaatctgactctattatttaatatcttacatacctccaccagactggacttgctttttgaattttaagcaagtttcctttccttttatacaaattgcaaatttcatatttttttaatcacatcctatgaatagcacaataattgggaaatagaacccttatcactagaagaaccattttcctgccactaaatatctctgatgtttccatgagtctgagggcagagactctggtatatgaaaacatgtctgaaagtcacatattgtgaaaatttgaagctatctcagtaaaaagcagctttggaaactgtgaatgatctttagcttgtacaaatgtttaaaaatacctcaggctatactgaaagggttgcagtttggttaggagtggaaatatttggtttggttaatgatgtcttcccagttctgggtacctctggttttactttcttatgctctttggaaactttttgccaaaatttaagcctgggttctagataataccagatctacctaaacctcaagtctatgttaaagttgctttcctgctgttaaataagctatgatattaagatattctgacttgctccagtgtcaagggaccttctgggagcaggtgctaacatagtgttcagaatcaatatgtgagatgaaaaggatcccctccaggaggatcctgagctgttcagaaatcatttaagtttacagcgttgttccctttgcgtttgcagtgcgttttactcaagtagccagaaacaccccacgtttctgaatttgtttaaactgtaacaataaagtaaaatagacacgcatgaaagatattctggcgattgtaacttagaatttttctgacttctggatttgttggcactagaacctgatatttaaacaaagtcttactgagcagctatcaagtggcagttacaggcacaaattggtggaggctggaggatcgggaggggagcaaaaccctttatatttgtgaagaaaatatctgtagctgatagaaataattgcttaaattggtttatgaaattaatgagtctgaaaaggttaaaagcacttataaaaagaaccaagtcctacatttccagaactttctggcaaaaatttgcactcatattatttatcctatgaacattcccattgtttttttttgctatttatatacagattatcataagaaagctctcagtttgaggacccaaaataaaaccaaagtcatgccatgacccatactcatttacaaaaacaagaacactttcctctatccctaaaattatgctttagtacttgaggcctttaaaagttagtgcttttgattgtgaagacattcagcaacttactttgtcataca

SEQ ID NO: 13574 - DNA, 474 bp, Homo sapiens
  SIMILAR (55)..(174): 1001254mologous to Homo sapiens dJ75K24.1 (novel protein similar to SH3BGR (SH3 domain binding glutamic acid-rich protein) and SH3BGRL),accession number AL035700,Smith-Waterman Score=230.
ttggggtgggatggggagtggttatggcccactgagaactaaggcactctgtcagatatcacaatgtcagaagaacagaggcaatggatgtacaaaaacgtccccccggaaaagaaacccactcagggcaaccccctgccacctcagatatttaatggcgaccgatactgtggagtaagtggctagactgttatcatgctgtttctttttattgttcagaacacatgccacctagagtgcccctggagtggaatcaatccttactgtgagcaggattcttccttctctgagaatgtgggtgatgagattctaaaggtaaaggagccaacactttggcttttatgatgaattgtagtgtctgatttggattttagaaagctcaaaggagttgatcaaggtcatagataattcatagtggtttgctggacatcacatccacggttgactaaacatatacaccactcagttttccag

SEQ ID NO: 13575 - DNA, 4630 bp, Homo sapiens
  SIMILAR (470)..(1387): 1001254mologous to Homo sapiens clone 22,accession number AF009424,Smith-Waterman Score=1646.
tttcgtccgccgggagggagccagatcccagcgatcttccccgacggctgtgctttacccataggctgccggcggctcgtaggtgggttcagctctgcgtccacgccagcccggagcccggggggcaaggggtctgtcccgggcgcagcgagaggatggtcatccgcgtgttcatcgcctcttcctcgggcttcgtggcgataaagaagaagcagcaagatgtggttagatttctggaagccaacaagatagagtttgaggaggtggatatcacaatgtcagaagaacagaggcaatggatgtacaaaaacgtccccccggataagaaacccactcagggcaaccccctgccacctcagatatttaaatggcgaccgatactgtggggactatgaccgtctttttgaatccaaggaaagcaacacagtcttttcatttttaggcctgaaaccacggttggcatcaaaggcagaaccttagagaagaagagtggaagatgacggagatgcattttgaagcacccctggtactcagcacacacatgcttacctaatgcatcactgtgacaaaagccacacgcattatcagtaactttgcttgccacggaaaaggtgtttttgaaagatgtggctataatgagaattgcatgattgctttaaaccaaatcaggtggtggattttttttttcttattctatttgcctgcagttgcctcactcacctggaaataccgtcacctgttacaggtgtactttcttaatgactgaaagataagtgggtagcaccgtcagagagaaaatgttggatctgccctaggttatagtagatgccggaattgcgtaaacccacttctctttaagctgcctggattgcacctttgaaatatgtctgccaagttgttagaatctttgaatcagaaggaaaaaaagcagcgctggttgacaaagggtgttgaagatttttgctgcagaatcagttacaaacatcacagttcccatgctttgtaataacacctggtgaaaaagttagatattctagacttgttttagtaatggaaactcttacctccacatattatcctacagatgtttccagaaatccctgttgtaacatcaagtgatcagaactaagttactgggatgacaataattgctatttgaaatatatgcttctttatttcttgcaaggggcaagtttcacccaaatgcctgagactgcttgaaagatatattttaagtggtgcactaattagtgaatatataggaaaattatctgacgagtatctgaaggcattttcagctctagcaatttatttataatatataagttcatatattttttaatccagctcccctaacagacagctgctgcttctattttgtgaagggactatattttttgagaaaggaaaatctcagttagatatattttgtgaacccttgattagacatattaaaatataccaatgttgtagtaaaatttaatttttccttttgttacttttcatttgcctctaattttgcttgctcatatttctggccaatgtacagcctcatatttttcagagtaatacagatacttgttctcattccgtatatgagcacaagtaaggtttcagagcaacacacatgagaaagagagtaacccggaattgtacttgtcaagcaaaatctatactcctattggagtggatgctgatgaacatcgaacatatctacttcattagagcagaggctatttttctgcattcttgtccctataacagggatgcttaattttttttttaacttagagttttaaattgccaaacatgggaacagccttgaataggataaattttcagagggctgcctaaaatattttatttctagcatcctgattctggacttttcattataattctgagcaggaaatttataagaaattgaaagagcagaagaattacagccctgtcacatgtgcccagcactccgccccatgccttgctaaatgtagactaaagaacttgttgaatgctaaggctgaaatcccaacctgagatttgtagtccaggattacaaccagaaggaaagtatgacagatttctacttaactagaatggacacatgatccacaattttctcttcaagggaagctgttgtcaaattatggatattactggttagttgtcattaagtaagatccaggtcaaattccatttgacaaatcccagggactatccaggaatttttttttaactggatattgtgtttgagtatgtgagtcttctgataaaactcagaatttctttttaagcagttgtaaaaattgtcatgttgtaattcattactcagctaacatttagtctactcttgctagtgagtgccaagaaccaacttggtaaggttgaggctttgcaagttaactgctggggttataggatcaataccatacttgctagacaaagctacccagatttgtcttatattataatttttgagttaaccgtagtatacctattatgattatagtaaacagactagtgggtagtaatgctaaattaccatcacagttatgtgccatctccccaccccatttttttttttttttttttgatcagcaaagaaatacaggagaccagtctcgagtggtgctgtacttgttatgagtgaggcagcagcacagtgtgtggcatttacatggtacccaggctccacagagtaccaagatgttgccctctgggaccacacttagctcagagaatatggggtccttacttgtattcttttatcagctgattttgaaacatataataatgattttcttgttcccttctttaactagctgcctttagattttgataatcacagtcttaaaatactaggaaagaagtggatgggaattgtaggcatagatttcatatcaagggcatttcaagacagaatttttatttcctgtagtaggcttgctggagcaaaggaaatgtgctgctaaaaatcaacttatgccattttaaaattagataaaatatggagtgccatcctgctaggtgagtacagaccagaagaaaatttagttgggaaaatacttgtttttccaaattccggtgttttattacaatcaaagaagaggaaagcaaggtattttttcacctcagattctaatatattctagatttgtttctgttttatagatttaattcaatacctccacatagatgtttttatattacatgaatttaataataaactaaacttttttttgtctcccgttattgaaaagtaccaaagcttctttctgttgtgtttgattttactataggggttttgctttttctagagatacttttcatttaacagcttttgttaagtgtcaggctgcactttgctccatataattattgttttcagatttcaacttgtatgtgtttgtctcttaaagcattggtgaaatcacatattttatattcagcataaaggagaataaattccagaaaacacatattctgaaaatggagtgtttgttccctgccatttttcacacctctcttaattttagttctgtttagttgagaggctgtgattttactcttgcctgtgaacctcatgcatgaaagcagcacattaaattgtaaaaatacaaacagatcgtgtgatcattcaaggagccagacatgaggtcctgcacgagggtgttgggaggacaccacagattcatctcagacagtgatcaggactgaggatggagttaaatcactcagcccctgggtggggtggggtggttcaaatggatgactgatctcctgagtacactgaagccacaggctggtggccatgttctctgaattgggtgcagaagacaagggcagagtggctgcggcccctattacctttgtagcagccacatcagaaagcagaagaaaacagtatttctgaaggcattgtttgaggttgatctcagcactgaacgatttcaagccctacgcaccagaacagaaggagggtggaggaagtgatcagagggaacgagctgtaggtttgcagaaatgtgtgaaaccaaaatgatcactgcctacttgtgattcaaatcttcagagttttcctagttcttctagaaatacatgtcaggtttgtttgttcatcctttctgtcagcatggatcaagcccctaaaatgtggtaagtgttgtcagagcagggcaatatctctactctcaagtatgaggggaatagaaacaaagcagcagttttagccagggttcaatgatagagtggaggtaaattaagagcctccaggctgtgattcaccatttgagacattatacataatttgtttttgttataagccatttgaatttttaaaaaatttcatacatgcaatggaatatagatatgtatatacacatataatatatatgctaaagtataaagagtaataataatgacaataaacaaacccctgtgtgcctaccacccaccttattgcctttcctttgaggtaccgtgtgcggtttcctgaacctatctctatccctgtctgatagagggaacccctgtactgaactttgtgttgaccatagccttcttgtctttcatcactttatctccatgtatgtatccttaaagaataataaatggaattaaactgaatgta

SEQ ID NO: 13576 - DNA, 1587 bp, Homo sapiens; identical to SEQ ID NO: 8372
  SIMILAR (1291)..(1584): 901254mologous to Homo sapiens p40,accession number U93570,Smith-Waterman Score=441.

SEQ ID NO: 13577 - DNA, 1380 bp, Homo sapiens
  SIMILAR (1108)..(1239): 1001254mologous to Homo sapiens GK004,accession number AF284752,Smith-Waterman Score=219.
atgccggaatcgcaaccacactgcgcctcgctcactcgcgccgcgctctactcaaccggctcgcaacaaggctctgcttcgcacaagcgctccgatcgcgcggacacatcacaggcttcgccactcccaaggctcttccaaacccgccccacaccgctccttacaccgacacgcgctcctctctccgcccgcctcgcgcactcgtgccgctcgcccgccacccggctccgcaacgctctcctcgcccgactcgcctcgcgagctcctcgactcgccgcgctctcgcgactcgcctcgcacaaccaactctcacccctcaccacacctaacactcgccctctgcgcctctctatcactcgcgaacaccgctgccgaacctcgacgtcgcactactgcctgctctctccgctcctcgtcctaaacacgagaagcctcgcctgtctaccccacctcgacaagccgccccgaccacacgctccgcgaccaactccccccacccactcgctcacacgatcccgcactcactctaactctcagcgagcaccgctcgcacccgtctccatcagcgcagctagtgctccctgtccacgactcccctgccacgcggctaaccgaccacgactccgaactctccctccaccgcaccacaccacactcttcctcgcggcgcctatgctcgaagctccgaccccacctctgccagcaaccgacagcacaaccccaccaacacagcccgatcacggaaggacctgcgcaatccgctgtctctttaacgagtcgagcatccgcccacattctgtgtccggctgctctcccagaacctggtgcactgacaaggccaggctgtcggtcacgcccacatcccacgaactgccctgcgctgcgtgcgttcatggcgatgttggacgtcaagggaatttgaagaatctccaggagggccagagagtagacttggatgccacccagccagcaatagagaagttgggaccacccagccagggacaaggccacacctcagccatcaccacccacaagcaacgcagcatgtatgagctgggacaggacaccagaaactacctcatgattgctccggaagaagcagctgcagaatatacaaagacaaaaggagattctgatgaagaagttattcaagatggagtcagagtattcatcgaaaagaaagcccagctaacacttttaggaacagaaatggactatgttgaagacaaattatccagcactcacaacgtcaccgcatttgcaaacacgatcctcaccaggcaattcagccaaaacacggactccgctaacccaacttcgccccgcgcgtccacaaccaacaggacaccggacacccccaccaccacgcacatcgcctga

SEQ ID NO: 13578 - DNA, 1218 bp, Homo sapiens
  SIMILAR (193)..(327): 671254mologous to Homo sapiens GK004,accession number AF284752,Smith-Waterman Score=133.
atgcagaatgccattgatgggctcattagtagactggctatggctgaggacagaatgtccgagcttgaggatatctcaacagaacgttccaaacctgaaaaatcaagagaaaaaaggccaggtacgtttacacaaatacttaccattgtgtcagaactgtgcacagtattcagcacagtcacgtgcagtacaggagtcagagtattcatcgaaaagaaagcacagctaacacttttaggaacagaaatggactatgttgaagacaaattatccatcctagctgctgattctccacacagccctggagagaccatctcaggtgtctctcatctccctggctttgctagcctctttttcctccttgttccccatgagggtcatccatcccccaagcaggttcctcatgtccttaggacgagagcattatcactacctggagtgcttttccctctgtcatctgagcttttatgtgaacctcctccaagaaggttctcagctgttcactcaggcacagtagtgagcactgactctccactagccctgagctttcacaggtcatcaaagacagtcccaacctcagagagcttcaagtcggcaaatgagacaccagcgaagagcatcgatcaccatgttctggttgttatatcagcagtagtaaattgcattccctgtcaatcaatcgtgttgtcaattcaccctctgacaactaaagcagaaggcctaaaattactgagtgcctactctgtgccagctgccatgtcagacaagcggctcccctgggaagacagccagactcaaggaagtccccaaaatatcttgagtttcttggacctgtcagaaagtaacattctttacttattgcaagttcaggaaccttgtaaagaaactgtagacaagataccaggccagtctttccaaagggctttttatcagctgcataaagtcaaccatgattcctcaaagcagtctgctcatatccaaaattatgtcattccagtcaaagtcttgtgcagacaaatggaaatctctggagaatcctaccagctcaggaaaaacctaaacatactcatcacatcaagggaccctcccacaaagggttcacccaaagtccgtgagtcccaccaatgcgtgcagagcctcctgccagcttttgagcacttcactcttactgagcagatgaccaatgatccccagaccgtcagaggactgcctctataa

SEQ ID NO: 13579 - DNA, 749 bp, Homo sapiens
  SIMILAR (470)..(1333): 1001254mologous to Homo sapiens clone 22,accession number AF009425,Smith-Waterman Score=1547.
agagaagctgaggcggccgaccttcggtccgaggcaccggggcgccgggacggcgaagatgtcggcttccttagttccgggcaactgtccgggctgtgtagcaagaggaagctgcagcccacccgggcagccctcaccctgacaccttcagcagtaaacaagataaaacaacttcttaaagaataaccctgagcatgtaggtgtaaaagttggtgtccgaaccaggggctgtaatggcctttcttatactctagaatatacaaagacaaaaggagattctgatgaagaagttattcaagatggagtcagagtattcatcgaaaagtaaagcacagctaacacttttatgaacagaaatggactatgttgaagacaaattatccaagggggttggggtccattaccccaaacatcaaagggacttgtggctgtggagaaagctttaatatttgaaatctcaggactcttctggccgtaggttccaggaaagctcgtggaagctttggggctcactgcagaaatcatgtgactgtcacgtgctggaaaataaagtgatacatcttgaaaatgaatccagtgtgttggattccagaagaaatgatatttatattctcctataggggacagaaaatgagaagccatcactcttttttggatcatttaggtctcttgtatcctttgttttagaaccagtttcattaaagttgccttcctgggcacctgtttatccaaaaaaaaaaaaaaaaaaa

SEQ ID NO: 13580 - DNA, 764 bp, Homo sapiens
  SIMILAR (78)..(389): 321254mologous to porcine adenovirus 3 163R*,accession number AF247039,Smith-Waterman Score=99.
atgtctccgggaatcgcccacacgagcccggggccgccctctccttccggcggcggccgcgcggagcccgcttcccccggacaccgcccccaaagtgcccgcgtggccccgcgactcagccgccccaagttcgcccgtggccgctcagccgcgaaagtgtcccgcacttggcggaccgggagtggcgaccgtccgctccggtacgtactcagccagcggctgcagcggtcttggcgcgctctccccgaggactgctcagccccaactccgaagcgacggcccccggctctccctcctctggcggctgcaggagccgggacgcccccgctaacatcaaagggggaagggaaggtgtacagaagcatgctgagatgattcgagatggaagatgcacgttggcattaaatagcagtaaaccacatactgaacaagctattcccttttcaattctttcagtccttcgaaggaggaaatttaaattggtgccagtctacactgcagccaaaggacccagcagctggagtaccctccatcatgagggtggatggaggattttgtttgtttccttgacaaagatgcaagcatctcccaagtgtgggctccagacctgccttgatcatctccactcaaagctgccctcaccccttccccaggctgcccagatgcttctgtccagatcctctgagcaccaagcagttacacaaggcccctctgtgtggcttattgtcgccttccactcccactcacatactgtggatggatag

SEQ ID NO: 13581 - DNA, 309 bp, Homo sapiens
  SIMILAR (112)..(306): 901254mologous to Homo sapiens dJ794I6.3 (putative oncogene protein),accession number AL109976,Smith-Waterman Score=325.
atgggcggccgggcagaggcgctcctcacctcccagacgatgggcggccgggcagaggtgctcctcacctcccagacgatgggtggccgggcagaggcactcctcacttctcagatgatgggcggccgggcagagggccggatcgtggcacccagaggctgccaggactttggctgggacccctgctttcagcctgatggatatgagcagacgtacgcagagatgcctaaggcggagaagaacgctgtctcccatcgcttccgggccctgctggagctgcaggagtactttggcagtttggcagcttga

SEQ ID NO: 13582 - DNA, 2802 bp, Homo sapiens; identical to SEQ ID NO: 12552
  SIMILAR (1)..(1590): 941254mologous to Homo sapiens putative p150,accession number U93563,Smith-Waterman Score=2519.

SEQ ID NO: 13583 - DNA, 912 bp, Homo sapiens
  SIMILAR (1798)..(3312): 601254mologous to Sus scrofa domestica submaxillary apomucin,accession number AF005273,Smith-Waterman Score=1481.
  misc_feature (1)...(912): n = a,t,c or g
acagaaaattgacctgccggagtaccagggggagccggatgagatttccatacagaaatgtcaggaggcagttcgccaggtacaggggcccgtgctggttgaggacacttgtctgtgcttcaatgcccttggagggctccccggcccctacataaaggtggtttctggagaagttaaagcctcgaaggtctccaccagttcctggccggggtcgaaggcaagtcaagcctatgcgctctgcacgtttgcactcagcaccggggacccaagccagcccgtgcgcctgttcaggggccggacctcgggccggattcgtggcacccagagcttgccaggactttggctgggactccctgctttcagcctgatggatatgagcagacgtacgcagagatgcctaaggcggagaagaacgctgttctcccatcgcttccgggcccctgctggaagctgcaggagtactttggcaagtttggccagcttgacttctgcaagctggaggcaggccccttcaggcgncgcgatctggggcagggctaagcccaaaaccttcccgcatcgggcaaggcaccccctgaaagtacttccttcagggtttccccatttgtgagggtgtcgagtagcctcaacgggcctgtcttggaaggagcagctggctcttgctctgagaaactctggcaagtgggacgccattctcttgccccttaggagttcacttgctctctcctacagccgccaggcctggggtcctgaaaggaccttgggtggtaaagctgtacttggtgggagtgagggcgtggggaggaaccatgcaaatcgccttccatggtttttaaatgcagtaaataacatttctggatgagacttgtttccaaaataaaccagctatatctgttttgaaaaaaaaaaaaa

SEQ ID NO: 13584 - DNA, 650 bp, Homo sapiens
  SIMILAR (153)..(308): 901254mologous to Plasmid F 96 pct identical to gp:AB021078_30,accession number AP001918,Smith-Waterman Score=269.
tggtgaagaagtcctggtccccgaggtggccgcgaaagtggtacttgtcggccagctgctgcacctgcgccggctccagcaggcggctgtagagcggggactggcgcatggcctccaggttcagcaacatcaccccggctgttgaagcccggcagcccctcggggggcgggcccccaaccggggtctgggggttctcatggcggaactgccagaatgtgtgcctgtaaactggctgcatctcccgggctatgccgatgatggcgcctggcaggaaactgtcaaattcctcaaacaactcccggatgttggtcttaaacttcaggtctaggtccagctgaatgatctgcaggatctctttgggcatgatctgatgcatggcgaccgagaggaagaagatggagtcactgtagtaggttcccaagccagcactgaagtgcttctgcatggcctccacgatggggaagagcttatccgtcagcacagcaacatcgtggaagatgaccgtggcagacttccccttggacccggctgccgtgccgggatggagcctgaacctcagggagagcccacgtgagctcatcaggatgacagctctgctaagcgcgttgccgcggccagcagggactgctgcgacctgtgtagccatcat

SEQ ID NO: 13585 - DNA, 415 bp, Homo sapiens
  SIMILAR (88)..(285): 831254mologous to multiple sclerosis associated retrovirus polyprotein,accession number AF009668,Smith-Waterman Score=284.
tttcgtcctgtttcgaattgctgcttgctgccccttgggctggggataatggaagttctttcccttcccaactctttccagacccaagcactctgggactcactccatagtccaggagttccaggttccgtgtttcacttcaagcccactacggtggtgacaagctgccagccgaagaatccaagagaactacatagaaggcggaagttggaccctgggaagatgcatgccaaaatctggttaatgaagacgtcgctcaggagcgggagggccgctctgcgagagctccgaagccgtgagaacttcctcagcaagctcaaccgggagctgatcgagaccatccaggagatggagaacagcacgaccctgcacgtgcgggccctgctgcagcagcaggacaccttggcgaccatca

SEQ ID NO: 13586 - DNA, 550 bp, Homo sapiens
  SIMILAR (285)..(58): 791254mologous to Homo sapiens dJ1103G7.2 (novel protein),accession number AL034548,Smith-Waterman Score=305.
acccagaaagaagggaagagagcaggaggggagggcggcccatggcactgccatctagaagggtagtggctcttccacaggaatgttgaggatgacatccatgtctggggtgcacttgggtctccgaagcagaacatcctcaaatatgacctctcggggttcccgggtctgggcttggagctcttccacctcggcccttaatacaggcatgttctcctcaaactggtcaataaactgagaggaaaggcacagcaggggagaagggagaagccaaatggcccccaaccaaagggagaaaggccaaaatgaacgaggagcaaagctatctggggaaatggtatgggttctgtcactgggacttgctggactccagagaggggacttccccatgcaaggtgcggctggcttccaagttagtgacaatattcagtggtgctgaaacaggtgagggatcatggagaatggagacaggttacaaagtggcggggaatgctcaatcgtgggaatgaatggaggctggcagagatagtgaagggcatgcccattaaaa

SEQ ID NO: 13587 - DNA, 402 bp, Homo sapiens
  SIMILAR (319)..(146): 961254mologous to Homo sapiens dJ1103G7.2 (novel protein),accession number AL034548,Smith-Waterman Score=300.
ttttttttttttttacttgcaatttgggcattgtttattacatcagttagcctaccctaatataagtggtgtcaccaagagccaaaagcagccactctatcctgtctccaacccccacaccagctcccaggtgcctccgcccacctggttggaccctagtcaaagtcttcattttgcttgtatgaaggctgttggcttgttggactggaggcagagtagatggcttggtttcctgcttggactgctgccatggaacataatccggaacctggaactcctggactatggagtgagtcccagagtgcttgggtctggaaagagttgggaagggaaagaacttccattatccccagcccaaggggagtcaagcagcaattcgaaacaggatgtcgacgcggccgc

SEQ ID NO: 13588 - DNA, 1561 bp, Homo sapiens
  SIMILAR (524)..(1213): 991254mologous to Homo sapiens dJ1103G7.2 (novel protein),accession number AL034548,Smith-Waterman Score=1153.
tttcgtcccactcccgcggggctattgtccccggtaaactgcagtttctggttcgagactccaatcctgcttcgaattgctgcttgctgccccttgggctggggataatggaagttctttcccttcccaactctttccagacccaagcactctgggactcactccatagtccaggagttccaggttccggattatgttccatggcagcagtccaagcaggaaaccaagccatctactctgcctccagtccaacaagccaacagccttcatacaagcaaaatgaagactttgactagggtccaaccagtgtttcacttcaagcccactacggtggtgacaagctgccagccgaagaatccaagagaacttacattagaaggcggaagttggaccctgggaagatgcatgccaaaatctgggttaatgaagacgtcgctcaggagcgggagggccgctctgcgagagctccgaagccgtgagaacttcctcagcaagctcaaccgggagctgatcgagaccatccagggagatggagaacagcacgaccctgcacgtgcgggccctgctgcagcagcaggacaccctggcgaccatcatcgacatcttggagtactcaaacaagaagaggctgcagcaattgaaatctgagcttcaggagtgggaagaaaagaagaaatgcaagatgagctatcttgagcagcaggcagagcagctgaatgccaagattgagaagacccaggaggaagtgaacttcctgagcacttacatggaccatgagtattccatcaagtctgtccagatctccactcttatgcgccagctgcagcaggttaaggacagccagcaggatgagctggatgacctcggtgagatgcgcagaaaggtcctggaatccttgtctgacaagattcagaagaagaagaaaaaaattctgagttctgtggtggcggaaacccagcgtccctatgaagaggctctcctacagaagatgtgggaaagccaggacttcctgaaatgcatgcaaaggttcagagaaattattgaccagtttgaggagaacatgcctgtattaagggccgaggtggaagagctccaagcccagacccgggaaccccgagaggtcatatttgaggatgttctgcttcggagacccaagtgcaccccagacatggatgtcatcctcaacattcctgtggaagagccactacccttctagattggcagtgccatgggccgccctcccctcctgctctcttcccagcacctggagccttggatcatttacttccaggaccggatctccattcagaccctgatctacagtctccctgctccctctgcccttcctccctctttctttccctccctccctccatcccttcttccccccttcccttccctcctccttccttcctcctctccctccctccctcctttctttcttcctgtggttttttcctctcttcttcccttctttctggttggtgctgctgggccaggtgggaatttctgattaaatctgctattccttttttaccaataaagctggatttacatttaa

SEQ ID NO: 13589 - DNA, 606 bp, Homo sapiens
  SIMILAR (1)..(432): 1001254mologous to Cloning vector pZC320 SopA,accession number U26464,Smith-Waterman Score=766.
atggaaattcgaggacgggttgagcaacgtgttggttatacaattgaacaaattaatcatatgcgtgatgtgtttggtacgcgattgcgacgtgctgaagacgtatttccaccggtgatcggggttgctgcccataaaggtggcgtttacaaaacctcagtttctgttcatcttgctcaggatctggctctgaaggggctacgtgttttgctcgtggaaggtaacgacccccagggaacagcctcaatgtatcacggatgggtaccagatcttcatattcatgcagaagacactctcctgcctttctatcttggggaaaaggacgatgtcacttatgcaataaagcccacttgctggccggggcttgacattattccttcctgtctggctctgcaccgtattgaaactgagttaatgggcaaatttgatgaagtgccgcaagccaaaggcaacaatgtggttatcacaagctacatgacaaacagaggcttcttcgaggataaaaaggcaacatttgcgccaagcttcttaatgaacatcaaaggcaataaaacatccgttgtcaaaaacagcatcctggagcaaggacagctgacagtcaactaa

SEQ ID NO: 13590 - DNA, 2835 bp, Homo sapiens
  SIMILAR (1897)..(1406): 601254mologous to Homo sapiens Novel retinoblastoma interacting protein 115392*,accession number Y06604,Smith-Waterman Score=412.
  misc_feature (1)...(2835): n = a,t,c or g
atgcagttttctttattgtggcctttcgtgcatgcctcgcagttgactctagaggatccccgcataaacgctggtcatgaaatgacgaaggctatcgccattgcacagtttaatgatgacagcccggaagcgaggaaaataacccggcgctggagaataggtgaagcagcggatttagttggggtttcttctcaggctatcagagatgccgagaaagcagggcgactaccgcacccggatatggaaattcgaggacgggttgagcaacgtgttggttatacaattgaacaaattaatcatatgcgtgatgtgtttggtacgcgattgcgacgtgctgaagacgtatttccaccggtgatcggggttgctgcccataaaggtggcgtttacaaaacctcagtttctgttcatcttgctcaggatctggctctgaaggggctacgtgttttgctcgtggaaggtaacgacccccagggaacagcctcaatgtatcacggatgggtaccagatcttcatattcatgcagaagacactctcctgcctttctatcttggggaaaaggacgatgtcacttatgcaataaagcccacttgctggccggggcttgacattattccttcctgtctggctctgcaccgtattgaaactgagttaatgggcaaatttgatgaaggtaaactgcccaccgatccacacctgatgctccgactgggcattgaaactgttgctcatgactatgatgtcctagttattgacagcccgcctaacctgggtatcggcacgattaatgtcgtgcctgtgcagtcctggttcgatgacatgacggacacggagctgctggacctcatccccttctttgagggcctgagccgggaggacgacgtgtacagcatgctgcacagactctgcaatagaggatccccgacactgttaatacctcacactcatgagaatggctactataaaaaacaaacaaacaaacaaacaaaaacagaagataacaagtgtgatgaggatgtggagacactgaaacccctgtgcactgttggtgggaatgctgtggaaaacagtatggagcgctacgagcacgccatagtgactggcgatgctgtcggaatggacgatatcccgcaagaggcccggcagtaccggcataaccaagcctatgcctacagcatccagggtgacggtgccgaggatgacgatgagcgcattgttagtttctagggggtcttcatcaaatttgcccattaactcagtttcaatacggtgcagagccagacaggaaggaataatgtcaagccccggccagcaagtgggctttattgcataagtgacatcgtccttttccccaagatagaaaggcaggagagtgtcttctgcatgaatatgaagatctggtacccatccgtgatacattgaggctgttccctgggggtcgttaccttccacgagcaaaacacgtagccccttcagagccagatcctgagcaagatgaacagaaactgaggttttgtaaacgccacctttatgggcagcaaccccgatcaccggtggaaatacgtcttcagcacgtcgcaatcgcgtaccaaacacatcacgcatatgattaatttgttcaattgtataaccaacacgttgctcaacccgtcctcgaatttccatatccgggtgcggtagtcgccctgctttctcggcatctctgatagcctgagaagaaaccccaactaaatccgctgcttcacctattctccagcgccgggttattttcctcgcttccgggctgtcatcataagggggttctttagagtccccaacaggctttaagctcaggttggcaagccactgcaggaagcggcggcggaagtcaggcatacgctggtaactttgaggcagctggtaacgctctatgatccagtcgattttcagagagacgatgcctgagccatccggcttacgatactgacacagagctgtttcctctttaccaacttcatccgtttcacgtacaacattttttagaaccatgcttccccaggcatcccgaatttgctcctccatccacggggactgagagccattactattgctgtatttggtaagcaaaatacgtacatcaggctcgaaccctttaagatcaacgttcttgagcagatcacgaagcatatcgaaaaactgcagtgcggaggtgtagtcaaacaactcagcaggcgtgggaacaatcagcacatcagcagcacatacgacattaatcgtgccgatacccaggttaggcgcgctgtcaataactatgacatcatagtcatgagcaacagtttcaatggccagtcggagcatcaggtgtggatcggtgggcagtttaccttcatcaaatttgcccattaactcagttggggattctncttcatcaaatttgcccattaactcagtttcaatacggtgcagagccagacaggaaggaataatgtcaagccccggccagcaagtgggctttattgcataagtgacatcgtccttttccccaagatagaaaggcaggagagtgtcttctgcatgaatatgaagatctggtacccatccgtgatacattgaggctgttccctgggggtcgttaccttccacgagcaaaacacgtagccccttcagagccagatcctgagcaagatgaacagaaactgaggttttgtaaacgccacctttatgggcagcaaccccgatcaccggtggaaatacgtcttcagcacgtcgcaatcgcgtaccaaacacatcacgcatatgattaatttgttcaattgtataaccaacacgttgctcaacccgtcctcgaatttccat

SEQ ID NO: 13591 - DNA, 1182 bp, Homo sapiens
  SIMILAR (2)..(406): 661254mologous to Homo sapiens splicing factor,accession number L10910,Smith-Waterman Score=401.
atggcgactacgcaactggatatgatattcgagcacggaattaatcatatgcgtgatgtgtttggtacgcgattgcgacgtgctgaagacgtatttccaccggtgatcggggttgctgcccataaaggtggcgtttacaaaacatcagtttctgttcatcttgcgcaggatctggctctgaaggggctacgtgttttgctcgtggaaggtaacgacccccagggaacagcctcaatgtatcgcggatgggtaccagatcttcatattcatgcagaagacactctcctgcctttctatcttggggaaaaggacgatgtcacttatgcaataaagcccacttgctgtccggggcttgacattattccttcctgtctggctctgcaccgtattgaaactgagttaatgggcagatttgatgaagaaccacaaggcctatctacatgtgctggatcaaacagggatctggggcatgtgctgattccctgtttgatacatgtgctagtaccaaacaaggaactggggagcccagcagaaagaaagggtcatcaacaagcatacaactgggatacttgccaaagttttgaaactatgaaggtgaaaaattgtgcttataatgctaaactaagagtgaaggacgtgaagcttggtaatttagaaattgaaaaacttattccttatatggacctagaaaaacactatgtgtcttaccaacagatgttcaccatttatcattttcttttgttccttaaagcaatggcagattgtccttctagcatacagctgctttgtgaccatggggcctctgtgaatgccaaagatgtagacgggcggacaccacttgttctggctactcagatgagtaggccaacaatatgtcaactgctgatagatagaggagcggatgttaattccagagacaaacaaaacagaactgccctcatgctaggttgcgaatatggttgcagagatgcagtagaagtcttaattaaaaatggtgctgatataagcttgctggatgcgcttggccatgatagttcttactatgcaagaattggtgacaatctggacattctaaccttgttgaagactgcatcggaaaataccaacaaagttaatcaagcccgtgtagattctggatacttagatcatgaggtcctatcaagatactatcacttagcttga

SEQ ID NO: 13592 - DNA, 413 bp, Homo sapiens
  SIMILAR (8)..(412): 821254mologous to Homo sapiens ribosomal protein L21,accession number X89401,Smith-Waterman Score=584.
cgccacaatgacgattacaaagggaaacaagacaggcaccccatataagtactctacgtcttttagaagacacggagttgttcctttggccacatatatgccaaactataagaaaggtgatattgttgacatcaagggaatgggtactgctcaaaaaggaatgccccacaagtgttaccatggcaaaactggaagagtctacaatgttacccagcatgctgttggcattgttgtaaacaaacaagataagggcacgattcttgccaagagaattaatgcgcgtattgagcacattaagcactctaagagccgagatagcttcctgaaacgtgtgaaggaaaatgatcagaatatgaaagaagccccagagaaagggtcctgggatcaactaaagcgccagccttgctcaccca

SEQ ID NO: 13593 - DNA, 464 bp, Homo sapiens; identical to SEQ ID NO: 12760
  SIMILAR (233)..(358): 921254mologous to Homo sapiens ribosomal protein L21,accession number X89401,Smith-Waterman Score=209.
  misc_feature (1)...(464): n = a,t,c or g

SEQ ID NO: 13594 - DNA, 1038 bp, Homo sapiens; identical to SEQ ID NO: 6439
  SIMILAR (841)..(1749): 851254mologous to Homo sapiens bA353C18.3.2 (splicing factor CC1.3, isoform 2 (CC1.4)),accession number AL357374,Smith-Waterman Score=1290.

SEQ ID NO: 13595 - DNA, 629 bp, Homo sapiens
  SIMILAR (121)..(507): 951254mologous to Homo sapiens Human receptor molecule (REC) encoded by Incyte clone 965938,accession number Y32196,Smith- Waterman Score=663.
tgggcctttcggccggaaccgccatcttccagtaattcgccaaaatgacggaccacaaaggggaaagaggagaggcaccccgaaatatgtcttctaggcccttttagaaaaccatggaggtggtcctcttgggcccccatatatgccgcatctcataggaaaggtgatattgtagacactcaagggaatggggtactgttcaaaacggaatgccccaccaagtgttaccatggcaaaactggaagagtctacaatgttacccagcatgctgtttggcattgttgtaaacaaacgaagttaagggcaagattcttgccaagacgaattaatgtgcgtattgagcacatttaagcactctaagagcccgagataagcttccctgaaaccgttttgaaggaaaatgatcaggaaaaagaaagaagcccaaagaagaaaggtacctggggttccaacttaaagcgccaccctgctccaccccagaagaagcacactttgtgaagaaccaatgggaaggagcctgagcttgctggaacctattccctatgaatttcatgggcataattaggtgttaaagaaataaaataaaagacctctggactatttaaaaaaaaaaaaaaaaaaaggccagg

SEQ ID NO: 13596 - DNA, 411 bp, Homo sapiens
  SIMILAR (68)..(184): 1001254mologous to Homo sapiens Human secreted protein, SEQ ID NO: 4383,accession number G00302,Smith-Waterman Score=222.
gagcacctgggttggtcccgaagcctccaaccacctggacgcctggcagggcctctctggggcagccatgaagtccctcgtcctgctcctttgtcttgctcagctctggggctgccactcagccccacatggcccagggctgatttatagacaaccgaactgcgatgatccagaaactgaggaatataaagaagcacgtttagtactggattcagtgaagttagaagcctgaaacttttctcgtatggggtgggttttgcattaaatcctggggtccattttacaatccattatttttgaccactgctatgtgttcaagtagtatgagaatgtgattggttttatctggttacatatatatttctttggctaatttaatatgtcaaataaatgagttcatctaaaaaaaaa

SEQ ID NO: 13597 - DNA, 663 bp, Homo sapiens
  SIMILAR (327)..(473): 491254mologous to Human endogenous retrovirus K pol protein,accession number Y17833,Smith-Waterman Score=110.
cccacgcgtacgtggacgcgtgggcggataccccggctctccgcccctccttctcgcggcgctcgagggaccatggccgatcctcgcgtgagacagatcaagatcaagaccggcgtgggtgaagcggttggtcagaagaaaaagtgttgtatgaaaaagagccaaaacaaccaagaagaaaagattgaaaaaatgagagctgaagacggtgaaaattatgacattaaaaagcaggcagagatccttacaagaatccaggatgatgatcccagattgccagcgcaggttggaagccgcatatttggatcttcaacggatactagaaaatgaaaaagacttggaaagaagctgaggaatataaagaagcacgtttagtactggattcagtgaagttagaagcctgaaacttttctcgtatggggtggtttttgcattaaatcctggggtccattttacaatccattatttttgaccactgctatgtgttcaagtagtatgagaatgtgattgtttttatctggttacatatatatttctttgtctaatttaatatgtcaaataaaatgagttcatctaataaaattgtgtattttatactgtaaaaaaaaaaataaaggtgtggcgtatagtgagtcggtcgcgcggccgcaatttagtagtgta

SEQ ID NO: 13598 - DNA, 436 bp, Homo sapiens
  SIMILAR (5)..(424): 531254mologous to Geochelone carbonaria alpha-D chain hemoglobin,accession number AF304335,Smith-Waterman Score=395.
ctactactggcctgccgcagcatggactgttacctggccattgtccatgccacacgcacactgacccagcagcgccacttggtcaagttcatatgtctgggtttgaggaacctgttcctgttactgtccctacgcatcttgcttttccgaaggaccttctacccatccaatgttagcccagtctgctatgaggacatgggcaacaatacagcaaactggtggatgctgttacggatcctgccccagtcctttggcttcatcgtgccgctgcgatcatgctgttctgctacagattcaccctgcatacgctgtttaaggcccatatggggcagaagcactggaccatgtgggtcatctttgctgatgtcctcattatcctgctctgctggctgccctacaacctggtcctgcttgcggacaccataatgggaaccca

SEQ ID NO: 13599 - DNA, 897 bp, Homo sapiens
  SIMILAR (313)..(693): 891254mologous to Gorilla gorilla interleukin-8 receptor type B,accession number X91114,Smith-Waterman Score=582.
atggtgtacgagaaaggcctgaccgtcaaagttggaggatggaaggagacaaggctcactcgctgccttcttctgggaaaccagcttcttgccagccacagctgctactcccaccaccagccaccactcctgtcctgggaatcccttgtcccagacacccacctcattcagtggctcctctacaggaaagctgagtcagccactgtcaccgatgtctacctgctgaccctggccttggccgacctgttcttttccctgacattgcccatcttggctgcctccaagatgaatggctggatttttggcacaatctgtgccagattcaccctgcatacgctgtttaaggcccatatggggcagaagcactggaccatgtgggtcatctttgctgttgtcctcattttcctgctctgctggctgccctacaacctggtcctgctggcagacaccctcatgggaacccagatgaccaatgagacctgtgagcgccgcaacgacatcaaccaggccctggatgccactgagattctgggcatccttcacagctacctcaatcccctcatctacgccttcattggccagaagttttgccatggacttctcaagattatagccatacacggcttgatcagcaaggactccctgcccaaagacagcaggccttcctttgttggctcttcttcagggcacacttccactactctctaagacctcttgcctaagtgcagtcccgtggggttcctcccttctcttcacagtcacattccaagcctcatgtccactagctcttcttggtctcagtgtcagtgcagcccccactgtggtcgcaggaagcagaggaggccacgttcttactagtttcccttgcatgatatagaaagcctgccctggtacccc

SEQ ID NO: 13600 - DNA, 2785 bp, Homo sapiens
  SIMILAR (14)..(226): 971254mologous to Homo sapiens glyceraldehyde 3-phosphate dehydrogenase (EC 1.2.1.12),accession number J02642,Smith-Waterman Score=352.
cattcagagacagaaggtggatagacaaatctccaccttcagactggtaggctcctccagaagccatcagacaggaagatgtgaaaatccccagcactcatcccagaatcactaagtggcacctgtcctgggccaaagtcccaggacagacctcattgttcctctgtgggaatacctccccaggagggcatcctggatttcccccttgcaacccaggtcagaagtttcatcgtcaaggttgtttcatcttttttttcctgtctaacagctctgactaccacccaaccttgaggcacagtgaagacatcggtggccactccaataacagcaggtcacagctgctcttctggaggtgtcctacaggtgaaaagcccagcgacccagtcaggatttaagtttacctcaaaaatggaagattttaacatggagagtgacagctttgaagatttctggaaaggtgaagatcttagtaattacagttacagctctaccctgcccccttttctactagatgccgccccatgtgaaccagaatccctggaaatcaacaagtattttgtggtcattatctatgccctggtattcctgctgagcctgctgggaaactccctcgtgatgctggtcatcttatacagcagggtcggccgctccgtcactgatgtctacctgctgaacctagccttggccgacctactctttgccctgaccttgcccatctgggccgcctccaaggtgaatggctggatttttggcacattcctgtgcaaggtggtctcactcctgaaggaagtcaacttctatagtggcatcctgctactggcctgcatcagtgtggaccgttacctggccattgtccatgccacacgcacactgacccagaagcgctacttggtcaaattcatatgtctcagcatctggggtctgtccttgctcctggccctgcctgtcttacttttccgaaggaccgtctactcatccaatgttagcccagcctgctatgaggacatgggcaacaatacagcaaactggcggatgctgttacggatcctgccccagtcctttggcttcatcgtgccactgctgatcatgctgttctgctacggattcaccctgcgtacgctgtttaaggcccacatggggcagaagcaccgggccatgcgggtcatctttgctgtcgtcctcatcttcctgctctgctggctgccctacaacctggtcctgctggcagacaccctcatgaggacccaggtgatccaggagacctgtgagcgccgcaatcacatcgaccgggctctggatgccaccgagattctgggcatccttcacagctgcctcaaccccctcatctacgccttcattggccagaagtttcgccatggactcctcaagattctagctatacatggcttgatcagcaaggactccctgcccaaagacagcaggccttcctttgttggctcttcttcagggcacacttccactactctctaagacctcctgcctaagtgcagccccgtggggttcctcccttctcttcacagtcacattccaagcctcatgtccactggttcttcttggtctcagtgtcaatgcagcccccattgtggtcacaggaagcagaggaggccacgttcttactagtttcccttgcatggtttagaaagcttgccctggtgcctcaccccttgccataattactatgtcatttgctggagctctgcccatcctgcccctgagcccatggcactctatgttctaagaagtgaaaatctacactccagtgagacagctctgcatactcattaggatggctagtatcaaaagaaagaaaatcaggctggccaacgggatgaaaccctgtctctactaaaaatacaaaaaaaaaaaaaaaaattagccgggcgtggtggtgagtgcctgtaatcacagctacttgggaggctgagatgggagaatcacttgaacccgggaggcagaggttgcagtgagccgagattgtgcccctgcactccagcctgagcgacagtgagactctgtctcagtccatgaagatgtagaggagaaactggaactctcgagcgttgctgggggggattgtaaaatggtgtgaccactgcagaagacagtatggcagctttcctcaaaacttcagacatagaattaacacatgatcctgcaattccacttataggaattgacccacaagaaatgaaagcagggacttgaacccatatttgtacaccaatattcatagcagcttattcacaagacccaaaaggcagaagcaacccaaatgttcatcaatgaatgaatgaatggctaagcaaaatgtgatatgtacctaacgaagtatccttcagcctgaaagaggaatgaagtactcatacatgttacaacacggacgaaccttgaaaactttatgctaagtgaaataagccagacatcaacagataaatagtttatgattccacctacatgaggtactgagagtgaacaaatttacagagacagaaagcagaacagtgattaccagggactgaggggaggggagcatgggaagtgacggtttaatgggcacagggtttatgtttaggatgttgaaaaagttctgcagataaacagtagtgatagttgtaccgcaatgtgacttaatgccactaaattgacacttaaaaatggtttaaatggtcaattttgttatgtatattttatatcaatttaaaaaaaaacctgagccccaaaaggtattttaatcaccaaggctgattaaaccaaggctagaacc

SEQ ID NO: 13601 - DNA, 2839 bp, Homo sapiens
  SIMILAR (207)..(482): 831254mologous to Oryza sativa glyceraldehyde-3-phosphate dehydrogenase,accession number U31676,Smith-Waterman Score=401.
gtttaatcatattgcagcggcgatcgacgaaataaaaaaagtcctcttcgtcgcggtatccggtatcgccggtatgcagccagccatcggcttccagcactttcgcagtggcttgtgggttgagaaagtactctttgaagatggttttcccaggtatgcctttaatgcagatttcaccgatctcaccagccgggagcgggcgattgtgatcgtcgcggatctccgcttcgtagcaaaaccccacccgaccaatcgacggccagcgtcgtttatcgccaggacgatcgccgataatgcccacaatggtttccgtcatcccataagacgtcagcaagcgaacgccgaagcgttcacaaaacgcatctttttcctgctccgacaagttgagataaaacatcacttcccgcaagcggtgttgctgatcgttcgctgaaggcggctgtaccatcaacgtacggatcatcatcggaatacattccgtaaccgtggcgcggtacttctgtacccgaccggcattgccggtgcgggcgtactggtcaccgaaggttgccgtggtgaaggcggttatctgctgaacaaacatggcgaacgttttatggagcgttatgcgccgaacgccaaagacctggcgggccgtgacgtggttgcgcgttccatcatgatcgaaatccgtgaaggtcgcggctgtgatggtccgtgggggccacacgcgaaactgaaactcgatcacctgggtaaagaagttctcgaatcccgtctgccgggtatcctggagctttcccgtaccttcgctcacgtcgatccggtgaaagagccgattccggttatcccaacctgtcactacatgatgggcggtattccgaccaaagttaccggtcaggcactgactgtgaatgagaaaggcgaagatgtggttgttccgggactgtttgccgttggtgaaatcgcttgtgtatcggtacacggcgctaaccgtctgggcggcaactcgctgctggacctggtggtctttggtcccgcggcaagtctgcatctgcaaaagtctatcgccgagcagggcgcacttcataatacccaggaacaaggtggacagggggctaatgctcctctccttttctcccacaaacactacctgatttcctgtttggggagtcactctctccctatgctgggccatgagattggggtacgattctcctctccctagttccaggggtgaacttaagccaataaatatattctgtacccctggttctgatgattggttcagggtatagcccaacatagccaataacaaacaacgaaacaagaagagacatttgctggggcttctggcaatgccaggctgaagtagctttttgtctccatctttctccttcaatggacctgtatgcttcaggatgagattctcatcatcaaatttctctctgtagataagcttgtcaccaacgccataatggcatgaagtcaccaccctagcacgtaaggcctggaataattctgtaaaagtaagaacccatataacaaaatcctcctctcgccagctctcaagtacaaaattttctgctgtctgtggaactttgtatcctgcgattcccgtcccttctttcttgagtcggagccactgttggtgggacatgtcatcctcttccttgacatactccttcatcgtgctactgctccagcagtaactgccttgcatcccagggatgaagcccccttgatcatggtggataagctttttgatgtgctgctggattcgttttgccagtattttattgaggatttttgcatcaatgttcatcaaggatattggtctaaaattctcttttttggttgtgtctctgccaagctttggtatcagaaggatgctggcctcataagatgagttagggaggattccctctttttctattgattggaatagtttcagaaggaatggtaccagttcctccttgtacctctgggagaatttggctgtgaatccatctggtcctggactctttttggttggtaaactattgattattgccacaatttcagatcctgttattggtttattcagaaattcaacttcttcttggtttagtcttgggagagtgtaggtgtcgaggaatttatccatttcttctagattttctagtttatttgtgtagaggtgtttgtagtattctctgatggtagtttgtatttctgtgggatcagtggtgatatcccctttatcattttttattgcatctatgagattcttctctctctttttctttattagtcttgctagcagtctatctattttgttgatcctttcaaaaaaccagctcctggattcattaattttttgaagggttttttgtgtctctatttccttcagttctgctctgattttagttatttcttgtcttctgctagcttttgaatgtgtttgctcttgcttttctagttttctaactgctgtttgcaattgggtaaataaagtcataagttgttcatctgtatgaaatcgtaactgagcattttcaattaactgtgtgaaatgaaccacgtatgaagaatcagaaatcacattaataggcatattaaaagcagtcaatacctcaattacagctacaagctccgctttttgagctgaagtatagggcatctgaaaaaccttacttttccagccagaataagatgctttaccattactagacctatctttgccacctttttcctttctcaggaaaattctctcttccccggttacttgaacttttgtaacaccaatttctcctccagcttctatagcacaccctctcctaagtggatttccttccccaatcacttgctgttcctccat

SEQ ID NO: 13602 - DNA, 1332 bp, Homo sapiens
  SIMILAR (311)..(886): 711254mologous to Homo sapiens uracil DNA glycosylase,accession number X53778,Smith-Waterman Score=622.
ctaccatctgactatcttctcggtaccgtcttttggattaatgggatcccagagccacttcttggtcgtttgagggggcagtacatgtgtggtatcaggcacatgcagtgtgagggctgtactctgtggaagccggaaggtttcaacatctgccgcaaaccgttccatgttgcacagaacggcattgccggtgcgggcgtactggtcaccgaaggttgccgtggtgaaggcggttatctgctgaacaaacatggcgaacgttttatggagcgttatgaatgtactcatcattcccatgttgtgggcgggagcagaatctggttcatacttcagcacgatgcttccctttgctggaaaagaaacagacacacatttgccaggttttccaggtagtggatgcatgcgctgacgcacactttcgtgcaccctagcttcatcctccatcctctttcctgttgtctggaatgaagatgtaatggctggagcttcagcagctgctttggacgataaggcaatgtactgtagcgctggctgtgggtccctgagcctgccctttgatttcagagctgttgactgacacagggctgaatggttcctgccagagtcctgaatctggtggcctgtgtcttttctgtgccccattcccgcaggggggtgagccatggtgtagttctcacagctcgccctcaggttattaacacggggatcaaagtctggtgtagaaataacagcggtgaagagtttgactgtgctttccggctggcacaggaggtaattttggaagtggatttgaacagcagtagccacagatgactgaagcagtcgggagtagatgggcttgctgtccaaggggaggggccatagtgagggctcgaccaccatagccgctaagagcatagcccctgagagcaggctgttgtcgttcatgaatgacatcatggtatctgttctctcattctctttattcacacagggaatatgctgttcttgtttcttctgtctcgcggcactgtgttttcttcgtagtttttccttgttcgtgtgttgttgggacggagaggagcgcaaggacccggttgaacgtggttttttctttgtcttttctttcctcgcttgtttcttcatttcttcgtgtttttgctgttttttcttgtcgtatgcttttttttgactcttgtgttgttctttagcacgacacacttggcgcctgtgtcctctgtttggtgtcttgtggtctttttgcttctggttcgtcttgtgtttccgtttcctctgcgttggtgtttgtcttcccgtggtgcctcctgtctgctcgttgtcgtgtaccttcat

SEQ ID NO: 13603 - DNA, 554 bp, Homo sapiens
  SIMILAR (1)..(456): 991254mologous to Homo sapiens C3HC4-type zinc finger protein,accession number AF126964,Smith-Waterman Score=837.
aagatactgaaatgtgatgaacatatccagaagcttggaagctgtattacagatccaggtaatcgagagacctcaggaaataccatgcacacagtgtttcaccgtgacaagaccaaagatacacatcctgaaagctgttgcagctctgaaaagggtgggcagccattgccttggtttgagcataggaaaaatgtaccacagtttgcagaacctacagaaacgttgtttggtcccgattccggaaaaggtgccaagagcttagttgaactccttgatgagtctgaatgtacttcagatgaggaaatctttatctcacaagatgaaatacagtcatttatggctaataaccagtctttctacagcaatagagaacaataccgacagcatctgaaggagaaatttaataaatactgccggttaaatgatcacaagaggcccatttgtagtggctgggttgacaacggctgggaagcaaattaaataaataaaaatagctctgtctttcaatgaaacactccacgatgactactggcgccttctcctttcgaaaaact

SEQ ID NO: 13604 - DNA, 945 bp, Homo sapiens
  SIMILAR (647)..(441): 981254mologous to Homo sapiens C3HC4-type zinc finger protein,accession number AF126964,Smith-Waterman Score=368.
ttttctgtttgtattaataaatattctttattttaaattttgcacattgcgctttaacattacatccaaacattttgcaagtggatgtctactttgtaaaaccatatattcagctcattgtcatttctgtacagaattataagtacaacattactttttgccactaagttgctttagtaagtctcacaggaagagaaacatttaatgaaaagagatggcttaaatcatatggcaggcctgcgtcagccacgcaactaaagacacaagcctgaagaaagaactaatgaggatacctccaccgtctcccaaaacaagaaagaatcacattgatttaagataaaattttgccataagtcactaaattaagagtttttcgaaagagaaggcgcagtagtcatcgtgagtgtttcattgaaagacagagctattttatttatttaatttgctccagccgttgtcaaccagccactacagatgggcctcttgtgatcatttaaccggcagtatttattaaatttctccttcagatgctgtcggtattgttctctattgctgtagaaagactggttattagccataaatgactgtatttcatcttgtgagataaagatttcctcatctgaagtacattcagactcatcctgcaaattaaagcagtagttaagactatgacttaagaatgcaaaatgttatgtaatggaggaggacagctaaaaattaaaccagtctaactttttagtttcacatcagtcacataaagcctttaattggagtgtttgcagaataagcatcatgtcattctgcctaagaaagtagtgagaataaaatccaactccttgagttgaaaccttgaatctataatttctcctagaagcctatgagcctagcaaactaccaccataccttggccttgaaaaaataactaattaaagaggttacaactag

SEQ ID NO: 13605 - DNA, 1228 bp, Homo sapiens
  SIMILAR (578)..(1048): 941254mologous to Homo sapiens C3HC4-type zinc finger protein,accession number AF126964,Smith-Waterman Score=835.
atggcagtagaagggttttgcactgattgcaaaaataaagtcctccgagcatacaatatccttattggtgaacttgactgcagcaaagaaaagggctactgtgctgcactttatgaaggcttgcggtgctgtccacatgaacgacacatacatgtttgctgtgaaacagacttcattgcacatcttttgggtcgtgctgaacccagagttccgcaggagggtatgagcgaagagaaaggcatgcaaagacaatagatatagctcaagaagaagttctgacctgcttgggaattcatctttatgaaagactgcatcgaatctggcagaagctacgggcagaagagcagacatggcagatgcttttctatcttggggttgatgctttacgcaagagttttgagatgaccgtggaaaaagtacagggtattagcaaattggaacatctttgtgaggaattttcagaagaggaacgagtaagagaactcatgcatgataagaaacgccaagaacggaagaatagacgaaaaaataagtgcgcgcgggatattcctactcccttacaaacagccagatgaacaaggaagtaagccaagagaaggaaacagacttcatagaaaatagcagctgcaaagcctgtggcagcactgaagatggtaatacttgtgtagaagtaattgttaccaatgaaaatacatcatgtacctgtcctagcagtggcaatcttttggggtcccctaaaataaagaaaggcttatctccacactgtaatggtagtgattgtggatattcatctagcatggaagggagtgaaacaggttctcgggagggttcggatgttgcctgcactgaaggcatttgtaatcatgatgaacacggtgatgactcttgtgttcatcactgtgaagacaaagaggatgatggtgatagttgtgttgaatgttgggcaaattctgaagagaacgacacaaaaggaaaaaataaaaagaagaagaagaaaagcaagatactgaaatgtgatgaacatgatgagtctgaatgtacttcagatgaggaaatctttatctcacaagatgaaatacagtcatttatggctaataaccagtctttctacagcaatagagaacaataccgacagcatctgaaggagaaatttaataaatactgccggttaaatgatcacaagaggcccatttgtagtggctggttgacaacggctggagcaaattaa

SEQ ID NO: 13606 - DNA, 1569 bp, Homo sapiens
  SIMILAR (236)..(2971): 1001254mologous to Homo sapiens protein kinase C mu,accession number X75756,Smith-Waterman Score=4804.
atggccaagccagattgtatcatcacttgtgatagcaaaaacctcaccataaaaactgagagcactttgaaaacaacacagttttctggtaccctgggagagaagtttgaagaaaacacagctgatggcagaagaactcagactgtttgcaactttacagatggcaggtctgaagacacagaaatgaacgtgctcatctctgccctccaggagcacagttctagaaacccagtgaaaaatctcttatttagattagggtttagagcatctctgcaacccacggtggcctctcctctttctgcgggccatggacagcacagtcccttcagccctggagctgccccagcggctggcactgaacccaagggagagcccaaggagtccggaagaggaggagccccacctgctgagcgcttggctgcagtccagaccctggccaatgtcatccggccttgctatggcccccatggccggcagaagttcctggtgaccatgaaaggagaaacagtgtgcacggggtgtgccactgccatcctcagggccctggagctggagcacccagcggcatggctcctccgggaagcagcccaaacccaagcagagaatagtggggatggcacagccttcgtggttctgctgacggaagccttgctggaacaggcagagcagctgctgaagttcggcctgcctcgcccgcagctccgggagcctacgccacagccactgcagagaaaagcaagtaggccagctggagccgcgggaattaatgtggcagtggtgttgggggaggtcgacgaggagaccctcacactggcggacaagtatggcatcgtggtgattcaggctaggtctcggatggagatcatttacctgagtgaggtgttggacacaccgctgctgcctcgtctgctccctccccagaggccaggcaagtgccagagggtttacaggcaggagctgggagatggtttggctgtggtatttgaatgggaatgtacaggcacacctgccctcaccgtggttctcaggggagccaccacccaggggctgcggagtgcagagcaggccgtctaccacagcattgatgcctatttccagccatgtcaagatcccagactgatcccaggagctggggccacagaaatggctttggcaaaaatgctctctgataaaggaagcagattggaagggcccaatgggcctgcattcctagcatttgcccgggccctgaagtatcttcctaaaaccttggcagagaatgcaggcttagctgtctcagacgtggttgcagaaatgagtggagtgcaccaaggtgggaacctcctaatgggtgtgggagctgaagggataataaatgtggcccaggaaggggtgtgggacaccctaatagtcaaagcccaaggatttcgagcagtggctgaggtggtgctacagctcgtgactgtagatgaaatcgtagtggccaagaaaagtcccacacatcagcagatctggaatcctgactctaagaagacaaagaaacgcccacctcctgtggaaaaaaaaaaaatccttggaatgaataactag

SEQ ID NO: 13607 - DNA, 453 bp, Homo sapiens
  SIMILAR (251)..(364): 941254mologous to Bos taurus LP2,accession number U55188,Smith-Waterman Score=189.
gaacttaatgaaaaagttattttatgaattgaattttgtcaaattagcaaaagtatcaacttcatcatagaattggcatcttttattagctactaggttgaaaaccacaaactattgtgaataaaatcaatatgggttaatgaagtagactcagaaaggagaaggtgaaacaaatgttgattaaggaggttatgagtcatggaaactcttgtaatgtacttggaagattaaaacgtttactttgtttttgcagactgtctgcaactttacagatggtgcattggttcagcatcaggagtgggatgggaaggaaagcacaataacaagaaaattgaaagatgggaaattagtggtggtaagtgtcaaactgctgtgtctcagtcagcttcttgtgtgcattcatagttcacataactgttctatatcattgatcattaacagaactcagtttgg

SEQ ID NO: 13608 - DNA, 856 bp, Homo sapiens
  SIMILAR (298)..(2): 371254mologous to Chlamydomonas reinhardtii vegetative cell wall protein gp1,accession number AF309494,Smith-Waterman Score= 141.
cgccgcccagcgcgggccgccgttataaagcagccgccggcgccgggtgcctcacagcacgctgccacgccgacgcagacccctctctgcacgccagcccgcccgctaccacccatggcacatgttcagcagctggaaggaagatggcgcctggtggacagccaaaggcttttgatgaaataccatgaaggagcctaggagtgactaatagctttgcgaaaaatgggccgcaatgcccaagcccagatttgtatcatcactgagtgatgggtaaaacccttcaccattaaaaactgagagcactttgaaaacaaacacagttttcttgtacccctggggagagaagtttgaagaaaccacagctcgatgggcagaaaaaactcacgaactgtctgtcaactttcccagatgggtgcattgggttcagcatcaggagtgggatggggaaaggaaaagcaccaataaccaagaaaaattgaaaagatggggaaattagttggttggagtgtgtcatgaacaatggtcacctgtactccggattctatgaaaaagtaggaataaaaaattccatcatccactttgggacagggagtttaattaaggagaatgacccaagcttcagttcaatgagcaaatctccatactgtttctttctttttttttttcattactgtgttcaattatctttatcataaacattttacatgcagctatttcaaagtgtgttggattaattaggatcatccctttggttaataaataaatgtgtttgtgctaatatatcttgtatgcattctttaaaccttacaggaaattagtgatgagttttaataattattaattgagtaagggtggg

SEQ ID NO: 13609 - DNA, 324 bp, Homo sapiens
  SIMILAR (320)..(87): 751254mologous to Homo sapiens similar to lymphocyte early activation antigen AIM/CD69; similar to Q07108 (PID:g584906),accession number AC005531,Smith-Waterman Score=332.
  misc_feature (1)...(324): n = a,t,c or g
tggacctgcgatggtgaacgtgtccggatcaaacgggtccccgttgacccagtggaattcgtccccaactctgcgtagtcccaatcccagggctccctccgcgtgaacttgaanataaattccagctccttctggctntgaatnacagccagcaccgcctcgtgggtgtggcagtactgcctgcctgtgttccagtctctgggttcctcggaaaagaagtagcacttccttccgtagagcagccagtcctccgggcagggccttcgcacttgatgcagcccttggaagcctccaaggccgccttccagctggtgctgccctcgt

SEQ ID NO: 13610 - DNA, 410 bp, Homo sapiens
  SIMILAR (9)..(203): 1001254mologous to Rattus norvegicus Hsc70-interacting protein,accession number X82021,Smith-Waterman Score=335.
  misc_feature (1)...(410): n = a,t,c or g
ctttatgtgaactccagaaagccattgacttattcacagatgccatcaagctgaatcctcgcttggccattttgtatgccaagagggccagtgtcttcgtcaaattacagaagccaaatgctgccatccgagactgtgacagagccattgaaataaatcctgattcagctcagccttacaagtggcgggggaaagcacacaggtaaataattgaatttaattattttcagaactctttacatttaaatctgatgttttaagatgctttgtttaaacaaaaacacaaaagttcctaatgacttaattttcaaattagtgtgtacttagtatcaagaagtgagatagcttgtagacagctgcttaaaaggtaaaagnnnnnnnnnngaaatttaaaagaagaagtgagaatc

SEQ ID NO: 13611 - DNA, 2128 bp, Homo sapiens
  SIMILAR (1078)..(1422): 991254mologous to Plasmid F Protein D,accession number M12987,Smith-Waterman Score=581.
  misc_feature (1)...(2128): n = a,t,c or g
atggacccccgcaaagtgaacgagcttcgggcctttgtgaaaacgtgtaagcaggatccgagcgttccgcacgccgagaaaatgcatttcctaagggagagggtggagagcatggcgggtaaagtaccacctgctactcagaaagctaaatcagaagaaaataccaaggaagaaaaacctgatagcactgatgcccctcaagaaatgggagatgagaatgcagagataacagaggagatgatggatcaggcaaatgagaaagtggctgctattgaagccctaaatgatggtgaactgcagacagccattgacttgttcccagatgccatcaagctgaatcctcacttggccattttgtatgccaagacggctgctcagccttacaagtgtcgagagaaagcacacagactttcccttcaattggattatgatgaagatgctagtgcaatgctgaaagaagttcaacctggggcacagaaaattgcagaacatcggagaaagtatgagcgaaaacgtgaagaacaagagatcaaagaaagaatagaaagagttaagaaggctcaagaagagcatgagagagcccagagggaggaagaagccagaagacagtcaggagctcagtactgctcttttccaagtggctttcctgcgggagtgcctggtaattgtcccagaagaatgtctggaatgggagggggcatggctggaatggccagaatccccggactcaatgaaattcttagtgatccagagattcttgcagccatgcaggatccagaaattatgttagccttccaggatgtggctcaggacccagcaaacatgtcaaaataccagcgcaacacaaagactatgcatcttatcagtagattgtcagccaaatttggagaaaaatcattggagcagctgagggaaacatttgaccatgagaaattatctgctgattcaaaccacttgataatctctgcattattgagcgtggcaatggctttagctaattgccactatactccacaaacttacttgagaaagaagtgtccagtggaagactctactgtctctgtgctcatcgttcggacgtttctctcctttatcaagagtttgggggtcaagtcacagcccctaccaccctctgctgtggctccagggcagccgggaagaaaggcgctcatcttccctgagcctccctgcactgtccccgcgaactttattcccattttcacagatgaggctgaggcccgcggccccgaggggctgctgcggcgatccgggtcgggctacgagggcagcaccagctggaaggcggccttggaggacaccaccacacgcctcctgctgggtgccatcgcggtccttctgttcgccatcttggtggtgatgagcatcttggcttccaagggctgcatcaagtgcgaagcgccctgcccggaggactggctgctctacggaaggaagtgctacttcttttccgaggaacccagagactggaacacaggcaggcagtactgccacacccacgaggcggtgctggctgtgattcagagccagaaggagctggaatttatgttcaagttcacgcggagggagccctggattggactacgcagagttggggacgaattccactgggtcaacggggacccgtttgatccggacacgttcaccatcgcaggtccaggggagtgtgtcttcgtggagcccaccaggctggtgtcgacggagtgtctgatgacnccggccctggccctgccaggtcagcatgatcagcccagctcagcagctatgggacttgccccatagtatacagttgggaggtggcaaagccaggatttgttgggtggtggcaaagccaggatttgaacccagacccatccccacagggacctcggaaagctgcatgtatggcaggcttgctgaggtggagctgctgcaggcacagcgcctggacggggctgtggcgcacgtagctcaagtgcgcagtggcaagggccctggcaatgggccagcaagccacgaggctccgggtgctgatggtgtctgggagcccggactgggcttcgccaatcccacaccagctccaaacatcagcctcctcaggctgcagcccgacattctggagggctgttga

SEQ ID NO: 13612 - DNA, 3143 bp, Homo sapiens
  SIMILAR (336)..(4): 621254mologous to Cloning vector pSacBII SacB,accession number U09128,Smith-Waterman Score=290.
ctgcaggaattcggcacgagcggtcacgccgagccagcgcctgggcctggaaccgggccgtagcccccccagtttcgcccaccacctccctaccatggacccccgcaaagtgaacgagcttcgggcctttgtgaaaatgtgtaagcaggatccgagcgttctgcacaccgaggaaatgcgcttcctgagggagtgggtggagagcatgggtggtaaagtaccacctgctactcagaaagctaaatcagaagaaaataccaaggaagaaaaacctgatagtaagaaggtggaggaagacttaaaggcagacgaaccatcaagtgaggaaagtgatctagaaattgataaagaaggtgtgattgaaccagacactgatgctcctcaagaaatgggagatgaaaatgcggagataacggaggagatgatggatcaggcaaatgataaaaaagtggctgctattgaagccctaaatgatggtgaactccagaaagccattgacttattcacagatgccatcaagctgaatcctcgcttggccattttgtatgccaagagggccagtgtcttcgtcaaattacagaagccaaatgctgccatccgagactgtgacagagccattgaaataaatcctgattcagctcagccttacaagtggcgggggaaagcacacagacttctaggccactgggaagaagcagcccatgatcttgcccttgcctgtaaattggattatgatgaagatgctagtgcaatgctgaaagaagttcaacctagggcacagaaaattgcagaacatcggagaaagtatgagcgaaaacgtgaagagcgagagatcaaagaaagaatagaacgagttaagaaggctcgagaagagcatgagagagcccagagggaggaagaagccagacgacagtcaggagctcagtatggctcttttccaggtggctttcctgggggaatgcctggtaattttcccggaggaatgcctggaatgggagggggcatgcctggaatggctggaatgcctggactcaatgaaattcttagtgatccagaggttcttgcagccatgcaggatccagaagttatggtggctttccaggatgtggctcagaacccagcaaatatgtcaaaataccagagcaacccaaaggttatgaatctcatcagtaaattgtcagccaaatttggaggtcaagcgtaatgtccttctgataaataaagcccttgctgaaggaaaagcaacctagatcaccttatggatgtcgcaataatacaaaccagtgtacctctgaccttctcatcaagagagctggggtgctttgaagataatccctacccctctcccccaaatgcagctgaagcattttacagtggtttgccattagggtattcattcagataatgttttcctactaggaattacaaactttaaacactttttaaatcttcaaaatatttaaaacaaatttaaagggcctgttaattcttatatttttctttactaatcattttggatttttttctttgaattattggcagggaatatacttatgtatggaagattactgctctgagtgaaataaaagttattagtgcgaggcaaacataactcatttgaggataaagtttgtgttggatatgtggttcctgatgcattttgacttgtctttttaaatgctttatctttttctttaaagatttatttcaataaaactaattgggaccacccgtatttcagtaggacctgggtagggattggaagtacttggcagggcagcagcaatcttgctgtgtttgatataacatgcatccttgggcaggttgcccttaaatcttacactgtggtgaagggatgttttttttgtaatgctgcagtagagttggagtacttagttctcttgttgtccagtatatctaataagtgtttttcatattatttccacgtaagggaaataaggtagtacttttctttttatatttctatgcttaaaattctctttcctagtcaaaaattgcccaaatctgtgtttgctttctgcttgctacatttgtctcccttacttttcttgagctaaagacaggctttttccaccggcatcatcactgctatcatcattaacagcgtaattatacaagcatatttaatgctgagtttaatttaatatgtaatacatatggtaattgtagggtaatacccacaacaactgtagtttcttacttggccaagagaatgcttatttaagtgttagacttccattctggcaaaatcttgccttatcagaagacattggaaagagggattccctttggtgtttggtcttctacttagaaaaacctattgcagttagtttatcttgtagtattcatctttgtattctgaagataaggtttgaattaaattgatacacacagaggggaaccgattttttttatccaatgtgaattataaatgagataatccacagttattcattgtggagttgttgagactatgaaagactcattgtctttgtattcagctcttaaatagtgtaactatatccccacctctgcttgctttctttccctcccctccaatgataaagaaaatgataaattttctgttgtgcattcaattcttattttaaataagactaagtataggcattgtacctgacattgctacgtttctaccagtgtttcaatttaaagtgctagtgtttaaaaacattttcaagggataaggccttctgtactttgcttatttgaagaatcagtggtaggagcagtgaagtaaattctatggagtacatttctaaaataccacatttctgaaatcataaataagtttattcaggttctaaccctttgctgtacacaagcagacagaaatgcatctgttacataaatgagaaaaagctattatgctgatggagcatgctttttaaatcctttaaaaacactcaccatataaacttgcatttgagcttgtgtgttcttttgttaatgtgtagagttctcctttctcgaaattgccagtgtgtacttggcttaactcaagaacagtttcttctggattccttatttgatttatttaacctaattatattctaatattgcaaatattaccataagtgggtaaaagtaaaattcctcttctg

SEQ ID NO: 13613 - DNA, 446 bp, Homo sapiens
  SIMILAR (528)..(4): 991254mologous to Cloning vector pZC320 SopA,accession number U26464,Smith-Waterman Score=907.
atggaagccgatgggcccgcgagcctccaggagctgcctccctcgccacggtcgccttcaccgccgccgtcgccgccaccactgccctcgccgccgtcgctgccatcgcccgcagccccggaggcccccgagctccccgagccggcgcagccgtccgaggctcacgcccggcagctgctgctggaggagtgggggccgctgagcgggggcctggagctgccccagcgcctcacctggaagctgctcctgttgcggcggccgctctaccgcaacctgctgcgctcgcccaaccccgaagagttatcccagatccccccattttccccggtcctgtgtctccttcttgtccagccccatcatgcctccccggagcagggaggcacctccacctgggcccttgccacccccatccccacagtcctctctgaagcagcaagagggcgcag

SEQ ID NO: 13614 - DNA, 789 bp, Homo sapiens
  SIMILAR (412)..(777): 511254mologous to Ictalurus punctatus NCC receptor protein 1,accession number AF208795,Smith-Waterman Score=286.
atggaagccgatgggcccgcgagcctccaggagctgcctccctcgccacggtcgccttcaccgccgccgtcgccgccaccactgccctcgccgccgtcgctgccatcgcccgcagccccggaggcccccgagctccccgagccggcgcagccgtccgaggctcacgcccggcagctgctgctggaggagtgggggccgctgagcgggggcctggagctgccccagcgcctcacctggaagctgctcctgttgcggcggccgctctaccgcaacctgctgcgctcgcccaaccccgaaggcatcaacatttatgagccagcaccccctactggtcccacccagcgacccctggaaactctgggcaatttccgtggctggtacattagaactgaaaagctccagcagaaccaaagctggacagtgaagcagcagtgtgtggaccttctggccgagggcctgtgggaggagctgctggatgacgaacaaccagccattacggtcatggactggttcgaggacagccggctggatgcgtgcgtctatgagctgcatgtctggctgctggcggccgaccgccgcacggtcattgctcagcaccacgtggccccccgaacttctgggagaggaccccctggccgctgggtccaggtgtcccacgtattccgccattatggtcccggtgtgcgctttatccacttcctgcacaaggccaagaaccgcatggagcctggtgggctgcggcggacacgggtgaccgactcctccgtgtctgtgcagctccgggagtga

SEQ ID NO: 13615 - DNA, 831 bp, Homo sapiens
  SIMILAR (298)..(372): 881254mologous to Homo sapiens homogentisate 1,2- dioxygenase,accession number Z75048,Smith-Waterman Score=104.
ttatttacatattctttctgttgtggacaaaaacctcctgacagcgcaacatccaccattcagacacttgtgagatatgacttttaaaagtgctacagccattcctggcatttacttcagctccctgtcctccccactccctttttcccttttcccaacccatctcttggtcagagtcctgaaaagacaggctcaaatcccagttctgcgatgacttgccggcttaagcaagtcgtttcccagctctcagacttaattcctcctctgcaaaatgggaagtatgactttcctcacaaggacatagccacagcatttatgtttgaatcatctttaagtctggcggtcacaaagtggggactcaaggcctccaggcccagtcccaaggctccaggccacttgtgccagcagcatgtgtcagcaagacagcagaagcaggaagagagctggctggaagacacatatcccccgaagactgaggaagaggccgtcaggatactgagtagcagttacatcagactgagacacttcctgtttacaggacactataaaacccctgtcccgtcctcatttgctctaacattctataagtctgtgaatgtgctagaaaacctaaaagtacaagtgttactggaaagggatgccaatctggacgccaagagagggttcttggatctcgccaaagaaagaattcaggcctctcttatcctgcaatcatcctccatccaggaaccagatgattttccagaaatgaaaatccaatcatgtttgtcctgcttaatcccttcagtgactctcactgccatcaggctagagcctaaactctttatgtga

SEQ ID NO: 13616 - DNA, 1732 bp, Homo sapiens
  SIMILAR (169)..(1014): 991254mologous to Homo sapiens homogentisate 1,2- dioxygenase,accession number Z75048,Smith-Waterman Score=1545.
tagacaattctttcagctagtttgagtgacgcactgaccagtgaagcgcagtgacagcagtgggaaccggaatatccaaagagtggtttgaaggagaaagaagcattgtggctttatatcctctgggcctgggtttcctgaagtcaccacacatagaggagagagaaaatggctgagttaaagtacatttctggatttgggaatgagtgttcttcagaggatcctcgctgcccaggttccctgccagaaggacagaataatcctcaggtctgcccctacaatctctatgctgagcagctctcaggatcggctttcacttgtccacggagcaccaataagagaagctggctgtataggattctaccttcagtttctcacaagccctttgaatccattgacgaaggccatgtcactcacaactgggatgaagttgatcctgatcctaaccagcttagatggaaaccatttgagattccaaaagcatctcagaagaaagtagactttgtgagtggcctgcataccttgtgtggagctggagacataaagtctaacaatgggcttgctatccacattttcctctgcaatacctccatggagaacagatgcttttacaattcagatggggacttcttgattgttccgcagaaagggaaccttctcatttacaccgagtttggcaagatgcttgtacagcccaatgagatctgcgtcattcagagaggaatgcggttcagcatagatgtctttgaggagaccaggggctacatcttggaggtctatggtgtccactttgagttacctgaccttggaccaattggggccaatggcttggccaatcctcgtgatttcttgatacccattgcctggtatgaggatcgccaagtaccaggtggttacacggtcattaataaataccagggcaagctgtttgctgccaaacaggatgtctccccgttcaatgttgtggcctggcacgggaattatacaccctacaagtacaacctgaagaaatttcatggttatcaactcagtggcctttgaccatgcagacccatccattttcacagtattgactgctaagtctgtccgccctggagtggccattgctgattttgtcatcttcccacctcgatggggggttgctgataagacttcagggcctccttattaccatagggaactgcatgaagagattcatggaactcatccggggtcaatttgagcaaaagcaaggttggttccttccagggggaaggggatcctacacagcacaatgaccccccatggaccttgatgctgactgctttgagaaggccagcaaggtcaagctggcactgaaaaggattgccgatggcaccatggcaatttatgttttgatcctcttttaatttggcgggcccaaaatgggggctccaagccccccagggttttggataaaaattaccccaagtgttgggagccactcaagagcccctttcactcccaactccaggaacccagcagaacctaattgagaatggaaccattgctaccataattaagagtagatttgtgaagattcttcttcagaatctcatgctttctggtagtattggaggagggggttggttaaaatgaaaattcacttttcataagtcaagtaactcagaacttttatggaaacgcatttgcaaagttctatggctgtcaccttaattactcaataaacttgctggtgttctgtggacgtaaa

SEQ ID NO: 13617 - DNA, 159 bp, Homo sapiens
  SIMILAR (7)..(156): 861254mologous to Homo sapiens NADH:ubiquinone oxidoreductase B9 subunit,accession number AF044955,Smith-Waterman Score=244.
atgctgcttagtccccacaccaagtactccatcatgatcaacgaggcaaggccctacaactacccagtgcctgtctgcaatgatgggaacatgcccgatgtgcccagccacccccaggacccccaaggccccagtttggagtggctgaagaaattgtga

SEQ ID NO: 13618 - DNA, 356 bp, Homo sapiens
  SIMILAR (185)..(301): 741254mologous to Homo sapiens Human secreted protein sequence SEQ ID NO:195,accession number Y87156,Smith-Waterman Score =152.
cttctgaagcctacttctgtcaatttgtcaaactcattctccatccagttttcttcccttgctggcaaggagttgtgatcctttggaggagaataggcattctggtttttggaattttctgccttttgcactggtttctccccatcttcatggatttccttacctttggtgtttgatgttggtgacctgccagaggccagctggagctctcctgtatgaggtgtctgttggcccctactggaaggtgtctcccagtcaggagacatgggggtcagtgacccatttgaggaggcagtctgacctttagcagagcttgaacgctgtgctgggagatctgctgctctcttcagagccat

SEQ ID NO: 13619 - DNA, 1143 bp, Homo sapiens
  SIMILAR (571)..(1131): 831254mologous to Homo sapiens NAG13,accession number AF194537,Smith-Waterman Score=794.
atgaggagaaaccagcgcaaaaaggctgaaaattccaaaaaccagaatgcctcttctcctccaaaggatcacaactcctcaccagcaagggaacaaaactggacagagaatgagtttgacaaattgacagaagtaggcttcagaagtgatggggagaatgggaccaagttggaaaacactcttcaggatattatccaggagaacttccccaacttagcaagacaagccaacattcaaattcaggaaatacagacaatgccacaaagatattcctcaagaagagcaacctcaggacacataaccatcaggtttaccaaggttgaaatgagggaaaaaatgttaagggcagccaaagagaaagaaatacaaactgccatcagagaatactataaacacctctacacaaataaactagaaaatctagaagaaacggataaattcctggacacatgcactctcccgagtctaaaccaggaagaattcgaatccttgaatagatcaataacaagttctgaaattgaggcagtaatagactaccaaccaaaaagagtccaggaccagatggattcacagccgaattttaccagagggatgcaagactggttcaacatttgcaaatcaataaatgtaatccatcacataagccgaaccaatgacaaaaaacacatgattatctcaatagatgcagaaaaggcctttgacaaaattcaagacgtcctcatgctaaaaactctcaataaactaggtattgatggaacatatatcaaaataatgcgagttatttatgacaaacacacagtcaatatcatactgaatgggaaaaaactggaagtactcccttggaaaactggcacaagacaaggatgccctctctcaccactcttattcaacatagtactggaagttctggccagggcaatcaggcaagagaaagaaacaaagggtattcaaataggaagagaggaagtcaaattgtctcttcttgcagatgacatgatggtatatttagaaaaccccatggtctcagcccaaaatctccttaagctgataagcaacttcagcaaagtctcaggatacaaaatcaatgtgcaaaaatcacaagcattcctatacaccaataacaaacagacagccaaatcatga

SEQ ID NO: 13620 - DNA, 1551 bp, Homo sapiens; identical to SEQ ID NO: 10556
  SIMILAR (589)..(1536): 721254mologous to multiple sclerosis associated retrovirus polyprotein,accession number AF009668,Smith-Waterman Score=1180.

SEQ ID NO: 13621 - DNA, 930 bp, Homo sapiens
  SIMILAR (1163)..(2032): 1001254mologous to Cloning vector pZC320 SopA,accession number U26464,Smith-Waterman Score=1518.
atgtcggcagactttaatgaggaaatgaaaaagactaaagctttgggcactagagatactgaccgagctttatcattactggaagaatactgcaaaaaattaaggaaaccagaggagcagctgttgaaaaatgcggttaaaaaggtgatgggtatctttaagagcagcttattccaagctttgctagttcttaaagatgatgtgtccgcagtttgttccttcagatgttcagatgtgtccagagtttcttcctcctggtgggttcgtggtctcactgacttcaggagtgaagctgcagaccttcacaacagaaaagttctccaagtccccacctgtcccagaagcccaatcagcttcacctctcactggcattcactgtgggactttgcggcacctagtctgggcactctggcagcccagagggagctcgtcccagacaatcaagaggaaaagaggggaagcgagaaagagatggagacctggtattgtggccaatcatcccgtgaaaagggaatggcggtccatgcatgggattcagcctctgatcaagcccagcaggcatcagcccgctgccctgactataatcatgttctttgtggcaacatggatgcagctggaggcccttatcctaagcaaattaatgcagaaacagaaaaccaaatatcacatgttcttatttataagttagagctaaatattgggtacacaattgacataaagatgggaacaatagacactggggactccaaaagtggggagcctagtggtggcagctgcactggctgtgtcagtcctgcctcaggacaggatgcagattctaagcagcaaagttctcaggatggcaccaagaagcagctgctcagggctcagatacctgtgggactccatgtgggttccccgtctggagcgacatcttggtacagtctctag

SEQ ID NO: 13622 - DNA, 2631 bp, Homo sapiens
  SIMILAR (358)..(750): 881254mologous to Cloning vector pZC320 SopA,accession number U26464,Smith-Waterman Score=602.
atgacagctgaagaaagggacaaattccctaccagtcagcaagctgtccccagtatggatgcccactgggacctcgactcagatcatggggactggagtcgtaaacatctgttgacctgtgttctagaaggactaaggagaattaggaaaaagcccatgaattattcaatgatgtccaccataactcagggaaaggaagaaaatccttctgccttccttgagcagctacaggaggccttaagaaaatatactcctctgtcacccaactcactagtgggtcaattgatcctaaaagataagtttattacccaatcaaccacagatatcagaagaaagctccaaaatagggaccaagaggaacaggcccaaaaggaaaagcgagatcagagaaaggccatagccttagtcatggccctcagacaaaccttggtggttcaaagaggacagaaaatggagcaggccaatcacctggtggggcttgttaccagtgtggtttgcaaggacaccttaaaaaagattgtccaacgagaaacaagccgccccatcgtccatgtccactatacggaggcaatcactggaagtcacactacccagagggcaaagcttctctgggccagaagcccccaaccagatgatccaatgacaggactgaggatgactgcggcaagcacccgttcatgtcatcaccccctcactgagccctgggtatgtttaatcattgagggccaggaaattgacttcctcctggacactggcacgaccttctcagtgttaatcccctgtcttggacgactgtcctcaaggtccgttaccatccaaggaatcctgggacagcctgtaaccaggtatttctcccacctcctcagttgtaattgggagactttgctcttttcacatgcctttcttgttatgcctgaaagtcccacacccttattagggagggatatattagccaaagctggagctattatctccatgaagacagggaacaagttacccatttgttgtcccctacttgagggaatcaaccctgaagtctgggcattggaaggacaatttggaagggcaaaaaatgcccatccactccaaatcaggctaaaagaccccatcagttttccttatcaaaggcaatatcccttaaggcctgaagctcataaaggattacaggatattgttaaacatttaaaagctcaagactcagtaagaaaatgcagcagtccctgcaacaccccaattctaggagtacaaaaactgaacagtcagtggagactagtgcaagatcttagactcatcaatgaggcagtaattcctctatatccagttgtacgcaacccctatacccttctctctcaagtaccagaggaagcagaatggttcactgttctggacctcaaggatgccttcttctgtattcccctgcactctgactcccagtttctttttgcctttgaggatcccacagaccacacatcccaacttatgtggatggtcttgccccaaaggtttagagatagccctcatctgtttggtcaggcacaggcccaagatctaggccacttctcaagtccaggcactctggtccttcaatacagcgagatagccaagaccctctatactctaatcaaggagatggagagggcaaatactcacctagtagaatgggaaccagaggcagaaacagccttcgaaaccttaaagcaggccctagtacaagctccagctttaagccttcccacaggacaaaacttcgctttatatgtcatagagagagcagggatagctcttggagtccttactcagactcacaggacaaccccacaaccagtggcatacctaaggactagcacccagttagcagaactagtggcacttacccgagccttagaactgggaaaaggaaaaagaataaatgtgtatacagatagcaagtatgcttatctaatcctacatgcccatgctgcaatatggaaagaaagggagttcctaacctctgggggcaccccattaaataccacaaggaaattatggagttattgcacacagtgcaaaaacccaaagaggtggcagtcttacactgccaaagccatcagaagggctaggaatggctactgctacaggaactggaatagccagtttatctacttcagtatcctactaccacacactctcaaaggatttctcagtttgcaagaaataacaaaatctatccttactctacaatcccaaatagactgtttggcagcagtgactctccaaaactgccaaggcttagacctcctcactgctgagaaaggaggactctgcaccttcttaggcgaagagtgttgtttttatactaaccagtcagcgatagtaagagatgctgcccggcatttacaggaaaaggcttctgaaatcagacaatgcctttcaaactcttataccaaccactggagttgggcaacatggcttctcccctttctaggtcctgtggcagccatcttgctatcattcgcctttgggccctgtatttttaaccctcttgtcaaatttgtttcctctaggatcaaggccatcaagctacagatgatcttacaaatggaaccccaaataagctcagctaacaacttctaccgaggacccctggagtga

SEQ ID NO: 13623 - DNA, 662 bp, Homo sapiens
  SIMILAR (17)..(661): 401254mologous to Homo sapiens p40,accession number U93573,Smith-Waterman Score=320.
  misc_feature (1)...(662): n = a,t,c or g
cagcaggggccaacagacaccttatacagaagaactctggctggcatctgcnaggtgcccctctgggatgaagcttccagaggaaggaataggcagcaatctttgccgttctgtagccttctctggtgatacccaggcaaacagcaaactccagcagactgcggaaaaggggcctgactcttagaaggaaaattaacaaacagaaaggaatagtagcaacatcaacaaaaagggtgcccatacaaaaaccccatccaaaggtcatcagcaacaaaaacaaaaggtagataaatccacgaagatggggagaaaccagcgcaaaaaggctgaaaattccaaaaaccagaatgcctcttctcctccaaaggatcacaactcctcaccagcaagggaacaaaactggacagagaatgagtttgacaaattgacagaagtaggcttcagaagtgatggggagaatgggaccaagttggaaaacactcttcaggatattatccaggagaacttccccaacttagcaagacaagccaacattcaaattcaggaaatacagacaatgccacaaagatattcctcaagaagagcaacctcaggacacataaccatcaggtttaccaaggttgaaatgagggaaaaaatgttaagggcagccaaagagaaag

SEQ ID NO: 13624 - DNA, 5175 bp, Homo sapiens; identical to SEQ ID NO: 3982
  SIMILAR (1041)..(1790): 761254mologous to Cloning vector pSacBII SacB,accession number U09128,Smith-Waterman Score=941.

SEQ ID NO: 13625 - DNA, 2094 bp, Homo sapiens; identical to SEQ ID NO: 10558
  SIMILAR (1)..(948): 951254mologous to Cloning vector pZC320 SopA,accession number U26464,Smith-Waterman Score=1559.

SEQ ID NO: 13626 - DNA, 1869 bp, Homo sapiens
  SIMILAR (268)..(1623): 721254mologous to multiple sclerosis associated retrovirus polyprotein,accession number AF009668,Smith-Waterman Score=1689.
ggaccaagaggaacaggcccaaaaggaaaagcgagatcagagaaaggctgcagccttagtcatggccctcagacaaacaaacctttggtggttcagaaaggacagaaaatggagcaggccaatcacccggtagggcttgttatcagtgtggtttacaaagacattttaaaaaagattgtccaacgagaaacaagccaccccctcatccatgtccgctatgccgaggcaatcactggaaggcgcactgccccggaggacaaaggttctctggggagggatatgttagccaaagctggagctattatctacatgaatatggggaacaagttacccatttggtgtcacctacttgaggaaggaatctaccttgaagtctgggcattggaaggacaatttggaagggcaaaaaatgcctgcccagtccaaatcaggttaaaagatcccaccacatttccttatcaaaggcaatatcccttaaggcctgaagctcataaaggattacaggatattgttaaacatgtaaaagctcaaggcttagtaaagaaatgcagcagtccctgcaacaccccaattctaggagtacaaaaaccgaacggtcagtggagtctagtgcaagatcttagactcatcagtgaggcagtaattcctctatatccagttgtacccaacccctataccctgctctctcaaataccagaggaagcagaatggttccctgttctggacctcaaggatgccttcttctgtattcccctgcactatgactcccatgactcccagtttctctttgcctttgaggatcccacagaccacacatcccaacttatatggaccgtcttgccccaagggtttagggatagccctcatctgtttggtcaggcactggcccaagatctaggccacttctcaagtccaggcactctggtccttcagtatgtggatgatttacttttggctaccagttcggaagcctcatgccagcaggctactctagatctcttgaattttctagctaatcaagggtacaaggcatctaggtcaaaggcccagctttgcctacagcaggtcaaatatctaggcctaatcttagccagagggaccaggacccttggcaaggaacgaatacagcctatactggcttatcctcaccctaagactttaaaacagttgtgggggttccttgaaatcactggcttttgctgactatggatcccaggatacagcaagatagccaggcccctctatactctaatcaaggagacccagagggcaaatactcatctagtagaatgggaatcagaggcagaaacagccttcaaaaccttaaagcaggccctagtacaagcgccaggtttaagccttcccacaggacaaaacttctctttatatgtcacagagagagccgggatagctcttggagtccttactcagactcgtgggacaaccccacaaccagtggcacacctaagtaaggaaactgatgtagtagcaaaaggctggcctcactgtttaagggtagttgcagcagtggccgtcttagtgtcagaggctatcaaaataatacaaggaaaggatctcattgtctggactactcatgaagtaaatggcatactaggtgaaaaggaagtttatggctatcagacaaacgcctatttagataccaggcgctctgccttgagggactggtgcttcaaatacgcacgtcctgtggcagccatcttgctgttactcgcctttgggccctgtatttttaaccttcctgtcaaatttgtttcctctagaatcgaggccatcaagctacagatggtcttacaaatggacccccaaatcagttcaactaacaacttctaccgaggacccctggactga

SEQ ID NO: 13627 - DNA, 889 bp, Homo sapiens
  SIMILAR (64)..(867): 911254mologous to Cloning vector pZC320 SopA,accession number U26464,Smith-Waterman Score=1272.
tatccagctgacgatagacagtgaaactggtcgatccaagggatatggatttattacattttctgattcagaatgtgccaaaaagtctttggaacaatttaatggatttgaactagcagggaggccaatgaaagttggtcatgttattgaacgtgctgatgcttcgagtactagttcatttttggacagtgatgaactggaaaggactagaattgatttgggaacaactggtcgtcttcagttagtggcaagacttgcagaggatacagaggctattactattccgatgtctattcccatagattcatttggctcttctggaagtacatataaatggaatcatatggaagctgataggagaataagagtgagccacgtggagaagaatcaaggtattctggctgcattaaagagaataatggcccatgaagatgttcacatcctaattcctggaacctgcgaatattttatattacatgttaattttgagcagcatttccactgttctggaacatggatggagcatgaggctattatctttggcaaattaacgcaggaaaaaaaaaatcaaacaccacatgttctcacttataagttggagctaaatgatgagaatgcatggacacatagagaggaacaatacacactggggcctatcaaagggtggagggtaggggagtcggatttatcgaaccatgagggaagtggatgcctgggccgcacatgggtagcttggggagtatgcgcttccaaaagatcacaggaggctagggccagcaagattacactagaaaacagccacccacgacaggcaggccgagggaaaccagcgccttttgcggaaccgaggagtctaggagagctggaagctattgcagcagcaagatga

SEQ ID NO: 13628 - DNA, 2623 bp, Homo sapiens
  SIMILAR (40)..(420): 971254mologous to Cloning vector pZC320 SopA,accession number U26464,Smith-Waterman Score=657.
cgggctgggcggttccgcggcctgggcctaggggcttaacagtagcaacagaagcggcggcggcggcagcagcagcagcagcagcagcaatctcttcccgaacacgagcaccacaggcgcccgaaggccggaacaggcgtttagagaaaatggcagacgatattgatattgaagcaatgcttgaggctccttacaagaaggatgagaacaagttgagcagtgccaacggccatgaagaacgtagcaaaaagaggaaaaaaagcaagagcagaagtcgtagtcatgaacgaaagagaagcaaaagtaaggaacggaagcgaagtagagacagagaaaggaaaaagagcaaaagccgtgaaagaaagcgaagtagaagcaaagagaggcgacggagccgctcaagaagtcgagatcgaagatttagaggccgctacagaagtccttactccggaccaaaatttaacagtgccatccgaggaaagattgggttgcctcatagcatcaaattaagcagacgacgttcccgaagcaaaagtccattcagaaaagacaagagccctgtgagagaacctattgataatttaactcctgaggaaagagatgcaaggacagtcttctgtatgcagctggcggcaagaattcgaccaagggatttggaagagtttttctctacagtaggaaaggttcgagatgtgaggatgatttctgacagaaattcaagacgttccaaaggaattgcttatgtggagttcgtcgatgttagctcagtgcctctagcaataggattaactggccaacgagttttaggcgtgccaatcatagtacaggcatcacaggcagaaaaaaaacagagctgcagcaatggcaaacaatttacaaaagggaagtgctggacctatgaggctttatgtgggctcatcacacttcaacataactgaagatatgcttcgtgggatctttgagccttttggaagaattgaaagtatccagctgatgatggacagtgaaactggtcgatccaagggatatggatttattacattttctgactcagaatgtgccaaaaaggctttggaacaacttaatggatttgaactagcaggaagaccaatgaaagttggtcatgttactgaacgtactgatgcttcgagtgctagttcatttttggacagtgatgaactggaaaggactgggaattgatttgggaacaactggtccgtcttcagttaatgggcaagacttgcagagggtacaggtttgcagattccgccagcagcacagcaagctctacagatgagtggctctttggcattttggtgctgtgggcagaaatctcttttgttatagatttgcaaaacaagacttttctcaccagacttgaaacctcagctttatctgcagctgcctctggttcagccacttgcaacacaatgtttccaactctctaacatgtttaaccctcaaacagaaaaagaagttggatgggataccgagattaaggatgatgtgattgaagaatgtaataaacatggaggagttattcatatttatgttgacaaaaattcagctcagggcaatgtgtatgtgaagtgcccatccattgctgaagctattgctgctgtcaatgcattgcatggcaggtggtttgctggtaaaatgataacagcagcatatgtacctcttccaacttaccacaacctgtttcctgattctatgacagcaacacagctactggttccaagtagacgatgaaggaagatatagtcccttatgtatatagctttttttctttcttgagaattcatcttgagttatcttttatttagataaaaataaagaggcaaggatctactgtcatttgtatgcaatttcctgttaccttgaaaaaataaaaatgttaacaggaatgcagtgtgctcattctccctaaatagtaaatcccactgtatacaaaactgttctcttgttctgccttttaaaatgttcatgtagaaaattaatgaactataggaatagctctaggagaacaaatgtgctttctgtaaaaaggcagaccagggatgtaatgtttttaatgtttcagaagcctaactttttacacagtggttacatttcacatttcactaatgttgatatttggctgatggttgagcagtttctgaaatacacatttagtgtatggaaatacaagacagctaaagggctgtttggttagcatctcatcttgcattctgatcaattggcaagaaagggagatttcaaaattatatttcttgatggtatcttttcaattaatgtatctgtaaaagtttctttgtaaatactatgtgttctggtgtgtcttaaaattccaaacaaaatgatccctgcatttcctgaagatgtttaaacgtgagagtctggtaggcaaagcagtctgagaaagaaataggaaatgcagaaataggttttgtctggttgcatataatctttgctctttttaagctctgtgagctctgaaatatatttttgggttacttcagtgtgtttgacaagacagcttgatatttctatcaaacaaatgactttcatattgcaacaatctttgtaagaaccactcaaataaaagtctcttaaaaaggcc

SEQ ID NO: 13629 - DNA, 510 bp, Homo sapiens
  SIMILAR (1)..(465): 921254mologous to Homo sapiens ribosomal protein L21,accession number X89401,Smith-Waterman Score=752.
ctgaacgccgtcgagggcatcctggcctgcctcttcgtggagctcttccagagctggcagatcctggcgcgggcctggcgtgccttcttcaagctgctggctgtggtgctcttcctcttcacctcccgggagtactgtgacttcatgaggggctacttccatgaagaggccacgctctgctctcaggagcactgcatggatgatgtgtgtgggctcctgccttttctcaaccccgaggtgcctgaccagttctaccgcctgtggctatccctcttcctgcacgccgggatcttgcactgcctggtgtccatctgcttccagacgactgtcctgctggacctgaagaagctggcaggctggcaccgcatagccatcatctacctgctgagtggtgtcaccggcaacctggccagtgccatctttcttgcataccgagcagaggtgggtcctgctggctcccagatcggcatcctggcctgcctcttcgtggagctcttccagagctggcaa

SEQ ID NO: 13630 - DNA, 482 bp, Homo sapiens
  SIMILAR (25)..(246): 781254mologous to Homo sapiens Human breast tumour-associated protein 44,accession number Y48583,Smith-Waterman Score=279.
atagatgaccctaggtaagagccgtggaattccgcaggtctgggacctgattgcgggccacgaggcgcaattcggggcggagctgctgctcaggctcttcacggtgtaccccagcaccaaggtctacttcccgcacctgagcgcctgccaggacgcgacgcagctgctgagccacgggcagcgcatgctggcggctgtgggcgcggcggtgcagcacgtggacaacctgcgcgccgcgctgagcccgctggcggacctgcacgcgctcgtgctgcgcgtggacccagccaactttccgctgctaatccagtgtttccacgtcgtgctggcctcccacctgcaggacgagttcaccgtgcaaatgcaagcggcgtgggacaagttcctgactggtgtggccgtggtgctgaccgaaaaataccgctgagccctgtgctgcgcaggccttggtctgtgcctgtcaataaacagaggcccgaaaa

SEQ ID NO: 13631 - DNA, 1758 bp, Homo sapiens
  SIMILAR (1)..(270): 831254mologous to Gorilla gorilla interleukin-8 receptor type B,accession number X91114,Smith-Waterman Score=381.
atgctcagcgcccaggagcgcgcccaaatcgcgcaggtctgggacctgattgcgggccacgaggcgcaattcggggcggagctgctgctcaggtcggtagaggcggggtctccgggagctcaggaggtggagatgagggttttgggcgcgtgggccgccaacgccatccaaggtccttcgggtgcggatccccggggctctgggcggctcttcacggtgtaccccagcaccaaggtctacttcccgcacctgagcgcctgccaggacgcgacgcagctgctgagccacgggcagcgcatgctggcggctgtgggcgccgccgtgcaacacgtggacaacctgcgcgccgccctgaacccgcttgcggaactgcacgcgctcgtgctgcgcgtggacccagccaacttttcggtgaggcctttccggcccgggcaatggacccgcatgggagagaccgcggcttcgagacacctggggacacctggggacacctggggcggcgtccgcggtgaggactgggagacgctgctgcatctccgggacaccacttggggccgaggccaaggccccagggagcctgtggtctctatggaagaagggggccaattaatggatcttttggtcaatactggtgctgatttctctgtggtaactcgcccaattagcacccacaaaaagaactatgctgctatcatgggagctactagggccaaagacgtgacacctttttccaaatacaggagatgtgttattggaggacaagaagtgcagcatgagtttctatatatgccaaattcttcaatgcccttgttgaggagagacttgctccaaaaactgcaggcacaaatttcctttacacctaaagggaatgtgaccctggagatagggaagccaaaggcaatgatgactgtcctgcgggacctggagaagctggcaagctggcaccgcataaccatcatctacctgctgagtggtgtcaccggcaacctggccaagtgccatcttcctgccataccgagcagaggtgggtcctgctgggctcccagttcggcatcctggcctgcctcttccgtggaagctcttccagagctgggcagatcctgggcgcggccctggcgtgccttcttcaagcttgctggctgtgggtgctcttcctctttcacctttggggcttgttgccgtgggatttgacaacttttgcccacatcttcgggggttcatcagtggccctcttcctctccttcgccttcttgccctacatcagctttggcaaagttcgacctgtgccggaaacgctgccagatcatcatctttcaggtggtcttcctcgggcctcctggctggcctggtggtcctcttctacgtctatcctgtccgctgtgagtcgtgtgagttcctcacctgcatcccctttcactgacaagttactgtgagaagtacgaactggaacgctcagctccactgagctggctgcgggctccagcggccgtgtgctccagcaggccagagccagacacgacctccctgagccctacaggccttacaggagtcacctgctccatgtggggaactggcactgttttcctgaacacagacctctttcttgtgccttgttcacttctgttgaacccctcgtacttgccgggcatttattatactacttcctgtcataaccttctaacttgtttcttgacgaccacctcatgtggccaataaatggactgggagcgttttagctgccattaacttgaaaaaaaa

SEQ ID NO: 13632 - DNA, 395 bp, Homo sapiens; identical to SEQ ID NO: 4149
  SIMILAR (2)..(196): 381254mologous to Human endogenous retrovirus K pol protein,accession number Y17833,Smith-Waterman Score=101.
  misc_feature (1)...(395): n = a,t,c or g

SEQ ID NO: 13633 - DNA, 988 bp, Homo sapiens
  SIMILAR (541)..(648): 501254mologous to Homo sapiens Gag-Pro-Pol protein,accession number AF164614,Smith-Waterman Score=102.
  misc_feature (1)...(988): n = a,t,c or g
atggctgtgaacaagacatataagatttccattctcatgggatttaacttatggaagatatacaagcataaagatttgatcaggattgatgacatctcatgcactttggcaaataatgaggaaggaataataacaaaaatgctggtaacagagtcagtacccatagaaaggggtctcgatccacaccccaagagagggttcctggttcttgcacaagaaagaattcagggtgagtccatagtgcaaagcaaaagccagtttattatgaaagctggaattcagcaagctagacgtgagggtgattcagaggtttggcagttccctgttagaatacaccccccagatcaacagggaaatattacagctacatttgagccttttccttttaaattcgggaaagcacatttagttgattatatcaaggcctgtgatgatatcagagctgagcaagactgtgaatggtttgcatttacaattcctgcagtaaagaacctgcagcctgctaagcattttcattgtttcacagatgggtctagtcatggtaaagcttattattctgaatcaagaggccaaaatcaacagccaatttggataccatcaagacacctgaaaacttatcatgagccagatgctgaggaaaagatttcgggaggaaactgtggaccccacccccacccccggttgcagccatgtccagactgacgctgaggaagaccccaactgtcacgagcaacacctgtcaaacacagccacccacctggagacagatcaagaagctgtcacagatggtggaagaaaacctgaggaaagcaggacaaccagtcacaatgaataatttaatggcagctatgatagcggntatcaccactgcctctgcagatgcagatcccgattcctgcaagaagtagctcaccgtgacaaagcagcccttgcttttatctccttacaaatcaaagaagggagagatgttgggagcaagctccccaaa

SEQ ID NO: 13634 - DNA, 483 bp, Homo sapiens; identical to SEQ ID NO: 4563
  SIMILAR (207)..(482): 831254mologous to Oryza sativa glyceraldehyde-3-phosphate dehydrogenase,accession number U31676,Smith-Waterman Score=401.

SEQ ID NO: 13635 - DNA, 361 bp, Homo sapiens
  SIMILAR (1526)..(1837): 581254mologous to Homo sapiens 60S ribosomal protein L30 isolog,accession number AF201949,Smith-Waterman Score=257.
tcgccgatttcgtgctggcgctgggtacgtcgtggagtccactggcgtcttcaccaccatggagaaggctggggctcatttgcaggggggagccaaaagggtcatcatctctgccccctctgctgatacccccatgttcgtcatgggtgtgaaccatgagaagtatgacaacagcctcaagatcatcagcaatgcctcctgcaccaccaactgcttagcacccctgcctctactggcgctgccaaggctgtgggcaaggtcatccctgagctgaacgggaagctcactggcatggccttccgtgtccccactgccaatgtgtcagtggtggacctgacctgccgtctagaaaaacctgcca

SEQ ID NO: 13636 - DNA, 369 bp, Homo sapiens; identical to SEQ ID NO: 4565
  SIMILAR (157)..(246): 901254mologous to Amanita phalloides glyceraldehyde-3- phosphate dehydrogenase,accession number AF044199,Smith-Waterman Score=144.

SEQ ID NO: 13637 - DNA, 1377 bp, Homo sapiens
  SIMILAR (311)..(886): 711254mologous to Homo sapiens uracil DNA glycosylase,accession number X53778,Smith-Waterman Score=622.
  misc_feature (1)...(1377): n = a,t,c or g
ggcacgaggcgacagtcagccgcatcttcttttgcgtcgccagccgagccacatcgctcagacaccatggggaaggtgaaggtcggagtcaacggatttggtcgtattgggcgcctggtcaccagggctgcttttaactctggtaaagtggatattgttgccatcaatgaccccttcattgacctcaactacatggtttacatgttccaatatgattccacccatggcaaattccatggcaccgtcaaggctgagaacgggaagcttgtcatcaatggaaatcccatcaccatcttccaggagcgtttatccctccaaaatcaagtggggcgatgctggcgctgagtacttcgtggagtccactggcgtcttcaccaccatggagaaggctggggctcatttgcaggggggagccaaaagggtcatcatctctgccccctctgctgacgcccccatgttcgtcatgggtgtgaaccatgagaagtatgacaacagcctcaagatcatcagcaatgccttcctgcaccaccaactgcttaacaacccttggccaaggtcatccatgacaactttggtatcgtggaaggactcatgaccacagtccatgccatcactgccacccagaagactgtggatggcccctccgggaaactgtggcgtgatggccgcggggctctccagaacatcatccctgcctctactggcgctgccaaggctgtgggcaaggtcatccctgagcttgaacgggaagctcactggcatggccttccgtgtccccactgccaacgtgtcagtggtggacctgacctgccgtctagaaaaacctgccaaatatgatgatatcaagaaggtggtgaagcaagccgtcggagggccccctcaagggcatcctgggctacactgagcaccaggtggtctcctctgacttcaacagcgacacccactcctccaccttcgacgctggggctggcattgccctcaacgaccactttgtcaagctcatttcctggtatgacaacgaatttggctacagcaacagggtggtggacctcatggcccacatggcctccaaggagtaagacccctggaccaccagccccagcaagagcacaagaggaagagagagaccctcactgctggggagtccctgccacactcagtcccccaccacactgaatctcccctcctcacagtttccatgtagaccccttgaagaggggaggggcctagggagccgcaccttgtcatgtaccatcaataaagtaccctgtgctcccaaaaaaagagaggaagaacatgccacaattagtnnnnnnnnnnncagaaaatcccctccctaaaaattatcatgtaaacccctgtgggggggggcgggcg

SEQ ID NO: 13638 - DNA, 483 bp, Homo sapiens; identical to SEQ ID NO: 4563
  SIMILAR (409)..(1488): 1001254mologous to Homo sapiens interleukin 8 receptor B,accession number M94582,Smith-Waterman Score=1850.

SEQ ID NO: 13639 - DNA, 361 bp, Homo sapiens; identical to SEQ ID NO: 13635
  SIMILAR (14)..(226): 971254mologous to Homo sapiens glyceraldehyde 3-phosphate dehydrogenase (EC 1.2.1.12),accession number J02642,Smith-Waterman Score=352.

SEQ ID NO: 13640 - DNA, 369 bp, Homo sapiens; identical to SEQ ID NO: 4565
  SIMILAR (157)..(246): 901254mologous to Amanita phalloides glyceraldehyde-3- phosphate dehydrogenase,accession number AF044199,Smith-Waterman Score=144.

SEQ ID NO: 13641 - DNA, 1377 bp, Homo sapiens; identical to SEQ ID NO: 13637
  SIMILAR (2515)..(1631): 831254mologous to Homo sapiens putative p150,accession number U93572,Smith-Waterman Score=1208.
  misc_feature (1)...(1377): n = a,t,c or g

SEQ ID NO: 13642 - DNA, 495 bp, Homo sapiens
  SIMILAR (1)..(192): 951254mologous to Rattus norvegicus PKC mu,accession number AB020616,Smith-Waterman Score=332.
  misc_feature (1)...(495): n = a,t,c or g
gaggtcctaaggaacaangggtacaatcgctctctagacatgtggtctgttggggtcatcatctatgtaagcctaagcggcacattcccatttaatgaagatgaagacatacacgaccaaattcagaatgcagctttcatgtatccaccaaatccctggaaggaaatatctcatgaagatgttgacttgatacaatataatacctatatcttggggtgcttgagtagtcattgcactgcttgatcctcacagcaatcctctggtctcagttttcttttctgatatggtgatgctaattcctaccttactgggttattatatacaatatcaggacatgtaacttgttcatgttacagattgccatgaaaatagtgagaataagaaaagaagcacaagtatcttttttcaggaataaagaagaaacaactataaacaccagggaaatacaaaaagttgtataacaaagtcgtgtataataaagatgcaactaacaaa

SEQ ID NO: 13643 - DNA, 3742 bp, Homo sapiens
  SIMILAR (163)..(276): 891254mologous to Escherichia coli succinate dehydrogenase large subunit,accession number J01619,Smith-Waterman Score=175.
gaattccttctctcctcctcctcgcccttctcctcgccctcctcctcctcctcgccctcccctcccgatcctcatccccttgccctcccccagcccagggacttttccggaaagtttttattttccgtctgggctctcggagaaagaagctcctggctcagcggctgcaaaactttcctgctgccgcgccgccagcccccgccctccgctgcccggccctgcgccccgccgagcgatgagcgcccctccggtcctgcggccgcccagtccgctgctgcccgtggcggcggcagctgccgcagcggccgccgcactggtcccagggtccgggcccgggcccgcgccgttcttggctcctgtcgcggccccggtcgggggcatctcgttccatctgcagatcggcctgagccgtgagccggtgctgctgctgcaggactcgtccggggactacagcctggcgcacgtccgcgagatggcttgctccattgtcgaccagaagttccctgaatgtggtttctacggaatgtatgataagatcctgctttttcgccatgaccctacctctgaaaacatccttcagctggtgaaagcggccagtgatatccaggaaggcgatcttattgaagtggtcttgtcacgttccgccacctttgaagactttcagattcgtccccacgctctctttgttcattcatacagagctccagctttctgtgatcactgtggagaaatgctgtgggggctggtacgtcaaggtcttaaatgtgaagggtgtggtctgaattaccataagagatgtgcatttaaaatacccaacaattgcagcggtgtgaggcggagaaggctctcaaacgtttccctcactggggtcagcaccatccgcacatcatctgctgaactctctacaagtgcccctgatgagccccttctgcaaaaatcaccatcagagtcgtttattggtcgagagaagaggtcaaattctcaatcatacattggacgaccaattcaccttgacaagattttgatgtctaaagttaaagtgccgcacacatttgtcatccactcctacacccggcccacagtgtgccagtactgcaagaagcttctgaaggggcttttcaggcagggcttgcagtgcaaagattgcagattcaactgccataaacgttgtgcaccgaaagtaccaaacaactgccttggcgaagtgaccattaatggagatttgcttagccctggggcagagtctgatgtggtcatggaagaagggagtgatgacaatgatagtgaaaggaacagtgggctcatggatgatatggaagaagcaatggtccaagatgcagagatggcaatggcagagtgccagaacgacagtggcgagatgcaagatccagacccagaccacgaggacgccaacagaaccatcagtccatcaacaagcaacaatatcccactcatgagggtagtgcagtctgtcaaacacacgaagaggaaaagcagcacagtcatgaaagaaggatggatggtccactacaccagcaaggacacgctgcggaaacggcactattggagattggatagcaaatgtattaccctctttcagaatgacacaggaagcaggtactacaaggaaattcctttatctgaaattttgtctctggaaccagtaaaaacttcagctttaattcctaatggggccaatcctcattgtttcgaaatcactacggcaaatgtagtgtattatgtgggagaaaatgtggtcaatccttccagcccatcaccaaataacagtgttctcaccagtggcgttggtgcagatgtggccaggatgtgggagatagccatccagcatgcccttatgcccgtcattcccaagggctcctccgtgggtacaggaaccaacttgcacagagatatctctgtgagtatttcagtatcaaattgccagattcaagaaaatgtggacatcagcacagtatatcagatttttcctgatgaagtactgggttctggacagtttggaattgtttatggaggaaaacatcgtaaaacaggaagagatgtagctattaaaatcattgacaaattacgatttccaacaaaacaagaaagccagcttcgtaatgaggttgcaattctacagaaccttcatcaccctggtgttgtaaatttggagtgtatgtttgagacgcctgaaagagtgtttgttgttatggaaaaactccatggagacatgctggaaatgatcttgtcaagtgaaaagggcaggttgccagagcacataacgaagtttttaattactcagatactcgtggctttgcggcaccttcattttaaaaatatcgttcactgtgacctcaaaccagaaaatgtgttgctagcctcagctgatccttttcctcaggtgaaactttgtgattttggttttgcccggatcattggagagaagtctttccggaggtcagtggtgggtacccccgcttacctggctcctgaggtcctaaggaacaagggctacaatcgctctctagacatgtggtctgttggggtcatcatctatgtaagcctaagcggcacattcccatttaatgaagatgaagacatacacgaccaaattcagaatgcagctttcatgtatccaccaaatccctggaaggaaatatctcatgaagccattgatcttatcaacaatttgctgcaagtaaaaatgagaaagcgctacagtgtggataagaccttgagccacccttggctacaggactatcagacctggttagatttgcgagagctggaatgcaaaatcggggagcgctacatcacccatgaaagtgatgacctgaggtgggagaagtatgcaggcgagcagcggctgcagtaccccacacacctgatcaatccaagtgctagccacagtgacactcctgagactgaagaaacagaaatgaaagccctcggtgagcgtgtcagcatcctctgagttccatctcctataatctgtcaaaacactgtggaactaataaatacatacggtcaggtttaacatttgccttgcagaactgccattattttctgtcagatgagaacaaagctgttaaactgttagcactgttgatgtatctgagttgccaagacaaatcaacagaagcatttgtattttgtgtgaccaactgtgttgtattaacaaaagttccctgaaacacgaaacttgttattgtgaatgattcatgttatatttaatgcattaaacctgtctccactgtgcctttgcaaatcagtgtttttcttactggagcttcattttggtaagagacagaatgtatctgtgaagtagttctgtttggtgtgtcccattggtgttgtcattgtaaacaaactcttgaagagtcgattatttccagtgttctatgaacaactccaaaacccatgtgggaaaaaaatgaatgaggagggtagggaataaaatcctaagacacaaatgcatgaacaagttttaatgtatagttttgaatcctttgcctgcctggtgtgcctcagtatatttaaactcaagacaatgcacctagctgtgcaagacctagtgctcttaagcctaaatgccttagaaatgtaaactgccatatataacagatacatttccctctttcttataatactctgttgtactatggaaaatcagctgctcagcaacctttcacctttgtgtatttttcaataataaaaaatattcttgtcaaaaaaaaaaaaa

SEQ ID NO: 13644 - DNA, 854 bp, Homo sapiens
  SIMILAR (2389)..(2904): 1001254mologous to Escherichia coli BIOC,accession number A11534,Smith-Waterman Score=913.
atgagggctcgaaccaaggcagcagaggtgaggatgaagaaccttcatcaccctggtgttgtaaatttggagtgtatgtttgagacgcctgaaagagtgtttgttgttatggaaaaactccatggagacatgctggaaatgatcttgtcaagtgaaaagggcaggttgccagagcacataacgaagtttttaattactcaggtgaaactttgtgattttggttttgcccggatcattggagagaagtctttccggaggtcagtggtgggtacccccgcttacctggctcctgaggtcctaaggaacaagggctacaatcgctctctagacatgtggtctgttggggtcatcatctatgtaagcctaagcggcacattcccatttaatgaagatgaagacatacacgaccaaattcagaatgcagctttcatgtatccaccaaatccctggaaggaaatatctcatgaaggtggaaaaccagggcctccaagttcaggggaaggagaatcactttggactttaccagttaggactccactttcagaggagatagaatttaggccagtcagtgaagaatggaaagaaagagacatagcattttagcaagagggaattatacaggataattcaaaaggcatttatatttgactaggaagtacacattttacttggctatagaaatgtctaagcactaaaaatttcctaccactcagatgaagtgatatggagaccagctcagatgggagatagaaccctcacttttccaaatgactcaagtaccccccttatggctcactcttgcctttgaggcacaggcattttactgtttgcgaactaaagctctggatggcaaa

SEQ ID NO: 13645 - DNA, 477 bp, Homo sapiens
  SIMILAR (1)..(222): 701254mologous to Homo sapiens PRO2221,accession number AF116695,Smith-Waterman Score=258.
atggggagaaaccagagcagaaaagctgaaaatactaaaaatgagagtgcctcttctcctccaaaggatcgcaattcctcaccagtaagggaacaaagctggacggagaatgagtttgacgagttgacagaagtaggcttcagaaagttggtaataacaaacttctccgagctaaaggagcatgttctgaccgatcacaaggaagctaaaaaccttgaaaaaagtgttggaagtagtggccagggaaatcagtcaagagaaagaaataaaggtattcaattaggaaaagaggaagtcaaattgtccctgtttgcagatgacatgatgaattggaaagaaaactactttaaagttcatatggaaccaaaaagagcacgcattgccaagacaatcctaagcaaaaagaacaaagctggaggcatcatgctacctgacttcaagctattctacaaggctacagtaaccaaaacagcatga

SEQ ID NO: 13646 - DNA, 984 bp, Homo sapiens
  SIMILAR (267)..(4): 1001254mologous to Homo sapiens epithelial sodium channel beta subunit,accession number U16023,Smith-Waterman Score=459.
atggggagaaaccagagcaaaaaagctgaaaattctaaaaaccagagcacctcttctcctccaaaggatctcagctcctcgccagcaacagaacaaagctggatggagaatgactttgatgagttgacagaagtaggcttcagaagaataaacagtgtagagaagaccttaaatgatctgatggagctgaaaaccgtggcacaagaacttcatgatgcatgcacaagcttcaatagccgattcaatcaagcggaagaaaggttatcagtgattgaagatcaaatgaatgaaataaagcgagaagacaagatcaaaagagacaaagaaggccattacctaatggtaaagggatcaattcgacaagaagagctaactatcctaaatatatatgccaccaatacaggagcacccagattcataaagaaagtgcttagagacctacaaagagacttagactcccacacagtaatagtgggagactttaacaccccactgtcaatattagacagatcaatgagacagaaggttaacaaggatatccaggacttgaactcagctctgcaccaagcagacctaatagacatctacagaactctccaccccaaatcaatagaatgtacattcttagcaccacatcacacttattccaaaattgaccacatagttggaagtaaagcactcctcagcgaatgtaaaagaacagaaattataacaaactgtctctcagaccacagtgcaatcaaactagaactcaggattaagaaactcactcaaaactgcacaactacatgggaactgaacaacctgctcctgaatgactactgggtaaataatgaaatgaaggcggaaataaagatgttctttgaaaccaatgagaacaaagacacaacgtaccagaatctctgggacacatttaaagcagtgtgtagcgggaaattaacgcccacaagagaaagcaggaaagatctaaaatggacaccctaa

SEQ ID NO: 13647 - DNA, 882 bp, Homo sapiens
  SIMILAR (1)..(600): 941254mologous to Escherichia coli similar to arylsulfatases of Klebsiella pneumoniae and Homo sapiens,accession number M87049,Smith-Waterman Score=995.
atggggagaaaccagagcagaaaagctgaaaattccaaaaaccagagcacctcttctcctccaaaggattgcagctcctcaccagcaagagaacaaaattggacgaagaatgagtttgatgagttgacagaagtaggcttcagaagatcgttaatagcaaacttctccaagctaaaggagtgtgttctaacccatcgcaaggaagctaaaaaccttgaaaaaagtgatagggagaatggaaccaagttggaaaacactcttcaggatattatccaggagaacttccccaacctagcaaggcaggccaacattcaaattcaagaaatacagagaataccacaaagatactccttgagaagagcaaccccaagacacataattgtcagattcactaaggttgaaatgaaggaaaaaatgtcaagggcagccagagagaaaggtcgggttacccacaaagggaagccgatcagactaacagcggatctctcagcagaaaacctacaagccagaagagagtgtgggccagtgttcaacattcttaaagaattttcaacccagaatcccatatccagccaaactaagcttcataagtggaggagaaataaaatcctttacagacaagcaaatgctgagagattttttcaccaccaggcctgccttacaggagctcctaaaggaagcactaaacatggaaaggaacaaccagtacaagccactacaaaaacatgccaaatggtaaagaccatcaatcacttaacacagtggtttgcacccacagtttgctcatatgaggggaaaagtggttctatccacattttgatttctttgaaacaccatcaatttacgcttcccgagacatcacgaacacagctgcctgagtga

SEQ ID NO: 13648 - DNA, 1279 bp, Homo sapiens
  SIMILAR (40)..(87): 501254mologous to Homo sapiens Human secreted protein, SEQ ID NO: 4233,accession number G00152,Smith-Waterman Score=48.
atgaaagaacagaatgggggtggaggaagagaagaggaccacaaagacaaaggcatacggcagctgccttcactgctacctagtgctggcgaggccaagtctgacaagccagaacaccacaatagatacagaaaggaaatagcttcatttgaggatgaaaaaagggcaatgggagttgccaagatggccgaacaggaacagctccagtctgcagctcccagcatgaccaatgcagaagtgggaacagcccacggagggcgagctgaagcagggcggggcgttgactcacccgggaagcgcaaggtgttgggggatttccctttcctagccaagggaagccgtgacagactacctggaaaagcgggacactccctgcccaaatactatgcttttaccaaggtcttagcaaccggcagacaagaaaggaatagcatcaacatcagcaaaaaggtcatctacaccaaaaccacatctacaggtcaccaacatcaaagaccaaagatagataaaaccacaaagatggggagaaaccagagcagaaaagctgaaaattctaaaaatgagagcacctcttctcctccaaagggtcacagctcctcaccagcaacggaacaaagtgggacggagaatgactttgacgagttgacagaagtaggcttcagaaggtcggtaacaacaaacttctacgagctgaaggaggatgttcaaactcatcgcaaggaagctaaaaaccttgaaaaaagattagacaaatggctaactagaataaacagtgtagagaagaccttaagtgacatgatggagctgaaaaccatggcacgagaacttcgtgacacatgctcaagcttcaagagccgattcaatcaagtggaagaaagggtatcagtgattgaagatccaatttattgagttaagccgggaagacaaggttagagataaaaaagtaagaaacaaacaaagcctccaagaaatatgggactatgtcaaaagaccaaatctacgtgtgattggtgtacctgaaagtgatggggagaatggaaccaagttggaaaatatgcttcaggatattatccaggagaacttccccaacctagcaaggcaggccaacattcaaattcaggaaatacagagaacgccacaaagatactcctcgagaagagcaaccccaagacacataattgtcagattcaccaaggttgaaatgaagcaaaaagtgttaagggcagccagagagaaaggtccagttacccacaaagggaacagcggatctctcagctga

SEQ ID NO: 13649 - DNA, 1587 bp, Homo sapiens
  SIMILAR (1189)..(1584): 601254mologous to Homo sapiens p40,accession number U93567,Smith-Waterman Score=408.
atggtgaggtccctgagccctggtgccagtgcaccgcctaaggcctatcaggatgctgttcttccgagtggggcactagctgagatgcaagaccccatcatagtgagtgaaactcctcgtgttacaagatcagcatttctcagagatgtgcacaagggcattgccagcagcgttgttagtggtatgaagaataagaaacgaccaaatagccctgagcatgagactggactcataaattccaatatagtcaggggcaacgtctgggagaccctgaccgaagttatagaaaagcctgcaaatgaaggctctgctctggagaatggtcttccagctcacattccggctgaagaaggtgacaagggtttaattttgcttgctaattttgctaaacaaatagacaaaccaacaaacaaaagccctgccaatgccggcatccaacccaccagtaggaaagtcccccaagggaaaatgtatgcagtgtcagagtggcactgcgatgtctcctcgcccttccacacagagccccaaatccagcaggctctctgggctgagtcctgccctagcaggctcgagcatgaggaagctgggcggaggcagagtaggtctccagcccgcctccggaccctcgggctgtacccatgcagatctgctccatggatgccggccacctccctgtctaatgccactgtatattctgcacatattctcgctgctgacaaggccatccatttgcgttcacaaagactgttcggcattctagcaactcataggaagtgggagcacgttcccatcacgtgcactggggcttcgcggaaatgcttctctcctggcaataaaaagaagaaagaggaggaaatgactattttctgcaaacacagagaaaaactggctggccagggtgctccagtgcgcaccgtttcccacagctgctcgccccacctgggaagctttgcccagcctaactgggagacacctcccagtaggggccgacagatacccaggcaaacagggtctggagtgtacctccagcaaactccaacagacctgcagctgagaaacttgactgttagaaggaaaaccaacaagcacaaaggaacagcagcaacatcaacaaaaaggacaactcataccaaaactccatctgtaggtcaccatcatcaaagacgaaaggtagataaaaccacaaagatggggagaaaccagagcagaagagctgaaaattctaaaaatcagagtgcctcttctccttcaaaggatcgcagctcctcaccagcaacggaacaaagctggatggagaatgactttgacgagttgacagaagtaggcttcagaagatcagtaataacaaacttctctgagctaaaggaggatgttcgaatccatcgcaaggaagccaaaaaccttgaaaaaagattagacgaatggctaactagaataaacagtgtagagaagaacttaaatgacctgatggagctgaaaaccatggcacaagaacttcatgacacatgcacaagcttcaatacccaattcgatcaagtggaagaaagggtatcagtgattgaagatcaaattaatgaaataaagtga

SEQ ID NO: 13650 - DNA, 575 bp, Homo sapiens
  SIMILAR (453)..(566): 431254mologous to Homo sapiens Human secreted protein, SEQ ID NO: 5320,accession number G01239,Smith-Waterman Score=74.
agttcgtggaatttccaattcttcccccctaccccccgccacgcgaggctgctgcgcacgattgaagaatgtaccggattccactgaggaaggacctcctgaggaatgtcatctcgcacacagatgctcacaatatgattcaggaggattcacatatgtgcaacataagagaactggaacaacagatggaagatgcttaccgggggaccaaaaggaaaatgctacccagcagttcaagccggatgcgcagtgatggttttgatgaagaaagtcaaagatactattggaggccaaagaatgaaatttctgggacactggaagatgattttcttaaggctaaatcctggaatagaaagttctatgattatgaagcaaacatgccagacagatggggtcacagtggctataaagagttataccctgaagaatttgaaacagacagtagtgatcagcaagattttaccaacgggaagaaaacatctccccaggtaaagtcatctacccatgaatcccgcaaacacaagaagtcaaagaaatcccacaaaaaaaaagcagaaaaaaaacgtttgcggccg

SEQ ID NO: 13651 - DNA, 2296 bp, Homo sapiens
  SIMILAR (2)..(229): 1001254mologous to Escherichia coli O157:H7 glycerol dehydrogenase, (NAD),accession number AE005626,Smith-Waterman Score =392.
atggggagaaaccagagcagaaaagctgaagattctaaaaacgagagtacctcttctcctccaaaggatcgcagctcctcaccagcaagggaacaaagttggacggagaatgactttgatgagttgacagaagtcggcttcagaagccggatgcgcagtgatggttttgatgaagaaagtcaaagatactattggaggccaaagaatgaaatttctgggacactggaagatgattttcttaaggctaaatcctggaataaaaagttctatgattatgaagcaaacatgccagacagatggggtcacagtggttataaagagttataccctgaagaatttgaaacagacagtagtgatcagcaagatattaccaacgggaagaaaacatctccccaggtaaagtcatctacccatgaatcccgcaaacacaagaagtcaaagaaatcccacaaaaaaaagcagaaaaaaaggtcacacaaaaaacagaagaaaagcaaaaaggaagccacagatataacagcagattcctcgagtgagttctcagaagaaactggggcttctggtacaaggaaagggaaacaaccacataaacgcaagaaaaaatccaggaaaaagtctctcaaaaaacctgactttattcttagaggcagaaagtaacacttcacattcagatgattcagcatccagcagttctgaggaaagtgaggaaagagacactaagaaaaccaaaaggaaaaagagagagaaaaaagcccatacctctgtagccaacaatgaaatacaggagaggacaaacaaacggcacaaattggaaagtagctacagatgcaaaggtctgctgaggagctcagaggatgactaaatgggaaacacttttgttttccacatggactgtgggatatttacagttcttactccttgtgggttttgccagtgactcttgtttcaggcacggggcctgagggtcagagctgtcttgtgccatctgtatgttctgacagaccgtcttgtcttcctattttggcgttaagcttgatccccttttctttgttaaaagggaatctggtattttgttatgaaggttttcttgaaagagattttttttttttgcaattaattaccgtttagtgtagagtgccatattacgccaaatttaaaggaccccagaaagctggatcccaatagtgacctgggtacaccaatccggaataattgaaatttggggaagtccaagggctgggatccaagaggtgggattgggaactaatgccatgttaggatgggtatgaccaaggcaacactgtattgctctctgtttaaaatagcaggtgtccacaactaacttgtctttagccttgcgtgcttcgatccttctatattttgaccccacagcgtgtcgtccggtttacttaatcaggacatggcgcctaagaacaaacctttttccttcatgataacatccactagacaacttattagaagggactagagtttttggccaaatttccctgctggatgggggcctataagctatacttagtatatggcctaaaacatgggtaattggatagtaaatggttttctaagttccattgctgtatatttgcctaaaatggacttgtgttcaaaattatttcttcaattgtcatagataatcctgtaccaaatggggaagaattaggaaataatcatgttgtctaatggtactctggattcagggcagcaactgccatttaaatgttgtcttgttcatttctaaatctgttcatgaagtttaggttttcccctgaaactaaagttgaattatttccaaaatgaaaccaggcttctccagggacatatcccacttcttcccagtctgcctttgggattaaagcacccaagcagagaccacattaattccctttgctatactgtgatccttagtatgttaattcttaagaaaccaacatatcactgaaagaaggctggcagaacgcaagtgcattttttcactgtgggaagaaagatcaagtgacgtattattttttcctggttgtcacttaatgggctgagtaaaaagcttgaaaactcagactttcggtcttggttctgccactcattggttatgaggaggcccagagcaggtaagttcaccttcctggccttactttcctgatgtgtaatacggaattacttcacagtagcatgacagtataagacaccagcagtaggatacaactatggatggacatttccatgagttggtatttttagttctaactgctaaatttgttctctttacgggacagatttc

SEQ ID NO: 13652 - DNA, 1666 bp, Homo sapiens; identical to SEQ ID NO: 7228
  SIMILAR (5)..(385): 1001254mologous to Escherichia coli ferrienterochelin receptor protein,accession number M13748,Smith-Waterman Score=677.

SEQ ID NO: 13653 - DNA, 2367 bp, Homo sapiens; identical to SEQ ID NO: 7235
  SIMILAR (1309)..(1440): 651254mologous to synthetic construct aceA,accession number A31763,Smith-Waterman Score=143.

SEQ ID NO: 13654 - DNA, 224 bp, Homo sapiens
  SIMILAR (1)..(141): 911254mologous to Homo sapiens neurofibromatosis 1,accession number U17690,Smith-Waterman Score=211.
gttttattgactgataccaatactcaatttgtagagcaaaccctagatataatgaagaacttgctagataatcatactgaaggcagccctgaacatctagagcaagctagcattgaaacaatgatgttaaatctggtcaggaataagatggtggaatacctgacagactgggttatgggaacatcaaaccaagcagcagatgatgatgtaaaatgtcttacaag

SEQ ID NO: 13655 - DNA, 7790 bp, Homo sapiens; identical to SEQ ID NO: 7229
  SIMILAR (175)..(573): 931254mologous to synthetic construct aceA,accession number A31763,Smith-Waterman Score=656.

SEQ ID NO: 13656 - DNA, 8962 bp, Homo sapiens; identical to SEQ ID NO: 7234
  SIMILAR (1639)..(3816): 611254mologous to Homo sapiens melanoma-associated chondroitin sulfate proteoglycan (MCSP),accession number X96753,Smith-Waterman Score=2036.

SEQ ID NO: 13657 - DNA, 9026 bp, Homo sapiens; identical to SEQ ID NO: 7231
  SIMILAR (1)..(2139): 1001254mologous to Homo sapiens cAMP-specific phosphodiesterase 8A,accession number AF056490,Smith-Waterman Score =3716.

SEQ ID NO: 13658 - DNA, 5049 bp, Homo sapiens; identical to SEQ ID NO: 3643
  SIMILAR (145)..(438): 591254mologous to Homo sapiens BC85722_1,accession number AC006486,Smith-Waterman Score=255.

SEQ ID NO: 13659 - DNA, 2301 bp, Homo sapiens
  SIMILAR (1881)..(1330): 441254mologous to Homo sapiens BC85722_1,accession number AC006486,Smith-Waterman Score=319.
atgaccattgttaggagtcgaatgtcccatctgagtggaggaggatgcgcagatttgtctgacacagactccctacaggaatggatcaacatgactggcttcctttgtgcccttgggggagtgtgcctccagcagagaagtaattctggcctggcaacctatagcccacccatgggtccagtcagtgaatgtcagggttccatgatttcagtgatgtcctcagagggaaacgcaggtacacctgtcagcaaatgtatggatcagctgttgtccttaatggtgtgtaaccatgagaaagtgggacttcaaatacaggccaatgttaaggaactggtgggtctagaattgagtcctgctctttatctgatgctatttaacaaactgaagaatgccatcagcaagttttttgactcccaaggacaggttttattgacggataccaacactcaatttgtagagcaaaccatagctataatgaagaacttgctagataatcatactgaaggcagctctgaacatctagggcaagctagcattgaaccaatgatgttatatctggtcaggtatgttcgtgtgcttgggaatatggtccatgcaattcaaataaaaacgaaactgtgtcagttggttgaagtaacgatggcaaggagagatgacctcttattttgccaagagatgaaatttaggaataagattgtagaatacctgacagtctgggttatgggaacatcaaaccaagcagcagatgatgatgtaaaatgtattacaagatacttcacactatttatgaaccttttgagtgactgcagtgaagctgaagatgaaagtgcacaaacaggtggcaggaaacgtggcatgtctcggaggttggcatcacggaggcactgtgcagtccttgcaatgtcaaacttactcagtgccagcatagacggtggtctcatgcactccatagaaacggtattggctgatgggtttgagcaattggtggaactggtcacagtgatgggtgatcaaggagagctccctatagcgatggctctggccagtgtggttccttgttctcagtgggtgcccaagaattcccatccctccatggttcaaataatagaactactgatctgtctttgtaaacctgcaaacctgatcattgagaagtctgcatcactattgatgacaacttatggttcttcattaagtgacccagttcatttgctggaagattggctgcctgttagcgcagaaaaagatcctttttctagtgaatatcattgcaaagtgaaacaggaagagtggaaaggcattttaccagagcaaggcatagaagagtcattcaaaaaagcaacactaggaaaagcaacactgggaagatatgagagctgtggccttgaaaatttatgcttatggaaaaactgggaaagtataggtgaaggacaaaaagaatgttataatttatgtagccaatatttgacaacttctcataacaaaaatttaactgtgaaaggagatgaagaacatagaatatttctgaagaagcctcagtttctgccagctactcctacagaaccatgtattcctaaaactattacaaatgtaatgaatgtgagaaagtgttttatcaatcctcaaagtatccatattcaagaaaagccttacaaccctaatgaatgtggtgaaacttctaacccatcctcaaaacttactcaacatcgaagaacttatattggagagagctcacaaagatgtaataaaaaatgtataatagtctttagtcagtcacatctgaagagacataagataattaacactggagagaaatcagtaaaatgtaaagaacgtggcaaagcttttaccaggggcttacaacttggacatcagaaaattcatactggagagaaaccttacaaatgtgaaaaatgtgacaaagcctttaagaagagctcacaccttgctcaacatcagagaatccatactggaaacaaacctatcaaagaatccatactggagagaaagccttcaaatgtaaagaatgtggcaaagcctttaatagaagctcatacattactcagcatcagagaattcacactggagggaaacctttcaagtgtcaaaaaatgtggcaaagcttttaacagagcttcacaccttactcaacatcagagaatacatactggagagaaacacttcacacataaagaatgtggcaaagcctttaacaggggctcacaccttactcgacatcagagaatccacactggagagaagtctttcaaatgtaaagaatgcagcaaagcttttatctag

SEQ ID NO: 13660 - DNA, 5551 bp, Homo sapiens
  SIMILAR (175)..(1155): 861254mologous to Homo sapiens HuR RNA binding protein,accession number U38175,Smith-Waterman Score=1423.
gacctttatttgttacttttgagctacagtgacaagaaagatcacctaactgtggaagaactggctcagtttttgaaggtggagcaaaagatgaataatgtgacaacggactattgtcttgacatcataaagaagtttgaagtttcagaagaaaataaggtgaaaaatgttcttggcatagaaggcttcacgaacttcatgcgtagtcctgcctgtgacatatttaacccattgcaccatgaagtgtaccaagacatggatcagcccctctgcaactactacattgcttcctctcacaatacatacctgactggagaccagctcctttctcagtccaaagtggatatgtatgcacgggtgctgcaagagggctgtcgctgtgtggaagttgactgttgggatggcccagatggagagccagtagtacatcatggttacactctcacttcaaaaattctcttcagagatgttgtggagaccatcaacaagcatgcctttgtgaagaatgagtttcctgttatattgtctatcgagaatcactgcagtatccagcagcaaaggaagattgctcagtacctgaaaggaatattcggagacaaactggacctgtcatctgttgatacaggggagtgcaagcagcttccaagccctcaaagtttgaaaggcaaaattctagtgaagggtaagaagttgccttatcaccttggggatgatgcagaggaaggggaagtttccgatgaggacagtgcagatgaaattgaagacgagtgcaaattcaagctccattatagtaatgggaccactgagcatcaggtggaatctttcataaggaaaaaactggagtcactgttaaaagaatctcaaattcgagataaagaagatcctgatagtttcacagtgcgggcactactgaaggccacgcatgaaggcttaaatgcacacctgaagcagagtccagatgtaaaggaaagtggaaagaaatcacatggacgatccctcatgaccaactttggaaaacataagaaaactacaaaatcacggtctaaatcttacagtactgatgatgaggaagacacacagcagagtactggcaaggagggtggccagctgtacagattgggtcgccgaaggaaaaccatgaagctctgccgagaactctctgatttggttgtgtacacaaactccgtggccgctcaggacattgtggatgacggaaccacaggaaatgtgttatcattcagtgaaacaagagcacatcaggttgttcagcaaaaatcagagcagttcatgatttataatcaaaagcaactcacgaggatttacccctctgcctaccgcattgattccagtaacttcaaccctctcccctactggaacgcaggctgccagctagtggcactgaattatcaatctgaaggacgaatgatgcagttaaaccgagccaaattcaaggcaaatggcaattgtggctatgtcctcaaaccccagcaaatgtgcaaaggtactttcaaccctttctctggtgaccctcttcctgccaaccccaaaaagcagctcatcctgaaagttatcagtggacagcaactccccaaacctccagactccatgtttggagatcgaggcgagatcattgacccttttgttgaagttgaaattattggattgccagtagattgttgtaaagatcaaacccgtgtggtagatgacaatggatttaaccctgtgtgggaagaaacactgacatttacagtacacatgccagaaatagctttggttcggttccttgtgtgggatcacgatcccattggacgagactttgttggacaaagaactgtgaccttcagcagcttagtgcctggctaccggcatgtctatttggaaggactgacagaagcatccatatttgtacacataaccatcaatgaaatctatggaaagtggagccctttaatactcaaccccagttatactatattgcactttctaggagctacaaagaacagacaactccagggtctgaagggactgttcaataagaatcctaggcacagttcttcagaaaacaattcccattatgtacggaagcgatccattggagatagaattctgcgacgcacagctagcgccccagccaaaggcaggaaaaagagcaaaatgggcttccaagaaatggtggagataaaggattctgtgtccgaggccacaagagatcaagatggcgtgctgaggaggaccacacgcagtttgcaagcacgccctgtctctatgcctgttgacagaaaccttctgggagctttgtcgctgcctgtatctgaaacagcaaaagacattgaaggaaaagaaaactctctagtacaaatctgaataggaaacaacttaagcagaagataaagatggcagaagaaaagggaaagcaagtataaaagatccacattttctaaatttcaacaaaaagttatcatcctcctccagtgctctgctccacaaagataccagccaaggggacaccattgtatctactgcccacatgtcagtcacaggagaacagctgggcatgtcaagtcctaggggtgggagaaccacatcaaatgccacaagcaattgccaggaaaacccctgtcccagcaagtctctctccccaaagcagcatttggctcccgatcctgtagttaaccccacacaagatctgcatggtgtgaaaatcaaggaaaagggtaatcctgaggactttgtggaagggaaaagcatcttgtcaggaagcgtcctttctcatagcaacctagaaattaagaacctggaaggtaataggggtaagggccgagctgcaacatccttttctttgtcagacgtctccatgctctgttctgacatacctgacctacattcaactgcaattctgcaggagagtgtaatttcccatcttattgacaatgtcactttaacaaatgagaatgagccgggcagttccatctcagccctgattggccagtttgatgagaccaacaatcaggctctcacagttgtttctcatcttcataataccagtgtgatgtcaggccattgtcccttgcctagcctgggcctaaaaatgcccatcaagcatggtttttgcaagggaaaatccaagtcttccttcctgtgctcatctccggagctgatagcactctcgagttctgagaccaccaaacatgcaacgaacacagtttatgaaactacctgcactcccatctctaaaaccaaaccagatgatgacctttctagtaaggccaagacagcggccttagaaagcaacctgcctggatcccctaatacttctcgtggctggttaccaaaaagtcctaccaagggagaagactgggaaacactgaagagctgcagccctgcctcttcccctgatttgaccctggaggatgtaatagctgatcccactctctgtttcaattctggggagagcagccttgtggaaattgatggagaatcagaaaatctttctctaacaacctgtgaatataggagagagggcacaagtcaacttgcttctcctttaaaactcaagtacaatcagggtgtggtagaacactttcaaagaggtttgagaaacggctactgtaaagagaccctccgcccttctgtccctgaaatattcaacaatattcaagatgtcaaaactcaaagtatttcttatctagcctatcagggtgctggctttgtgcataatcatttctcagattcagatgcaaaaatgttccagacctgtgtgccccagcaatctagtgctcaagatatgcatgtccctgtacccaagcagttggcacatcttcctttgcctgctctgaaactgcctagtccttgcaaatccaaaagtctgggggacttaacatcagaggacattgcctgcaattttgagagcaagtaccagtgtattagtaagagttttgttacaactggcattagagacaagaagggcgtgactgtgaagacaaagtcgttagagcctatagatgccctgaccgagcagcttcggaagcttgtgtcctttgaccaggaagacaactgccaagtgctatattcaaagcaggatgccaatcagctcccccgggcactggtcaggaagttgtcatccagaagtcagagcagagtgcgcaatattgctagtcgtgccaaggagaaacaggaagccaacaagcagaaagttccaaaccccagcaatggggcaggagtggttcttagaaacaaaccctcagcacccacccctgcagtgaatcgccactccaccggctcctacatcgcaggctacctgaagaacacgaaagggggtggccttgaaggccggggcatcccagagggggcatgcacggctcttcactatggccacgttgaccagttttgttcagataattctgttttgcagactgagccaagcagtgatgataaaccagaaatttattttcttttgagactgtgaattatttaaaactgcattcttaaggttttcaaggtattctgtagaatgtcagagttttcagtaaataagttccttggctttggaatgattttcaaatgtatttttaaacttgtatttgggtctccctttgacttcatgtgttctccctgttaatgcgtttgtatatagatttggtgacatttcccatgtacctattatgatctttctcccttgagttgttgtaaactgtatcagtatgaaatatgtgcatgccctagatgtgaaactcctcagcagctcgggttataatgtgtgtgtgtttcaccaagatgtcctttactgtgtcctcagattgcagtcacaaatgtagtcatttttactctctaactgttgagttgattaagagactttgcaaacgacaaagggatgaattccttactttaatctgttatcatttttcctatgtttccctctttgttcagaagcccagatgcatttttataactcagttttaaaaactttaaaatagttaccttgccttttaggatgttcttatcccacccataatgagagttgaaaggggatggatagctgctccccatgcccttcccactttttggaataggccgtgagggtgtgaggaagaaggctgtcttttgtacataaggacaaaattgtttgttttacataaattttgttacatatttttgctaatggctttgtatgtaacaagaagcgagttgccaaactacctgttgtacttttgaattttctgattgaattacagactgcgaacaacggctttcagaatgagggacttccatcagactctaatgataatagtagcacaaattgaaaacttccccaaagctttcacagaatattttctcataataaaatccaagtgaacagataattagaagaaacccttttccttcagggaaccaagcaactctattttagtactgacatgcattattttcactgtgaattcacttttttattgcatgttcagatgtccctctttgttttttttttttgtaacattaactgcaatgatgttcttcctggaattcatgaaaatataattaaaacacatttttaaac

SEQ ID NO: 13661 - DNA, 2049 bp, Homo sapiens
  SIMILAR (670)..(1851): 971254mologous to Homo sapiens unknown,accession number AF149422,Smith-Waterman Score=2086.
atgagtaaaagctccctccagcctccccagagaagccaagcagatgctggcaccatgcttctggtacaacctgtagaatgtactttcaaccctttctctggtgaccctcttcctgccaaccccaaaaagcagctcatcctgaaagttatcagtggacagcaactccccaaacctccagactccatgtttggagatcgaggcgagatcattgacccttttgttgaagttgaaattattggattgccagtagattgttgtaaagatcaaacccgtgtggtagatgacaatggtaacattaaaagatggcaagaaccaaatgttagtgaggatgaagcagttgaattctcaaacactacttatggttgtgcacatttgtgcaagcacagttcttcagaaaacaattcccattatgtacggaagcgatccattggagatagaattctgcgacgcacagctagcgccccagccaaaggcaggaaaaagagcaaaatgggcttccaagaaatggtggagataaaggattctgtgtccgaggccacaagagatcaagatggcgtgctgaggaggaccacacgcagtttgcaagcacgccctgtctctatgcctgttgacagaaaccttctgggagctttgtcgctgcctgtatctgaccacgcaaaagccattgaaggaaaagaacactctctagcagaagataaagatggcagaagaaaagggaaagcaagtataaaagatccacattttctaaatttcaacaaaaagttatcatcctcctccagtgctctgctccacaaagataccagccaaggggacaccattgtatctactgcccacatgtcagtcacaggagaacagctgggcatgtcaagtcctaggggtgggagaaccacatcaaatgccacaagcaattgccaggaaaacccctgtcccagcaagtctctctccccaaagcagcatttggctcccgatcctgtagttaaccccacacaagatctgcatggtgtgaaaatcaaggaaaagggtaatcctgaggactttgtggaaggagaaaagcatcttgagagtgtaatttcccatcttattgacaatgtcactttaacaaatgagaatgagccgggcagttccatctcagccctgattggccagtttgatgagaccaacaatcaggctctcacagttgtttctcatcttcataataccagtgtgatgtcaggccattgtcccttgcctagcctgggcctaaaaatgcccatcaagcatggtttttgcaagggaaaatccaagtcttccttcctgtgctcatctccggagctgatagcactctcgagttctgagaccaccaaacatgcaacgaacacagtttatgaaactacctgcactcccatctctaaaaccaaaccagatgatgacctttctagtaaggccaagacagcggccttagaaagcaacctgcctggatcccctaatacttctcgtggctggttaccaaaaagtcctaccaagggagaagactgggaaacactgaagagctgcagccctgcctcttcccctgatttgaccctggaggatgtaatagctgatcccactctctgtttcaattctggggagagcagccttgtggaaattgatggagaatcagaaaatctttctctaacaacctgtgaatataggagagagggcacaagtcaacttgcttctcctttaaaactcaagtacaatcaggccaaagcccaatccagagcaactctcttaaattttgtgaaggctgagagaggtgaggaagctgcagaagaaaagtctggagctagcagagtttggtatatgaagtttaaggcaagaatccatctccataacataaaagtgcaaggtgaagcagcaagtgttggtggagaagctgcagcaagggatctacaaggtttagctaagataattgatgaaggctccacttctagttctcttgttatttctaacacatctacagtgactttctccactgaagtcttgaacccctcaacgtcatccatcaggattggaatcatcttcttctaa

SEQ ID NO: 13662 - DNA, 1506 bp, Homo sapiens
  SIMILAR (65)..(172): 441254mologous to Homo sapiens Human secreted protein, SEQ ID NO: 6477,accession number G02396,Smith-Waterman Score=87.
atgtgcaatgctgctccggggattgtttctgttttgtttctcgatgttttacccaacttggtgaagaaaaagaaaagaaaaatggataccacaaaatgtcctctctactcctccccaccacccactggcagcatgcggggatgcacgcacatgcacacgcacacacacgcgcacacacacacacacacacacactcttccagaatggaagggatggcagctgaatgcagtatcactcacatttatacctgccctagatgccatcatcagatctccccctcgtggcctcaccaagcactgctggccagcaacaaacacaggagaagaggggacgcctaaatacaccagttttgtgggagcgggtctggtattaaagaaacaaaccctggagggatcggctctccacgcgccagctgtgtgcaacgccacccaagggtgcatccaccctgaagatgaagggtgtggagctaaaacaaacacccacgcagccatggcattttctgagattcaaaattctcaacaagagaaactccaactaaaactcaaaaaagatacttcagaaccagcacctccgagacgcaagagggtaccttctggcagtggactatggacccatcagttacacggcaagcattcagcactgaattcttttccaagaagattgtttaaaaacaagcaacataaacggaaaactcccacagattttatggaaggcactattctgaaactggaggctgcagctcggtttgcgggaaagatgctgaactccagtgttttcgtcggaacaacaaggcttggtggggtggtgaggggtaaaggcctccccactgacccagctggcacagatctagcctccattacatgccacatgctggctctgaaactctctgctagggctcctcagagacttcagaacccaatagtctgtggggtacccctcctatacaaacctaacaccgactacgcctacagggcagctttcaccaacaccactgaggatgccttgctggggaaaactagagaggcaatccttccttccatgcttgtcagggccgcagcagtctcagctcgccaagccctagggacaggcaatcccttgcacagagtttctcacagaggggctaagaaatcggccagcagggatgtcaacatccactaccaagaacagccacttgatggcaatcttaacctattcccttggaattcgtccataaagggagaccccagaaggctagaagcaccaagcatgggctgcacaacgtggacagagctaagaaggacgtccctgcttgacctgagtgtgcggcagtgcggcgatgaacggatagagaaccccacaccaacaagcactgttgggttcttctccatatctaggcttctctggggactaggcagaagtggctataggctctgcagtcagacagctcaggagcatggaaacctctcgagctccatggcgcactcacattgggtttctcatcagactgaaatgcaagtggacagatga

SEQ ID NO: 13663 - DNA, 816 bp, Homo sapiens
  SIMILAR (107)..(12): 621254mologous to Homo sapiens Human secreted protein encoded by gene 10 clone HDPGP94,accession number B12310,Smith-Waterman Score=97.
atgcattttaaaaagtgggcaaaggacctgaacaggcgtttatcaaaagaagacatacaaatgacccgcaagttcctgaaaaaacattcaacatccctgatcatcagctataaggcttcacatactgtagccccggactttatccatgaaaatgtctcccagaagtctctcctggctcagcatgtttcagcagccacacccttctctctgttccttaaggatgccaagctcattcgcagcttggcgtatttgcataagctgtttcctccacccaaggtgccctttaccctaaacatctcacgcttacttctacagcttagcagcataaactcatcttcaggcatcagctttcttatctgcaaaattggtgcaacagatcctgtttcacaggattattatcaggatgaaataattaatatgagaaagaaagaggcttatgagaggggagccaagcaggaaaggcaaggaagcagctggggagagagaggattagtgggattatttgtaggaacaggaagttttgctaaaaagctaaatggtccagacaacccgattgctgcagaaaccactggccaagcccaacagagggtcctgttgtctgcctggagcaaatttccatggctttttgagtggtcaggaagtcaaaacatcaacatttgggagaagttcattctaacattcatgggtgactttgagaggttcaagccttcagtggaggaagttgctggagatgtgatggaaatagcaagaaaacgaggattagaaatggatcatggagatgtgactgaattgctgccatctaaagaacaaacttaa

SEQ ID NO: 13664 - DNA, 1031 bp, Homo sapiens
  SIMILAR (244)..(543): 881254mologous to Homo sapiens type II intermediate filament of hair keratin,accession number X99142,Smith-Waterman Score=424.
gtaagcagagatggacagtatattcaagaaatctgattaagataacacctaaagaagagaaggtccatccataggttggctgagttcttatttctgaaataatctctggaggaacttttaagaatcctgaaagattcaactatttaaaactcttctggaaaagtatatgcatatactcctytgaaacccctatgattgtcgtgcctccaaagatgccgtgggtcagatatctgttcatgtggacatcactgccaccccaggaacgggagatcataaagtcactgtaaaagtgattgctattaatgacctaaactggcagaccacagcaatgttccgcccctttgtggaagtttgtatactgggacccaaccttggagacaagaagagaaaacaaggcacaaaaacaaaaagcaacacatggtcaccaaagtacaatgaaacatttcagttcattctcggaaaggaaaatcgaccaggggcttatgaacttcatctctcagttaaggattactgctttgccagagaagatcgaattatcggaatgacagtcattcagctacagaacatagcagaaaagggaagctatggggcatggtatcctcttctgaaaaatatctctatggatgaaactggtttgactatccttagaatactctctcagaggaccagtgatgatgtggctaaagaatttgtaagacttaaatctgaaacaagatctactgaagagagtgcttgaaacaaacactgcaagctaaatacataactataattgtttgactactgcatgcatgtgcaaatacatgggaatgtttagttcactacatttcaatgtttggcagtactcatgtacgatgtctacaaggtatgtaaaaaacctgctgaacttttataccaattctggtctttgggaaataattgttccatgaagtgccaaaattatgttgtaaagtgaaatatcaagaacaccttttaacatgtttattttgtttctttacccatttcacattcattaaacattttttttaaaaact

SEQ ID NO: 13665 - DNA, 1242 bp, Homo sapiens
  SIMILAR (4)..(987): 411254mologous to Homo sapiens Human keratin KERT-1,accession number Y52397,Smith-Waterman Score=407.
cagagggtgaaatggtgcggctgcaagccaaggcatatgggcagctgctaggaggttgaaaaggcaaggaatggattctccccttgagcctcccacctcctctaactggcaccagtaaaacgtccaacaaactcaccatacaaacttgcatcagtttttgtcggagtcagaggttcaaggtgatgactctgtggctgtgtaactatagaaaaatatgaaacaatcctgattactggaagtacggggaggcagccagtaccgaatgcaacagcgtctgcttcggggatcacacccaaccctgtggtggcgatggcaggatcatcctctttgatagtgagtatgccctgtgcccatcactgcccaaggcacagtcttctgtggtctattcccctgacttccccgacacctatgccacggggagggtctgctactggaccatccgggttccgggggcctcccacatccacttcagcttccccctatttgacatcagggactcggcggacatggtggagcttctggatggctacacccaccgtgtcctagcccgcttccacgggaggagccgcccacctctgtccttcaacgtctctctggacttcgtcatcttgtatttcttctctgatcgcatcaatcaggcccagggatttgctgttttataccaaggtaagacatctttgcctccttgggggttcttcagggccaaccagacggtggccgaggtgatcacggagcaggccaacctcagtgtcagcgctgcccggtcctccaaagtcctctatgtcatcaccaccagccccagccacccacctcagactgtcccaggtagcaattcctgggcgccacccatgggggctggaagcacagtcacagccattgtagcaaagatacttctgcacgtcacattcaagtgagtacaagagggagctgcccaattccaggaaaggatggtgctccggtacctgacatgggtgcctgagcggagagaggggccactcttcgacataaggaatgtaaaaggagccaggtgtgagaggaaacctgatgagttcttttgggctaagtccagacattaccgaattcatctttgccgcaacccaacaagggaactgagggtcagagaaggggtccagccaggggccgccaaggttcggactcagcctgggaccactggctccaaagctgggggtccttactcctgttgagctgcaggcccctccaacacaggcagtgggtgggccc

SEQ ID NO: 13666 - DNA, 870 bp, Homo sapiens
  SIMILAR (1)..(639): 1001254mologous to Cloning vector pZC320 SopA,accession number U26464,Smith-Waterman Score=1121.
atgaaactcatggaaacacttaaccagtgcataaacgctggtcatgaaatgacgaaggctatcgccattgcacagtttaatgatgacagcccggaagcgaggaaaataacccggcgctggagaataggtgaagcagcggatttagttggggtttcttctcaggctatcagagatgccgagaaagcagggcgactaccgcacccggatatggaaattcgaggacgggttgagcaacgtgttggttatacaattgaacaaattaatcatatgcgtgatgtgtttggtacgcgattgcgacgtgctgaagacgtatttccaccggtgatcggggttgctgcccataaaggtggcgtttacaaaacctcagtttctgttcatcttgctcaggatctggctctgaaggggctacgtgttttgctcgtggaaggtaacgacccccagggaacagcctcaatgtatcacggatgggtaccagatcttcatattcatgcagaagacactctcctgcctttctatcttggggaaaaggacgatgtcacttatgcaataaagcccacttgctggccggggcttgacattattccttcctgtctggctctgcaccgtattgaaactgagttaatgggcaaatttgatgaagaagctaccactgttgcttatcagacgcagcgggccctgggtttttctggggccttaagcagtgaaccctggtcagctggcctgagtcccaacccaagcccatcaccacaagcctcaagacaggaagatctcagtgaaacctttcctctaatccaagtgacatcattgtcgcaggtgtttgtacatgaaagcagagtgatgaagaggctgtttagatccggggatctttag

SEQ ID NO: 13667 - DNA, 2325 bp, Homo sapiens
  SIMILAR (1609)..(1442): 261254mologous to Homo sapiens Human neuroendocrine-specific protein NSP-A mutant fragment 12,accession number Y21445,Smith- Waterman Score=67.
atggcctctagacccctggcccgtctcacagtatgcctggcaagcactctgtttcctccaggctgtgtactgcaggctcctctgccagggataacctccatctctgcttcaccagcaaagacaaaatccacagctccacgactatgccgtggctattacatcagttggcttctgccctggagatcaccgtctaagtcagggcagaaggactcatctatgatgcttgcaaccaatgatcatgctgtgggaagaacgggacagttcacagaaaaaggaaagaagtgtacctatggacacaagtgcaaatattaccatcccgaaaggggcagtcagccacagcggtcagtggctgatgaactccgtgccatgtctagaaatacggcagccaaaactgcaaacgaaggaggactggtgaaaagcaacagtgttccttgtagcaccaaggctgatagcacttctgatgtcaaacgaggtgctccaaagaggcaatcagatccaagcataaggacacaagtctaccaagacctagaagaaaagcttcccaccaaaaacaaattggaaaccaggtctgtaccttccttagttagcatcccagctacttctactgcaaaaccccaaagcactacatctttaagcaatggccttccatctggagttcatttcccacctcaggatcaaagaccacagggacaatatccttcaatgatgatggcaaccaaaaatcatggaacgccaatgccttatgaacagtatccaaaatgtgactcacctgtcgacatcggatattattccatgttgaatgcatactcaaatctgagtctctcaggcccacgaagccctgaaaggcgtttctccttagacacagattatagaataagttccgtagcttctgactgcagcagtgaagggagcatgagctgtgggagcagtgactcctacgtgggttacaatgaccggtcctatgtcagctcccccgacccacagctagaggagaatttgaagtgtcaacacatgcaccctcacagccgccttaatcctcaaccgttcctgcagaatttccacgaccccttaaccagagggcaaagttacagtcacgaagaaccaaagttccatcacaagcctcctcttccgcacctggctctgcacctgccgcactccgctgtgggcgcccggtccagctgtcctggcgactacccctctcctccaagttcagcacactctaaggcaccacacctagggaggtccttggtggccacgagaatagacagcatctctgactctcgactttatgacagttctccttcacgacaaagaaagccttattcccgccaggaaggcctgggaagctgggagaggccaggctatgggatcgacgcctatgggtaccggcagacttattccttgcccgataactccacacagccgtgttatgagcagttcaccttccagagcctccctgagcaacaggagccagcctggcggatcccatactgtggaatgccgcaagatcccccgagcttgacagaaccgatgtctctggaaatgtgtttcttttctctggaagatgcatttggctccagaaactctgagcctctcagagggtcttttgggcaaagcttcagtcacggtggaaggggaggtggtgtgcgcttggcccttggcaggctgcaggccagccgactgtgcgatgttgcgctggttccttcagaagctaccactgttgcttatcagacgcagcgggccctgggtttttctggggccttaagcagtgaaccctggtcagctggcctgagtcccaacccaagcccatcaccacaagcctcaagacaggaagatctcagtgaaacctttcctctaatccaagtgacatcattgtcgcaggtgtttgtacatgaaagcagagtgatgaaggttttatattgggcagtgtggtttgatctacaggccagtggatggcacttgtgggtaaaagccagctgcagccacacagatgggtgtatacttgatccttgttaccggaagaagctctcttttttcctcaggcaatgggttgatctgtgcagtgcaccatggtccgaactccctgctcaacccccggaaggggagaccaagatggtgggcctgatgactctaggagaaatgagggacagaagtgaacagcactgcggcaaggaatctgtggagctcagtagtcctcactcgctgagagctcagaggagaagggtagaattggaagtctcagctttttccactcagaaagctgctaaagcagctgctgggtgtctctcccccaccttctcttgtgctggccctggagcacagtag

SEQ ID NO: 13668 - DNA, 598 bp, Homo sapiens; identical to SEQ ID NO: 13084
  SIMILAR (1)..(429): 971254mologous to Homo sapiens histone H2A.X,accession number X14850,Smith-Waterman Score=694.
  misc_feature (1)...(598): n = a,t,c or g

SEQ ID NO: 13669 - DNA, 870 bp, Homo sapiens; identical to SEQ ID NO: 13085
  SIMILAR (568)..(699): 571254mologous to Homo sapiens Human signal peptide containing protein HSPP-112 SEQ ID NO:112,accession number Y87335,Smith-Waterman Score=116.

SEQ ID NO: 13670 - DNA, 1600 bp, Homo sapiens
  SIMILAR (1762)..(2196): 401254mologous to porcine endogenous retrovirus pol,accession number Y17013,Smith-Waterman Score=218.
acagcagttacactgcggcgggcgtctgttctagtgtttgagccgtcgtgcttcaccggtctacctcgctagcatgtcgggccgcggcaagactggcggcaaggcccgcgccaaggccaagtcgcgctcgtcgcgcgccggcctccagttcccagtgggccgtgtacaccggctgctgcggaagggccactacgccgagcgcgttggcgccggcgcgccagtgtagcctggcggcgagtgctggaggtagctcagccgctgagagtcctggagctggcgggcaatgcggccccggagcaacagagaagacgcgaatcatcccccgccacctgcagctggccatccgcaacgacgaggagctctaaaagcttcctgggctgccttgacgaattgcccagggaagccgttcctgccaaacattcaagcccgttctgctgcccaagatagactagcgccaccgttggggccgaaggcgccctcgggcggcaagaaggccacccaggcctcccaggagtactaagagggcccgcgccgcggccggccgccccagctccccatgccaccacaaaggcccttttaagggccaccaccgccctcatggaaagagctgagccgcttcagactgcggggcaagcgggccgcggctcccttcccctcccctcccctcgcccgccttcgccgcccggcctcgagtccccgcccgcccccgctcccgtcccgcaccgcctgccgcgtcggcctcgggcctgccctgtccgccgtccgccctccggtagggttcgggccttccggatgcggcttgggcgctcttcggggacctccgtggcgcggaagacccgagcctgccggggggaggccggcggcgccgcacctgcccgcctcggcgttcgtgactcagccgccccatcccgagtcgctaaggggctgcggggaggccgcagcaccttctggaagacttggccttccgctctgacgcagggccgaggtgggcagtccaggccgagagccggcggccctgaaggtgagtgaggccctcggcagctgcagccggggtgtctggtacccccccggcgtggtgcttagcccaggactttcagacggccgctggccgggaggctttggtgggagagacgcgatcgccgatttcggtctggcgccccttctgcggccgggacccaggcctttcacatcagctctccctccatcttcattcataggtctgcgctggggccgggacgaagcacttggtaacaggcacatcttcctcccgagtgactgcctcctaggaggacatttaggggagggcagaggcctgcagtttggcttcacggctggctatgtggacagcaagagtcgttttgcggaacgcgactggcagccaggcctgtcgggcccccgacgccgccccatttcccttccagcaaactcaactcggcaatccaagcacctagataccagcacaagtcggttaatccctgtctggactgagcctccgttggcttctgaactggaattctgcagctaacccttccacgactagaaccttaggcattggggagttttagatggactaattttattaaaggattgtttttttttt

SEQ ID NO: 13671 - DNA, 3100 bp, Homo sapiens
  SIMILAR (277)..(525): 401254mologous to Mus musculus punc,accession number AF026465,Smith-Waterman Score=175.
  misc_feature (1)...(3100): n = a,t,c or g
atggtggtcatcacggtgctgctctctgtcgccatgttcctgctggtgctgggcttcatcattgccctggcactgggctcccgcaagtctctgaagctctcagaagagagggtagctcctctccaccagcaggtcgtctctatggctctcagcagagagggtacaccctccgcagctggttgtcccatcgtcacctgctatcagcagaaaggagcaggaggtctgggtctgcagctgcgtttgggtggctgcagcggctcggggagctcccttcccaactcagaaggggcagggctcccattggccccacagagtatgcagacccagccgcggttacctgctgcagctgacatgatgccagcagccacggccatcactgggattacagatgtggaggcggcccgcaaggccatccgcgccgctcaggtggagcgctatgtgcccgaacacgagcgatgctgctggtgcctgtgctgcggctgtgaggtgcgggaacacctgagccatggaaacctgacggtgctgtacggggggctgctggagcatctggccagcccagagcacaagaaagcaaccaacaaattctggtgggagaacaaagctgaggtccagatgaaagagaagtttctggtcactccccaggattatgcgcgcagtcacctgtatggaacccccatggggtcggcggtgccgagccaggcctgcctggaggctctgctcctgatcgttccctggggcgcctgtggtgtttcccaggaggaagaggagagccctgcagaggggagcaaggacgagcctggggagcaggtggagctcaaggaggaagctgaggccccagtggaggatggctctcagcccccaccccctgaacctaagggagatgcaacccctgagggagaaaaggccacagaaaaagaaaatggggacaagtctgaggcncagaaaccaagtgagaaggcagaggcagggcctgagggcgtcgctccagccccagagggagagaagaagcagaagcccgccaggaagcggcgaatggtagaggagatcggggtggagctggttgttctggacctgcctgacttgccagaggataagctggctcagtcggtgcagaaacttcaggacttgacactccgagacctggagaagcaggaacgggaaaaagctgccaacagcttggaagcgttcatatttgagacccaggacaagctgtaccagcccgagtaccaggaagtgtccacagaggagcagcgtgaggagatctctgggaagctcagcgccgcatccacctggctggaggatgagggtgttggagccaccacagtgatgttgaaggagaagctggctgagctgaggaagctgtgccaagggctgttttttcgggtagaggagcgcaagaagtggcccgaacggctgtctgccctcgataatctcctcaaccattccagcatgttcctcaagggggcccggctcatcccagagatggaccagatcttcactgaggtggagatgacaacgttagagaaagtcatcaatgagacctgggcctggaagaatgcaactctggccgagcaggctaagctgcccgccacagagaagcctgtgttgctctcaaaagacattgaagctaagatgatggccctggaccgagaggtgcagtatctgctcaataaggccaagtttaccaagccccggccccggcctaaggacaagaatgggacccgggcagagccacccctcaatgccagtgccagtgaccagggggagaaggtcatccctccagcagttgccaggtataaactccgaattgttaagccaccaaaattacccctagagaaaaaacccaaccctgataaggatggtccagattatgagcccaacctctggatgtgggtaaatcccaacattgtgtatccccctggaaagctggaggtctcaggacgtaggaagagggaggacctgacaagcacactcccctcctctcagccaccccagaaggaggaagatgccagctgctcagaggccgcaggggtggaatcactgtcccagtcctccagcaagcggtctccccctcggaagcggtttgccttttcccccagcacctgggagctcacagaagaggaggaggctgaggaccaggaagacagctcctctatggctctcccatcccctcacaaaagggcccccctccagagtcggaggcttcggcaagccagcagccaggcggggaggctctggtcccggccccctctcaattacttccacctaattgccctggcattaagaaacagttccccctgtggcctcaacgtgcaacagatctacagtttcactcgaaagcacttcccctttttccggacggccccggaaggctggaagaatactgtccgtcacaatctctgttttcgagacagctttgagaaagtgcctgtcagcatgcagggcggggccagcacacggcctcgatcttgcctctggaagttgaccgaggagggacaccgccgctttgcggaggaggcccgcgccttggcttccactcggctagaaagtatccaacagtgcatgagccagccaggcaagcttcttcaaagagctgtctacactaactctagtgcctcaactcccagttacctctgcactcttacaggcagcttctgcctcctcaccccaaaaaggaatgtagtaggacagcagggtgataataaggagaaggtcaacaaattacatgtgagcaaaagaatgtatatcacgattaagttcaagggaaagtactatgcctggacgtgcacattcaagaaatccatggtgaaaggtttggattcctatgaagaaaaggaggataaagtgatcaaggagatggcagctcagatccgtgaggtggagcagagccgacaggaggtggttcggtctgtcttagaggatataccaggagttggtaacatccactcagatctaaggctgccagctgtccctgccctgaggctgtcccctgcaaccagggaggccacagccccccagctgggacctgcagcctcaaggactcttattccacaagtagcttttcctgagggtgtgctggagacaaacagcatggcgaagg

SEQ ID NO: 13672 - DNA, 1600 bp, Homo sapiens
  SIMILAR (1102)..(1527): 731254mologous to Homo sapiens p40,accession number U93564,Smith-Waterman Score=538.
atgtcgggccgcggcaagactggcggcaaggcccgcgccaaggccaagtcgcgctcgtcgcgcgccggcctccagttcccagtgggccgtgtacaccggctgctgcggaagggccactacgccgagcgcgttggcgccggcgcgccagtgtacctggcggcagtgctggagcgtccgacctgtggaaatctaacaagcataggggaaagcaaaggcagcatcttagtccccctggtacggatccccaaggccatgctcatcttcatctccaagaatatgaagcatcatactcttgaagcctccacatcttatttatttggaagaaggcttagcttcatttctgcagctcttatcttgaacaagagctccatccaaatcgcctttgaggaggtgccccaactcccacccagagccagcatcagtcatgtgacctgcgtagaccaatctgagcataccatggtgctgcgttgccagctctctgctgaggaggtgcggttcccagtctctgtgacccagcagtcccccgctgccgtctccatggagacctaccacgtcactctgacactgccaccaacacagttggaagtcaacctggaggaaatccctggtgaggggctgctcatatcctgggccttcactgatcgcccagatctcagcctaacggtgcttcccaagcttcaggccagggagagaggtgaagaacaagtggagctctccacaattgaggaactgatcaaggatgccatagtcagcacccagccagccatgatggtcaacctcagggcttgctctgccccaggaggcctggtacccagtgagaagccacccatgatgccccaggctcagccagccatccccagacctaaccggttattcctacggcagcttcgggcatctcacttgggaaatgagctggaaggcaccgaggaactgtgctgtgtagctgaactcgacaaccccatgcagcagaagtggaccaagcccgcgagggctggatccgaggtggagtggacagaagacctggcactggatctgggcccccagagccgggagctgacccttcaaagtgctgaggagcagcagctgtggagacagtaacatcacacctaccaagaagattgagcttgaccggaccatcatgcccgatggcaccattgtcaccacagtcaccactgtccagtcccggccccgtatagacggcaaattagatctaaggctgccagctgtccctgccctgaggctgtcccctgcaaccagggaggccacagccccccagctgggacctgcagcctcaaggactcttattccacaagtagcttttcctgagggtgtgctggagacaaacagcatggcgaagggacgtgtgtctgtacaaaagaagtggagccagtatggcaaaatgtttacaaggactctgggtgagagattcaagaaatccatggtgaaaggtttggattcctatgaagaaaaggaggataaagtgatcaaggagatggcagctcagatccgtgaggtggagcagagccgacaggaggtggttcggtctgtcttagaggttggtttccctcggaggatccagaccagtatccaaatccactga

SEQ ID NO: 13673 - DNA, 1515 bp, Homo sapiens
  SIMILAR (697)..(1416): 951254mologous to Homo sapiens putative p150,accession number U93572,Smith-Waterman Score=1254.
ttctttgtccagtcctagaaatgtgctgaacaaaggaggtgggtgggagggatatgcccacaacctaaagaaacaaccagttaaaacatttacagcaatcttatgtttttccctttgttcaggttactactttgggattgtgatgatcgaagctatagctactacgttgaggtttctaccaaccagcaacagtggaccatggttgctgacagaactaaagtctcctgcaagtcctggcagtcagtaacttttgaaaggcagcctgcctccttcatccgtatcgttgggacacacaacacagcaaatgagtcacactgtgtcaagcgtgtgcctccgaggaacctctggtttaagagaggcagcataggaaatgatgggtcgaaatgcaacagtttaggaggcaagagtgaggatgctgtcaccgcagccttgttcatcctgaacccaacgggataccacgagcgtccatccacagaggatggggtttttatcgatttgtttattcttgtgcaagaacccgagcaggtgttccactgtgtccactttgagtgtccagagcagcagagcagccagaaggaggaaaatagtgaggaatcggggacaggggacaccagcctggccgggagcagacaccagcgtcagtgtgaatgtggcccagcccatgtgcagagggagaggatgccgggctgggcgtgcatgttgaagtccgtggcccagagaggcttccagagaaggtggcagactgccagtttggagggcaagttgacagtcttgactaaaatggaatgtgtgcaaaagccctcttggggcagcagatcactaagagacaaggatgcaagaaagtggctgctgctcctggcaaacccgagcttcccctcagagctgctggaggccagagctcctggtgccagcccacctgctgtctgtctctgccgcgctccccaccctgctgttgcatgtacacggaaccacacgttcaccttcgtggctggctcctttcactttgcagaatgtttccgaggttcacctgggctgccgctcggtgccactcaacgtgtcatctcgtcacaagacaaggagcttataccagaagagacatcagcatgctgccccttcgtcaggacagtcttgtcagctgacccaactgcgctgcctctcagggtcctgggacacagcggaagaccccagcttgtggctttaaatactagctctatgcaggtgactcgaaactgtgtatctcatttgtacaccgacatccacagcagcctcattcacagtaactacaacatggaagcaaccccagtgcccactgacaaaggggtgggcaagcacgtgtgtttcatcatacggtgcagtagcatccaccttaagaaggacacagacatatctaccatgtggatgagcccggaggacatcgtgctgggtgaaatcggccagacacaaacagacgagtactgtatgattccacttccagttctggagatggacggtggcaatggttgcaccacattatga

SEQ ID NO: 13674 - DNA, 2378 bp, Homo sapiens; identical to SEQ ID NO: 12975
  SIMILAR (382)..(1734): 941254mologous to Homo sapiens unknown,accession number AF148856,Smith-Waterman Score=2207.

SEQ ID NO: 13675 - DNA, 1137 bp, Homo sapiens
  SIMILAR (1)..(168): 1001254mologous to Rattus norvegicus glutamate receptor subtype delta-1,accession number Z17238,Smith-Waterman Score=293.
gcaaagaaggggaactacgccttcctgtgggatgtggccgtggtggaatacgcagccctgacggatgacgactgctcggtgactgtcatcggcaacagcatcagcagcaagggttacgggattgccctgcagcatggcagcccctacagggacctcttctcccagagaccctgtggaagtatatggtccctgccaggaaggctcagagtctctgtgggatctctgataggagcagctcatgatccttcctgtgagtcctctaagtcaggacaatggagtgtgctcaaggggtccagatcacaggaagacagagagaaaaaaagtgacctgcaggacacattggcaaccactgtggacttgcactggcaaagccaggtgtttgaaaaacattatccaagcctgagtaagcatgtggcccaaaccaggcctgacttgtcttccatgtccaacggctatttcataaccattacccaaatgcagggcaccgtcttctctgttgattccaccaagcccactccaaatgggcagtgggttaaaactctgatgaagacgtacaaggggattaatgttgtcttcatgcctgttattacaacatccattctgcagcccatggatcaaggtataattttgactttcaagttttatcatttaagaaatacacttcataaggctgtagctgccatagatagtgattcttctgatggatctgggcaaaatgagcaaagaaagtggcttcttgagatagaatatactcctggtgaaaatactatgaacattgttgaaatgacaacaaaaggtttagaatattccatacatatagttgatgaagaagtggcaaggtttgagaagtgtgactccaacgttcacagaagttctactgttaaaatgagtttgctggtctttcactttttccacctttctctacctgacatagtaggtttagatgtggccagttcagatgcaatgtcctttgtgtttccttctatccatatttccaacgggatggcccacagccagcaactgactcacatgggaatgtcaaaggcagcctctttgcctcagggtgggatcaaatctgtggggccacttggaatccagagttcttgcgggatcaggctggagctagtttccacctga

SEQ ID NO: 13676 - DNA, 450 bp, Homo sapiens
  SIMILAR (450)..(322): 651254mologous to Drosophila melanogaster CG10353 gene product,accession number AE003487,Smith-Waterman Score=136.
tcattgagggtatctggcacgcttttcaaaaaccagttgggccattgacttgtgggttttattctggtatcttgtttctattccagtagtcgatatatctatctgtaccttgaccctcttattttgttctctgtatcttttgtcattgtagtcttgaatcgattgtttctgggcttctttgtctttattctttttcattgtgtttttggtatttcggatatttgtctgttcatccttatcctgggtcttttttgtcgtttttgctttttcagtttctgttttatgtcttgttggaacgtttgtgtcttttgggcttggttcctcttcatttctgtattttcccaaccaataaactgggtctcctggatagcctacaaatttgcccttaaagaatgctatgtagaagcatgaagagtagtagttgacaaactggaataagaacatcttcat

SEQ ID NO: 13677 - DNA, 2605 bp, Homo sapiens
  SIMILAR (442)..(1884): 911254mologous to Homo sapiens putative p150,accession number U93569,Smith-Waterman Score=2277.
atggtgaatactgataacgatggctatgatgttgacgagaacatgattagacaggcatatcccaacgttagttacttacggcccgggacccatcttcacggcaaccacacggctgggttccgtcattgatattgatcgtgaagcgaaaacaatcactattgcagaactgcgcgacgagaaaggtgaactgctggttccggaacgtaaaatcgcctatgacaccctggtaatggcgctgggtagcacctctaacgatttcaatacgccaggtgtcaaagagaactgcattttcctcgataacccgcaccaggcgcgtcgcttccaccaggagatgctgaatttgttcctgaaatactccgccaacctgggcgcgaatggcaaagtgaacattgcgattgtcggcggcggcgcgacgggtgtagaactcttcgctgaattgcacaacgcggtcaagcaactgcacagctacggttacaaaggcctgaccaacgaagccctgaacgtaacgctggtagaagcgggagaacgtattttgcctgcgttaccgccacgtatctctgctgcggcccacaacgagctaacgaaacttggcgttcgcgtgctgacgcaaaccatggtcaccagtgctgatgaaggcggcctgcacactaaagatggcgaatatattgaggctgatctgatggtatgggcagccgggatcaaagcgccagacttcctgaaagatatcggtggtcttgaaactaaccgtatcaaccagctggtggtggaaccgacgctgcaaaccaaccgcgatccagacatttacgctattggcgactgcgcgtcatgcgccgcgtcggaagggggctttgttccgccgcgtgctcaggctgcacaccagatggcgacttgcgcaatgaacaacattctggcgcagatgaacgctgcttttctccttcgcttgcatgattggcataactgcaaagaaggaggtgttcccgtgaataaatcaatgttggcgggtatcgggattggtgtcgcagctgcgctgggcgtagcggcagtggccagtctgaacgtgtttgaacggggcccgcaatacgctcaggttgtttctgcaaacccaatcaaggagacgtttagaagtttgccacgagacagagcccttgaaacaagatgttttgcgtggccccgaattggccagcccctgggacctcccttagcgaaccctaaatacccagagtgccacaatccgggcgcaaaaggcggggggtcaccatgggataaagcccttggtgcgcgaacaaactcacaaaataagggggactcccaactggcgttgctggaccttatcgaagagggcaacctggggctgatccgcgcggtagagaagtttgacccggaacgtggtttccgcttctcaacatacgcaacctggtggattcgccagacgattgaacgggcgattatgaaccaaacccgtactattcgtttgccgattcacatcgtaaaggagctgaacgtttacctgcgaaccgcacgtgagttgtcccataagctggaccatgaaccaagtgcggaagagatcgcagagcaactggataagccagttgatgacacgggctttaagcgactggtcatggcgggcggcgtgagtgctaaccgtacgttacgggcgaagctggctgaaatgatgaaaaaacgccgcggcgaagtgttatacgcgcgtccggaactttgtactgataacggcgcgatgatcgcctataacgaaaagacatacccgttcatcgcaccgtttatggataatctcgagcgaacagatgacgacaaacggaaaatattcttcgacaccatccaaacagtgcgtgggcgatcactcaatcacacgttcttcctgctcgacgaagcgcagaacgtcgacatacaaacgatgtgtgccgtcgctactcgaccaggcatgaacgccaaattcgtattttgcggaaacttcgcacaggtggacaatgctaagctccgcaatttgcatacaaacggcttgtatcggctactaaacggcttgtacgaacggcaggcgtatgagtattttgatcacgttaacttgaccgaagtcaagcgcttttgttgctatgtctcacaaccttacacaggttcaatgggtaatactgaaaccttgtttggaatgtcaggaactaaactcaaagaaatcagtcgaggagaagtacaacgtggagatatttttatctcaggtaacggacgaccccagcggaggttaacaaaggtagcggctattttaaaccgcttcacaatgccagctgagaccagcgccattgaaattctagttaaactcacagctccagacctaacatcccctgcactgtcgggggcccgggaagcaaccctgcccctgcagtttggaagtgcccactcccgatccctggcatctcccaactcccagtgcccactccaatttcgaaccaaagttgcagcagagcccaggtctgtcgcaacccggccagcttgcccttttaagtacgtggcagtacatactcttgtatcaagccatctggaggacaggaattttggagtgtatgtcagcgatgtgaaaattatctcaagcagttaa

SEQ ID NO: 13678 - DNA, 381 bp, Homo sapiens
  SIMILAR (1)..(372): 1001254mologous to Escherichia coli K12 orf, hypothetical protein,accession number AE000223,Smith-Waterman Score=635.
atgcatggccttaacaaagacatcatctttccgttgcagatcttcgccctttcaaataacgtactttacaactttcccgaacaaggagttgtgcccgtgttgtatgttatttacgctcaagacaaagctgatagcctcgaaaaacgcctttccgttcgtccggcacatttagcacgtttacagttactgcacgatgaaggtcgtttgttgacagctggtccaatgccagcggtagacagtaacgatccaggggctgcgggatttactggctcaaccgttattgctgaatttgaatcgctggaagcagctcaagcctgggccgatgctgacccgtacgtagcggcaggagtctatgaacacgtttcagtgaaaaccatttaa

SEQ ID NO: 13679 - DNA, 699 bp, Homo sapiens
  SIMILAR (46)..(1596): 911254mologous to Homo sapiens putative p150,accession number U93574,Smith-Waterman Score=2411.
atgtgcccgggctttgctgcggattgtctggagacgctggaagagattgccgagcaaaaccgtgaggtcttcctcggtgccggcgggaaaaaatatgaatatattccggcgcttaatgccacgccgcgaacatatcgcaaatgcatggctaatcttgctgggtaccgcagctcgcaattcgtcaatccatgctcacatgccacgcctttcccacgtcggcgcaaaacctggtcgatgcccagcctgctatataatgcaaatcgggccacacgccagcaggcgcagagagagaggacacgcgctaatacggcagcgcaccacatatccgaatatccatcgccacacctgaactccgctgcacgctacaggtcgatcacggcactgccagcaacacccgcgtacccaagacaccaaagcaacatagagagacagagaggcactcacagacaaacggaagcacgggcagagcaaaacgaactgaggaggcaaaaagaaggacggcaagcaaaaacaggcacgacaaggaacgaacgaacaacagaacgcggcggggaacgaaccaacacaccagaacgaaccgaagaacaacaacagcggaacgagagacgcagaaagagcggcacagcgaagaaggaaccgcgacacaaagaggcagaaaaacgggaagaggcagtgcagcttgatctgcagcgactctaa

SEQ ID NO: 13680 - DNA, 2142 bp, Homo sapiens
  SIMILAR (355)..(2082): 931254mologous to Homo sapiens putative p150,accession number U93563,Smith-Waterman Score=2823.
tgctactgctctcttatcatggcattccccagcgttatgcagatgaaggcgatgattacccgcaacgttgccgcacaacgactcgtgaactggcttccgcattggggatggcaccggaaaaagtgatgatgacctttcagtcgcgctttggtcgggaaccctggctgatgccttataccgacgaaacgctgaaaatgctcggagaaaaaggcgtaggtcatattcaggtgatgtgcccgggctttgctgcggattgtctggagacgctggaagagattgccgagcaaacccgtgaggtcttcctcggtgccggcgggaaaaaatatgaatatattccggcgcttaatgccacgccggaacatatcgaaatgatggctaatcttgttgccgcgtatcgctaaagctgagcggtaaagaactgagcgccgtcgcgaagagcctcgtcggcggttttcatcatccgtgaataatgcaaaaaggcgtgcagcgtgcttcgcgagtgagatcattattaaacagacagtaatacggcgactcgcggtccgcgtcgttgcttaaatatgcctcttcgtacatctgcaaatcctgttgcgttaagccatcccagacaccgcccaacagacgacgagtcacggaatcccgtaatccgtaaagcccataccacagcaaaacgcccgcaactttaccgcaatcgatctgtttatcacgcaaccacaacgcactggcgagcgccagcatggcacctgcggaatcaccggcaaagccaatgcgggacatattgatttgataatcctccgcctgctggtggaaataacaacaagcagccacaatttcctctatcgcttgcggaaaacgcgcttcaggtgaaagggtgtaatcaataccaatcaccgtacattggctgtagcttgccagcaggcgcatgatgcgatcgtgggtatcgagattgccgagaataaaaccgcctccatgcaaataaaatagcgtcgctgggctatctggctgctggtggcggcagatgtggtagagccgcgttactaccaggcgattctggatggcgttgaactccagcggctttttcagcgttaccagagagaaaccggttttcttaacgccctcttccggacgatacggcgtggagcgcggaatatgatgaatggggcaaccagatacagcgtttgccatcggcagacagtttttgagctttttgagcaaacgggtgggcaggggagccatatcgtggctacccatatgaatactgccaatcagatgaaaatggcgattgccggggagggtgatatcgatggcaggccaggtgtaatgattaccgcgcagcgcggcccaaagcgtttttacccggtacaacagtatcggtattccggtcgccgccggtattttgtggccgttcactggaacactgcttaacccggtagttgccggagcggcaatggcgtcaagcactgcaggttgcccggcataacgggcaatcgcatccagcggcaagccactaaggtaattcttaagaagctttaaggggtatttcttcttcttcaacatggtttttgcatttctccattttccagagtaaatgccactcccagccccccaactatgaccaaagtagcccatatctttcagggcttctaagacctttagatgataataaccgtactgcccggtatctccgcagccttgcctttcaagatcctcaatgcgtcggtcttttgacagctccaatgctgatgccgctttttctggatcaactgatattgcaatgtttcttttggtgccaatcttgagcgcgcgtaaaccagcttctccgcgctcttcatagaccttcagccacctggctacagaaccactaccagcaagcataaagtgagcagcagcctgattaagggacatgtgctgctcgatcacagctttcacgaccttaatacgcaactctggatcagcactaacgcctttaggtttgggaattaaacctttttctccatgtttttcatagagggcaacccatgtcctgacctgggttcgggggacaccaaaacgtgccgagatgatcctgtaaccatcatcagttgtgaagtagtgattcacgacttcaaggcgcttttcaaaagggtattttggctttgacat

SEQ ID NO: 13681 - DNA, 2316 bp, Homo sapiens
  SIMILAR (1080)..(2192): 881254mologous to Homo sapiens putative p150,accession number U93567,Smith-Waterman Score=1657.
atggcggtaacgcaaacagcccaggcctgtgacctggtcattttcggcgcgaaaggcgaccttgcgcgtcgtaaattgctgccttccctgtatcaactggaaaaagccggtcagctcaacccggacacccggattatcggcgtagggcgtgctgactgggataaagcggcatataccaaagttgtccgcgaggcgctcgaaactttcatgaaagaaaccattgatgaaggtttatgggacaccctgagtgcacgtctggatttttgtaatctcgatgtcaatgacactgctgcattcagccgtctcggcgcgatgctggatcaaaaaaatcgtatcaccattaactactttgccatgccgcccagcacttttggcgcaatttgcaaagggcttggcgaggcaaaactgaatgctaaaccggcacgcgtagtcatggagaaaccgctggggacgtcgctggcgacctcgcaggaaatcaatgatcaggttggcgaatacttcgaggagtgccaggtttaccgtatcgaccactatcttggtaaagaaacggtgctgaacctgttggcgctgcgttttgctaactccctgtttgtgaataactgggacaatcgcaccattgatcatgttgagattccgtggcagaagaatggatatgcctggattgtctgtcaatgccaggaaagtgcgatggttttcattctagattgggttctgcagcactgtgttgagatgggctacgaaggcaccggacgtggttttttgctgaaattttgcgctcgctttccgcatttacaccgttttgaactgcaacagccgatccgctgggcgcagggatgcccgctggaaaaaatggtcagcgaggcactggtttttgacgatgaaaacttcacccatacaccacaaggcaatattgtcatttccgcatttgaacagacgttatggcaaagcgatccagaaacgccgttaaaggtttatcagctcttgtctggtgcgcactatcggacttcgccgctggatttacgccggatgatggatgcaccagggcaacattttttacaggcggctggcgaaaacgagattgccggggcgctgtggctggtggatgagggtggattatctcaacaactcagtcaggcggtatgggcaggttttcgtcgcccgcggggtaatctggtggcccagtcgctggcggcgcacggcaacaatccactggcggcgacattgcgtggacggcgggtcagccggatagcagttcatccggctcgtcagcgggaaggcacagggcggcaacttattgctggtgctttgcaatatacgcaagacctcgactatctttcggtgagttttggttacaccggggagttatggcgtttctggcaacgctgcggttttgtgctggtgcggatgggtaatcatcgggaagccagcagcggttgctatacggcgatggcgctgttaccgatgagtgatgcgggtaaacagctggctgaacgtgagcattaccgtttacgtcgcgatgcgcaagctctcgcgcagtggaatggcgaaacgcttcctgttgatccactaaacgatgccgtcctttctgacgacgactggcttgaactggccggttttgctttcgctcatcgtccgctattaacgtcgttaggttgcttattgcgtctgttacaaaccagtgaactggcattaccggcgctgcgtgggcgtttacagaaaaacgccagtgatgcgcagttatgtaccacacttaaactttcaggccgcagatgttcgcccgttgtcacctgcggtttgaagcggaggatgaatgaaactgcaaggggtaatttcgatctggatggtgtaatcaccgataccgcgcatctgcatttccaggcgtggcagcagattgccgctgaaattggcatcagcattgatgcgcagtttaacgaatccctaaaagggatcagccgcgatgagtctctgcggcgcattctgcaacacgggggcaaagagggcgactttaactcgcaggagagggcgcaactggcgtatcgcaaaaatctgctctatgtccactcactacgcgagttgacggtcaacgctgttctacccggcattcgctctttgctggcagatctccgtgcacagcagatctcggttgggctggcttctgtctccctgaatgcgccgacggattttagcggcgctggagctgcgcagagtttttcaccttctggcgcgatgttcccaactaaaaacgggaccaggcatttacccgggggtgactcgtggactgcggaagatatccagcatcagaccgcaatcagctga

SEQ ID NO: 13682 - DNA, 1232 bp, Homo sapiens
  SIMILAR (712)..(1098): 971254mologous to Escherichia coli ATH1 protein,accession number D90769,Smith-Waterman Score=673.
ctattgttcatccgaagatgcgacgtagacgacatcgatagagtatcgatacgagactacgtactgcagtgtagacactgatgctgcgtcgatacgtcgaatctgacgatcgtatgacgtatcgaatagatgctgacgatgtgcgatcgcgatcggaccgacgatgtcgtgacggctagacgacgatatgacgtactctatgctagtactatgatcgcgacgatgaactgatgcgtacgacgcacaactaatgtagagtaagaagctcgtgacgacgccgcagtctaatgagacgactaaatgtaggctgacgagatagctagctactacgtcatcgatgatcagctgaacccgaacggtacggactgatatgcccaaacctgcgacaatgtgatacatcatcgagacgatcgatactacacgaactcgcaatgagacgtacgagtcgggactgactagactactgcgctgatgatgacgacgatgtgatatgacgagatgacgctgaggagctctagtcacgatgctcgcatcgtactgctgtgtgcggtctacaatgaatgagctctgagacgcgagagatgcgagagctagtgcgtcagaccgcagcgtgagttgcgggcgaagtgccgacagtcgaggatatggagatgcgtcactgtcagtggtagagatgtggatctgtagcgtcgctacagtgtggtcggagaccaaagttatcagttctggcgcgaggggactgaaatcgatcttggtgctgatccgcatagttgtgatgatggtatccatgctgccgcaactggcgctatctggctgggggcgattcagggttttgccggggtgaccccgcgtgacggtgaattgcatctcaatccggcgttacctgagcagtggcaacagttgtctttccctctgttctggcagggctgcgaattacaggtcactcttgacgcgcagcgtattgcgattcgaacttctgcgcccgtttcactgcgtttgaacggtcagcttataaccggggctgaagaatctgttttctgtttgggtgattttattttgcccttcaatgggaccgctaccaaacatcaggaggatgaatgaaactgcaaggggtaattttcgatctggatggagaaatcaccgataccgcgcatctgcatttccaggcgtggcagcaaattgccgctgaaattggcatcagcattgatgcgcaggttaacgaatccctaaaa

SEQ ID NO: 13683 - DNA, 641 bp, Homo sapiens
  SIMILAR (292)..(2013): 911254mologous to Homo sapiens putative p150,accession number U93564,Smith-Waterman Score=2740.
gcagcgcagcccttgctccaaagtaattccggtgcttcgccaattattctgtcgcccttcatgaggtctgcgtgtgcctgtagggtcgtgtcgtcccagtttttgccgttataaaaaataattgtgagttcacagccttccgctgccagtgtcgcctgtaggcgttctgccatggtaggaagttctatcggtaggtgataaaccagcgtcaaggttttcggtagtttgacttcatccggtacctgccaatgcggaatagtccagcctggcagtaatgcatgactggcggtgatcaggttttctccgacttctaacgtttgtaataaaccggattgatgaataatggagatcacttttcgcgcctgccagagggagagtcggggacttttgcgcaacgtcaaatagcaaaaacctaaactgatgccgctactgacctggctgacccgttgcagctcctccggtttgccgatggtgatttgcacgggatgccgacaactggttcccaaatctttttcgaaaagcggcggagttatccagtactcaaccgctttaagcagcggatgacgtaaatggtaataatcatggctttccaggcgcaccagctatgctgtgaattgtgttaagcgaaaaggacccgtgcc

SEQ ID NO: 13684 - DNA, 1107 bp, Homo sapiens
atgccacggggctctctctttgtttccaggtggatcggcacggttgagacaatcatagacacacaccagatagtgaaaactgggtccaaggtgggtcaaccgccttctggtcccctggtgccaaccatgcactggatataccagcatttattattaagtttagtgagggcacgggtaatggctacggatattatagatctggctgctcagagagaccaggagccttctctaaagtggttctcaaaccctggtgtagatgagaatatattatggggtttgaaaatggacttctcctctgagtattctgatgcagaaaccagttgtcggcatcccgtgcaaatcaccatcggcaaaccggaggagctgcaacggggttcaagccaaggcgcgaaaagtgatctccattattcatcaatccggtttattacaaacgttagaagtcggagaaaacctgatcaccgccagtcatgcattactgccaggctggactattccgcattggcaggcacacgcagacctcatgatgggcgacagattaatgtggcgaagcaccggaatatactctggaaccatgatgcctgcgatgcattgttgaaactgggctatggctctccttcgctttgttatgcgatgggcgggagtgcggggggcatgttgatgggcgttgcaattaatcaacgcccggaattattccacggcgttatcgcccaggtaccgtttgttgatgttgtaacaacgatgcttgatgaatcaattcctcttaccactggtgagtttgaagagtggggtaacccgcaggatccgcaatattacgagtacatgaaaagctacagcccgtatgacaacgtcaccgcacaggcttatccgcatttactggtaacgaccggtttgcacgattctcaggtgcaatattgggaaccggcaaaatgggtcgctaaattgcgcgagctgaaaaccgatgaccatcttttattgctctgtaccgacatggactcaggccatggcggtaaatctggtcgctttaaatcgtacgaaggcgtagcgatggaatatgcttttctggtcgcgctggcgcagggaacattacccgctacgcctgcggactaa

SEQ ID NO: 13685 - DNA, 201 bp, Homo sapiens
  SIMILAR (1)..(198): 1001254mologous to Escherichia coli K12 putative synthases,accession number AE000371,Smith-Waterman Score=326.
atggtgcgtggcttgttgaacgacggcctggcagtggttggtggttttaaaattggtgatatcgatcctcgtggtgaaaccgctgatttcaccagcgtttctgataaagcccgggcgattggcggcggcgtacttgaggcgttaatgatgttgatgcatcagggcgtgaaagcgacaaaagaagtgctggaagtggcttaa

SEQ ID NO: 13686 - DNA, 638 bp, Homo sapiens
  SIMILAR (1)..(636): 1001254mologous to Escherichia coli DniR,accession number U70214,Smith-Waterman Score=1061.
attccgagcacggggcgcaattatggtttgaaacagacccgcaattatgacgcgcgtcgcgatgttgttgcttcaacaactgccgcgctgaatatgatgcagcgtctgaacaaaatgtttgacggcgactggcttctgaccgtagcggcttataacagcggcgaaggtcgggtcatgaaggcaattaaaacgaacaaagcgcgtgggaaatccacggacttctggtcgttaccgttgccgcaggaaacgaagcagtacgtgcctaaaatgctggcattgagtgatattctcaaaaacagcaagcgttatggcgtacgtctgccaacgaccgatgaaagccgtgctctggcgcgtgtgcacctgagcagcccggttgaaatggcgaaggtagcagatatggcggggatttccgtcagcaagctgaagacattcaacgctggcgtaaaaggctccacgctgggcgcaagtggcccgcagtacgtgatggtgccaaagaagcatgcagatcaactgcgtgaatctctggcttcaggcgaaattgctgctgtacagtcgacgctggttgccgacaatacgccgcttaacagccgtgtttacaccgtacgctctggcgacacgctttcaagtatcgcttctcg

SEQ ID NO: 13687 - DNA, 735 bp, Homo sapiens
  SIMILAR (475)..(1404): 971254mologous to Homo sapiens putative p150,accession number U93563,Smith-Waterman Score=1618.
atgagagttgtaactgaaaagcttgtgaggcagtcttctaagatcaggggctcccattgggcccaaaggtccaggggcagtgggattggttcccaggacccggcgcgctacggcaccaacaaagtgtcgcgcatcaagcaggtggcttccggtcgctttggggttactccggcgtatctggtcaatgccgacgtcattcagattaaagtcgcccagggcgcgaagccaggcgaaggcggtcagttgccgggtgataaagtcacgccttacatcgccaaactgcgctattcggtgcccggagtgacgctgatctccccgccgccgcaccacgatatctactctatcgaggacttagcgcagctcattttcgacctcaagcaggttaacccgaaagcgatgatctccgtgaagctggtttccgaaccgggagtaggcaccatcgcgactggcgtggcaaaagcttatgcggacttgcgccggtgccgccgtcatagcctgcgatggtcccaagggtatggctgttcgccatttaaagtggtacgcgagctgggtttagaacgtcgtgagacagttcggtccctatctgccgtgggcgctggagaactgaggggggctgctcctagtacgagaggaccggagtggacgcatcactggtgttcgggttgtcatgccaatggcaaaggagcgccttcagcacgcagcagcatttacacaaccagagacactcggcagtga

SEQ ID NO: 13688 - DNA, 4446 bp, Homo sapiens
  SIMILAR (100)..(1494): 921254mologous to Homo sapiens putative p150,accession number U93574,Smith-Waterman Score=2234.
atgtgcgaactcgatattttacacgactctctttaccaattctgccccgaattacacttaaaacgactcaacagcttaacgttggcttgccacgccttacttgactgtaaaactctcactcttaccgaacttggccgtaacctgccaaccaaagcgagaacaaaacataacatcaaacgaatcgaccgattgttaggtaatcgtcacctccacaaagagcgactcgctgtataccgttggcatgctagctttatctgttcgggcaatacgatgcccattgtacttgttgactggtctgatatccgtgagcaaaaacggcttatggtattgcgagcttcagtcgcactacacggtcgttctgttactctttatgagaaagcgttcccgctttcagagcaatgttcaaagaaagctcatgaccaatttctagccgaccttgcgagcattctaccgagtaacaccacaccgctcattgtcagtgatgctggctttaaagtgccatggtataaatccgttgagaagctgggttggtactggttaagtcgagtaagaggaaaagtacaatatgcagacctaggagcggaaaactggaaacctatcagcaacttacatgatatgtcatctagtcactcaaagactttaggctataagaggctgactaaaagcaatccaatctcatgccaaattctattgtataaatctcgctctaaaggccgaaaaaatcagcgctcgacacggactcattgtcaccacccgtcacctaaaatctactcagcgtcggcaaaggagccatgggttctagcaactaacttacctgttgaaattcgaacacccaaacaacttgttaatatctattcgaagcgaatgcagattgaagaaaccttccgagacttgaaaagtcctgcctacggactaggcctacgccatagccgaacgagcagctcagagcgttttgatatcatgctgctaatcgccctgatgcttcaactaacatgttggcttgcgggcgttcatgctcagaaacaaggttgggacaagcacttccaggctaacacagtcagaaatcgaaacgtactctcaacagttcgcttaggcatggaagttttgcggcattctggctacacaataacaagggaagacttactcgtggctgcaaccctactagctcaaaatttattaacacatggtgtgcctgcttcccctttgccttcttccatgactcgttatggcggagtggatgcaaatcagcaacttgtgctggataaaccgcaccaccagacaccgcgcggcctgaagtttgagctggcggcggaatcaccgctgatgatagatcatgctataatagcgctgtcgaaacagatctaccaacgttacccgcaggcgaccatcaaattacgtaactgggattacgattccttagatgccattactcgtggtgaagtggatatcggtttttccggtcgcgaaagccatcctcgctcgcgggagctgttaagctcgctaccgttagccattgattcatgcaagtgctgtttagtgatgtgccctgcgtctggttacgcaaagatcatccggcactgcatcaaacgtggaatctgtgacaccgttctatacgattatccgacatatcagcatttgctgggaacagagcgatacctgggcgctggacaatgtgttacaggagctgggacgcgaacgcacgattgctatgagcctgccggaattcgagcagtcactgtctatggcagcgcaacccgacaatctgctactggcgaccgcgccgcgctacttactacaatcaactccatcaactgccgttggttgctcttcctctcccgtttgacgaaagccagcaaaaaaagctggaagttccttttaccctgctgtggcataaacggaacagccataatccgaagatcgtctggttacgggaaaccattaaaaacctttacgcgtcgatggcataaccgaatctgtcatcaagaagcccgaaacattccccctcatcgtcaaagccgttttctggcgtccagaggtttactcgcagaactgatgttcatgctgtatggcattggcgaattgccggaaatcgtcaccctgccgaaaggcgccgctggtggacagcttcgtggccccaagacgggggaagtaccccaaagagtgacaaacccacaggggccaaaccaagcacgagagcagggagaacaggtacgcgagcacagagtgacccgcgggactggagatacgggcaaacagcagctgggtacagagaagatcgtctcagaaagaagtacaccatacacaacgctttctagaatggaaagtagaattattcttggatctacagcatcaccctcaatggtcggggaggaatcagccctccctgatttatgtggccacatggggcagcagagctacttggacagaattgagattttgttaggaagaaagaaaggggaactgggggaaccggatgctgagaggtcaaccaacagcaaaagattgttagtgtctggcataggacggtcccgggccaattgtcccagcaatccgctcacggttcagccattcggcgttacctcctattatcggatttcggcgctgccaacacaagtcgacgaattcttgaactcttaccatgaaaatgtgccactcatacctgctgccgtgggaccatggttgactgacagcccagctgcatgctcccctgcatttgccccaggccgtgctcctcacagcaaccctcggctgctcccagccaatgcccgacccctgggggaactagtactgtcccattcctgtgggtcccctccacctgggtcagcactgagttatcctgccttcctgcctcctccagctgcctggcggcaatccttcaccagtgaaccccctagtaaatctcctgtgtgtctaattccatcttggcatatgcttcttagagacctccgacggtctttgttaagttacctacccactcaatgggtaaacgtgtttcattgtgttgtcaccattgtactcaagtcgtgtcacgttcacggtccaccggtcacatgtcaccgtgtgcacacgagtagttacggtcagtgtccgtgtccgtggtcggggtcgcgggcacatgtccggtcacggtgtcggactttgtcgtttttgtcgtgttccgtgtgtccgcgggtcacgggtcccagtgtttccattgttgctacacagtgggttcgatgttgtggtgaggtggtgtccagatatggtggttcccgggggtggttccacggtggtgtttgttgccagtatgggttccagggtgttgttcccggggtggggaaccaggggttcaaaggtgttcaggggtcagtggtcggagtgtcaggggtcgtggttcgttggttcagtgtcatggtcagggtcacagaccgggttcatgtgtctggtcgtgtccgggtctggtcggttacggcacagggcacggtccggtcggggtcaggtcacgggtcacgggcacaggtaggcgtttcggttgtcgtgtcattgtcacggaagtcaagggacagggttttgctgtcagcagcctgcctgcctcctttgaacgagcacgagatccctgatcctgggagacggacgctgcagggagcccgagacctgtgcccactgccactcccagcactgggcggaccaggagtcgggactcccattctcaagaacaaatacaatacaatacgaaaccacgcccattggaaccgcaagccttccctccagggggttaacagttcagtggcctgccggttcccttccaagttggccgctttggcattaatcgacggtatggttgaccatgccagtgatgatgagttgtttgccagtgggtatttgcgtggccacctgacattagccatcgcagaactggaaagtggtgatgaccactccgctcaggcggtgcatacgaccgttagccagagtctggaaaaagccattggtgctggcgctggtgaccgatatgtgggaaaacctgtttcagcaggcgtcacagcagtaagttgcggcgtctggagcagcatgcctgatgcgacgcttatcgcgtcttatcaggcctacacgtcacacgtagcgtactggcatccatcggaatcggttcgtcgctcatctgcgccgccagaatctccggcacacagcggggcagaacacaaccgcgagaaccaaagccgcaaacataaagagatcgtcaaaaaccggcgcgcttaccgcctcatctttctgctccgccaacgacgcatattccacgagtgttgcctcataatcgggaacattgcctaccattggcagatgatcgcgggtggcacaacgcacaccgcagcgcgcctctttatcactgacatcaacctcttttgcccactgtgcctgcgggaaacaagtcggtaccgagctattctctgttgcttaggcatcccaggatga

SEQ ID NO: 13689 - DNA, 575 bp, Homo sapiens
  SIMILAR (573)..(397): 1001254mologous to Escherichia coli similar to,accession number D90863,Smith-Waterman Score=299.
gcggagtttgaatcacgcattctggcattaatcgacggtatggttgaccatgccagtgatgatgagttgtttgccagtgggtatttgcgtggccacctgacattagccatcgcagaactggaaagtggtgatgaccactccgctcaggcggtgcatacgaccgttagccagagtctggaaaaagccattggtgctggtgaattgtcgccgcgtgaccaggcgctggtgaccgatatgtgggaaaacctgtttcagcaggcgtcacagcagtaagttgcggcgtctggagcagcatgcctgatgcgacgcttatcgcgtcttatcaggcctacacgtcacacgtaggtcggataaggcgttcacgccgcatccggcaaacactgcgagagcagattaccccgccttaaccgctttacccttcaacaatttccgcacccataaccgattcgggtttaacgccgccagcgtactggcatccatcggaatcggttcgtcgctcatctgcgccgccagaatctcggcacacagcggggcagaacacaaaccgcgagaacctaaagccgcaaacataaaga

SEQ ID NO: 13690 - DNA, 1630 bp, Homo sapiens
  SIMILAR (313)..(1266): 851254mologous to Homo sapiens putative p150,accession number U93563,Smith-Waterman Score=1365.
tcacttccagctggaaacgccacgctgggcggtactgacagcggcgattgttgccgcggtccggcctttgctgcgggaggtgaaccgtattctggcgctattcgctatcgtggctttttgcgcatcatcggcacatttattggctggatatcctcgctggtacgaatagaaaactcgtatgcgtgggggctggccggttataccgcgctgatcattgtgatcaccattcggccggatctcactctgtacgccgcagtttgccgtcgaacgttgtaggacctgcagagatgcttgacactgaccattggcctgaattttagaataggtgggaggctctgaagtgtgaacccagtttgcatgagccgaccttgaaatacaaccctttactgtttgatgttctaacgttgaccgtaatccggcttgcggacagtgtctgtgggtagtttgactggggcgttctcctcctaaagagtaacggaggagcacgaagcttgcataatcctgctcggacatcaggaggttagtgcaatgcataagccagcttgactgcgagcgtgacggcgcgagcaggtgcgaaagcaggtcatagtgatccggtggttctgaatggaagggccatcgctcaacggataaaaggtactccggggataacaggctgataccgcccaagagttcatatcgacggcggtgtttggcacctcgatgtcggctcatcacatcctggggctgaagtaggtcccaagggctatggctgttcgccatttaaagtggtacgcgagctgggtttagaacgtcgtgagacagttcggtccctatctgccgtgggcgctggagaactgaggggggctgctcctagtacgagaggaccggagtggacgcactcactggtgttcgggttgtcactgccaattgcactgcccggtagctgcgataaaaatgccctcgtacgctctgatttaggatgcgcaaaaaattcatcaggtgcagcttgctccactatttccccacgatccataaaaattacccggtcagcgacggttcgtgcaaaccccatctcatgtgttacacacaacattgtcatacccgactgcgccagcccaatcatcgtatccagcacctctttcaccatctcaggatcgagcgccgacgttggctcatcaaacaacataattttcggcttcatacacagcgaacgcgcaatggcaacgcgttgctgctgaccacctgaaatctgtccgggaaacttatgcgcatgttcggcaattctcacccgctctaggtaatgcaccgccagatcttcagcctctttcttaggcatcttgcgtacccaaatcgggcgcacggtacagttctgtaattcgtcaaaataggcgcgacttttttcgcgcgaccgatcacatgtacgtgactgtgccgacgaacaggccaaaaatgtggaacccggtgaatacgcagatgaattcttttcgcgccgacacttgcgaacggtaaagttccttgctaaaccgttgctgaaaaatctgggaccatccttttgcaatggcggtttggggcagtatttgcggtactccgggcaatcagcgcagtttgcgtgattttcgtcggcatcctcggcgcggtatttggccat

SEQ ID NO: 13691 - DNA, 2115 bp, Homo sapiens
  SIMILAR (2073)..(805): 991254mologous to Homo sapiens DLL3 protein precursor,accession number AF241373,Smith-Waterman Score=2405.
ctaagtgtagcgaaattccttgtcgggtaagttccgacctgcacgaatggcgtaatgatggccaggctgtctccacccgagactcagtgaaattgaactcgctgtgaagatgcagtgtacccgcggcaagacggaaagaccccgtgaacctttactatagcttgacactgaacattgagccttgatgtgtaggataggtgggaggctttgaagtgtggacgccagtctgcatggagccgaccttgaaataccaccctttaatgtttgatgttctaacgttgacccgtaatccgggttgcggacagtgtctggtgggtagtttgactggggcggtctcctcctaaagagtaacggaggagcacgaaggttggctaatccgcccaagagttcatatcgacggcggtgtttggcacctcgatgtcggctcatcacatcctggggctgaagtaggtcccaagggtatggctgttcgccatttaaagtggtacgcgagctgggtttagaacgtcgtgagacagttcggtccctatctgccgtgggcgctggagaactgaggggggctgctccccatgccgaactcagaagtgaaacgccgtagcgccgatggtagtgtggggtctccccatgcgagagtagggaactgccaggcatcaaatttagcgtgctgatatggctcagttggtagagcgcacccttggtaagggtgaggtccccagttcgactctttttgcgatgggcccgaccggtttttcccatgcgctgttccggtatgtcaaaccgtttgggcatcatgcactccagcctcggaccatccccggaaccctcctgcgtccttaggttgttgagtgcatccgggagtgcgtggactgacggctccggggtcccagccagcaagcgagacccagcatcctgggagtggccacggcggcgcacgtggaccagcaagagcgcagcgccggccacgcccgcggccacgagcagtcccagagccggaggcaaaaggtagcgctgagggtccccgggcctgaggcccggcggggccgcgggcaaggcgcttgcgccgtcggggtgcactgggaactcacaccgcgctcccatgtagccgggagcgcaagcgcagacgaggccggagaagtgggcgtagcagcggccgccgtgagcacaggggcgcgcggcgcacgggtccgcgcgctcgcggcagtcgcggccgccgaagcccagcgcgcaggagcagcggtgcgcgccgccgccctccacacacgtgccgccgttagcgcaggcgcggcccgcgcagtcgtccaggtcgtgctcgcagcgaggacccgcgaagccggcgcggcagcggcagcgcagggcgtggcccaggtccaggcagagtccgccattgcggcatggctgcaggctgcaccggtccaccctcttctcacagttggagccttggaaaccgggtgggcagtggcagatgtaggcagagtcagggtctgcacccccgacacacaagccgccgttgaagcagggtccatctgcacatgtcaccccgctcacctcacaccgcagcccgtagaacccacgcgggcaggtgcattcaaaggacctgggtgtctcactacagctgcctccattggcacacgggttcccgtcacagggcccaggcccagggacaaggcatccggtggtagcagaggacgggcccctggggctgaggcagctgctggtggagacagggaccgtgcagaggggtccagtccagccctctaggcatcggcattcaccgggctgttcacagaagccatgctcagggctgcagcctgctcggcacaccagcggcgcctcacattcgtcctcgagcggtgcgcaggggcgcagtcccggaccgcaccgcgagggggcgctgcgcggacggcagaggcgcgtgcacgcggtcccgacggcaggcggctcgcagcgcgcgcggtacgagaagcgcagctcccaggcgcctgcgcgctgaatgtcccgggcccacgggcctccggctgccaagcgccgcctgccagccacgcgcgccagcaggctccaggcgggccctgcgaggacaggcaaaggaggggtgctggggtgggcccggccgaacat

SEQ ID NO: 13692 - DNA, 1239 bp, Homo sapiens
  SIMILAR (4151)..(2619): 811254mologous to Homo sapiens putative p150,accession number U93563,Smith-Waterman Score=2052.
atggacgatgggacgtctatcgcgccagatggtgacttgtgggctttcattggcgacgagctaaagatgggaattccggaaaatgaccggattcgcgaacagaaacagaaatatttacgcaataagagctatctccacgatgtaactttacgggcagagccgtatatgtactggatagcagggcaagttaaaaaacgtaacatgcctatggaactggtactactacccatagtggagagcgcttttgatcctcacgcaacgtctggcgccaatgccgcaggcatctggcagatcattccgagcacggggcgcaattatggtttgaaacagacccgcaattatgacgcgcgtcgcgatgttgttgcttcaacaactgccgcgctgaatatgatgcagcgtctgaacaaaatgtttgacggcgactggcttctgaccgtagcggcttataacagcggcgaaggtcgggtcatgaaggcaattaaaacgaacaaagcgcgtgggaaatccacggacttctggtcgttaccgttgccgcaggaaacgaagcagtacgtgcctaaaatgctggcattgagtgatattctcaaaaacagcaagcgttatggcgtacgtctgccaacgaccgatgaaagccgtgctctggcgcgtgtgcacctgatcagcccggttaaatgtgcgaggttctcgcggtttgtgttctgccccgctgtgtgccgagattctggcggcgcagatgagcgacgaaccgattccgatggatgccagtacgctggcggcgttaaacccgaatcggttatgggtgcggaaattgttgaagggttttcccacatatcggtcaccagcgcctggtcacgcggcgacaattcaccagcaccaatggctttttccagactctggctaacggtcttctcaatggtcttcaaacgtcgtgagacagttcggtccctatctgccgtgggcgctggagaactgaggggggctgctcctagtacgagaggaccggagtggacgcatcactggtgttcgggttgtcatgccaatggcactgcccgtagcgcggtggtcccacctgaccccatgccgaactcagaagtgaaacgccgtagcgccgatggtagtgtggggtctccccatgcgagagtagggaactgccaggcatcaaataaaacgaaaggctcagtcgaaagactgggccttacaactgttttcaataactgtgacacaacagctgaaaaataa

SEQ ID NO: 13693 - DNA, 459 bp, Homo sapiens
  SIMILAR (1)..(456): 991254mologous to Escherichia coli phosphoglucose isomerase (AA 1-549),accession number X15196,Smith-Waterman Score=794.
atggtaccgtgcgatttcatcgctccggctatcacccataacccgctctctgatcatcaccagaaactggtgtctaacttcttcgcccagaccgaagcgctggcgtttggtaaatcccgcgaagtggttgagcaggaatatcgtgatcagggtaaagatccggcaacgcttgactacgtggtgccgttcaaagtattcgaaggtaaccgcccgaccaactccatcctgctgcgtgaaatcactccgttcagcctgggtgcgttgattgcgctgtatgagcacaaaatctttactcagggcgtgatcctgaacatcttcaccttcgaccagtggggcgtggaactgggtaaacagctggcgaaccgtattctgccagagctgaaagatgataaagaaatcagcagccacgatagctcgaccaatggtctgattaaccgctataaagcgtggcgcggttaa

SEQ ID NO: 13694 - DNA, 222 bp, Homo sapiens
  SIMILAR (22)..(183): 571254mologous to Pseudomonas stutzeri Orf117,accession number AF061070,Smith-Waterman Score=165.
tcgcctctagaggatcccccgtcggtgcgtagcaacagcccgcaagaagaacgctatgagaaaaaaacggcaagtaacggcaaattctatttcaatctgaaagccgctaatcatcaaattgtcggctccagccagatgtacgccaccgcgcaatctcgtgaaaccggaattgcctccgttaaagccaatggcacaagccagacggtgaaagacaatacgtaa

SEQ ID NO: 13695 - DNA, 2349 bp, Homo sapiens
  SIMILAR (822)..(436): 761254mologous to Pseudomonas aeruginosa transposase,accession number AF133697,Smith-Waterman Score=531.
tcataatttccccaaagcgtaaccatgtgtgaataaagtttgagctagtagggttgcagccacgagtaagtcttcccttgttattgtgtagccagaatgccgcaaaacttccatgcctaagcgaactgttgagagtacgtttcgatttctgactgtgttagcctggaagtgcttgtcccaaccttgtttctgagcatgaacgcccgcaagccaacatgttagttgaagcatcagggcgattagcagcatgatatcaaaacgctctgagctgctcgttcggctatggcgtaggctcagtccgtaggcaggacttttcaagtctcggaaggtttcttcaatctgcattcgcttcgaatagatattaacaagttgtttgggtgttcgaatttcaacaggtaagttagttgctagaacccatggctcctttgccgacgtcggtagaatgctcgcaaggtcggctagaaattggtcatgagctttctttgaacattgctctgaaagcgggaacgctttctcataaagagtaacagaacgaccgtgtagtgcgactgaagctcgcaataccataagtcgtttttgctcacgaatatcagaccagtcaacaagtacaatgggcatcgtattgcccgaacagataaagctagcatgccaacggtatacagcgagtcgctctttgtggaggtgacgattacctaacaatcggtcgattcgtttgatgttatgttttgttctcgctttggttggcaggttacggccaagttcggtaagagtgagagttttacagtcaagtaatgcgtgcaagccaacgttaagctgatgaactgaaaacgctcttccggaaccgcctgaatttatcaccggaagcgaatgacgattttctcgatcgttgcctggacggcggtgactggtatcccttttcagaaggtcgccgttttgtatcattccatcacgtggatgagcttcgtatctgtgcctaacagctttatttccgatgcaacggcgaatggtctgattctcatgaaactgccggaaacctggagtacaaatgagaaaatgtttgcttccggagggcagggacatgggtttgccgctgaacggggaaaccatattgtcgacaagaacgcttcctccatatagagcgtgtccacagaaccaagcgtggcggccttctcctcgattaagctgcgtcaggatccgccgacgataatcttcatcatcaatataattgaggagatatagcgttttgtttacacgccctacttccataattgcctgtgccagtcctgatgggcgcgagcttttcagtaaagagcgaatgagttctgacgcatgaattgtacccaacttgcacgaaccagcggttcgcatcatctcatcccactgactctccgcttttgacagatctgcatatcctcgggccaacttatccagtactccgtagtttgccgatttattcacccgccagaacaccgcctcaccattcacccgctggcggggcagggggtaaatctcggctttatggatgctgcagagctgattgccgaactgaaacggttgcatcgtcaggggaaagacatcgggcagtacatttatctgcgtcgctatgagcgtagccgcaagcacagtgcggcgttgatgctggctggtatgcagggattccgcgatctgttttccggtaccaatccggcgaaaaaactgctgcgtgatattggtttgaaactggccgacacgcttccctgaccggtgattacagtaatcagcatctggtgccgatgaagcaagtggtgccgccacgctatcaagcgcgtaatgattttgatgtttttgccgagttaagtgaacggcggtgctaacgctgaatggtgccatcagctctaccagcacgcggcccgtcagcgtctcgccactctccagcgtcacttcaacgtgactctgagtacgggcaacgttagccacgcgatcagggcaatgcagcgttacgccaggtgctttacgcagcaatgcaaacagccgttgcccgacattgtgcaattcgacaacctgtcccagcgccgccagttggtaatcttctgcggcgagggtgacaaatccagcgtgaccacgatcgctgacatgcacggtggtgatggcagttgcgcaatccgccagagattgccagacgccgatgcgcgccagttgcatcaacgcttcgatttcttccggctttttcaccacgctggcggtgaggttttcgttaccggtttcggtaatcacaatgtcgtcttcaatacgaatgccgataccgcgatattgttctggcacttctgcatccggcgcaatatacagccctggctctacggtcagtaccat

SEQ ID NO: 13696 - DNA, 1065 bp, Homo sapiens
  SIMILAR (865)..(2223): 961254mologous to Homo sapiens putative p150,accession number U93572,Smith-Waterman Score=2229.
caactcgcaaccttcttttttggtgggggcctccccggtgggtctgccccctgggaccccccgggtgaggcttgtttgtgggtccttgttcgcctccctggtagaacagtctgggtcatccagtttgttcagttgagaagtttctttgcccccccctttgcgcacaatggtagagcctcgagtggtcgtgtctcggtccattacggaatagcgcaaaccgccgaatgggcagcagagatttgtggtgttggcgcacggaaaatccgcgagctggcggctattttccaccaaaataccatcatgcattttgccaatggtggtaccccacgcggcgttctgcggtgctctcttccatgcaaggcagcttgccgggtggctgccgatgcggtggatatacatcctgttgcccgcattgttgaagcactggaaaaccctggtggcgcatatcaacacaacggtatgaaccgacatttcccggatattcgttttatctggtgggcgggcggtgccaactttactcatcatcaggataccaatcgcctgatacgtgcctggcaaaatgattcctattttagaaaagggcgtataaaagccaaaatgggtccaaaacttttctaaagcttgtttccggatttcaaccagtgcctccagcaccactttccagtcatcaaccacgccaacatctgcctgtggaaataccgcagcgctggcgtcatgattaatcgccaccacaaacttgctattgcgtacgcccgccattaacgctgctgcgccagaagcgccaacaacaatacacacctcaggtgccagcagatgtccggaaataccaatcactttttcagcatcaacgcacacgttcatccatcggggccgactgtatgccacttcggctcccagctttcctgcagcatagcgattcctggtatctgctctccgccgggggctaaaggtccatttggcatcctgggaccggtgaccgttttctaaatcaaattctcgttgggcggcctggtcccaccaaggtgcggggtggggcttgggtaagggtgtgggtttcttccccat

SEQ ID NO: 13697 - DNA, 1068 bp, Homo sapiens
  SIMILAR (1)..(792): 981254mologous to Escherichia coli thymidylate synthase,accession number J01710,Smith-Waterman Score=1420.
atgaaacagtatttagaactgatgcaaaaagtgctcgacgaaggcacacagaaaaacgaccgtaccggaaccggaacgctttccatttttggtcatcagatgcgttttaacctgcaagatggattcccgctggtgacaactaaacgttgccacctgcgttccatcatccatgaactgctgtggtttctgcagggcgacactaacattgcttatctacacgaaaacaatgtcaccatctgggacgaatgggccgatgaaaacggcgacctcgggccagtgtatggtaaacagtggcgcgcctggccaacgccagatggtcgtcatattgaccagatcactacggtactgaaccagctgaaaaacgacccggattcgcgccgcattattgtttcagcgtggaacgtaggcgaactggataaaatggcgctggcaccgtgccatgcattcttccagttctatgtggcagacggcaaactctcttgccagctttatcagcgctcctgtgacgtcttcctcggcctgccgttcaacattgccagctacgcgttattggtgcatatgatggcgcagcagtgcgatctggaagtgggtgattttgtctggaccggtggcgacacgcatctgtacagcaaccatatggatccaactcatctgcaattaagccgcgaacagagtccgctgcccgagttgattatcaaacgtaaacccgaatccatcttcgactaccgtttcgaagactttgagattgaaggctacgatccgcatccgggcattaaagcgccggtggctattggcaggacgggatggtgtttgcggtttattggtgagtgggctggctgccagacggaacgcggaaactgcttgcgttaaacgactcgcctgttcttccagcgcagcggcggcggcagctgattcctgcaccagcgatgcgttctgttgcgtgacgcgatccatttccgaaaccgccaatgcgacttgatcgatgccacggctctgttcatccgatgccgatgcaatctcgcccataatgtcagtcacgcgagtgacagcattgacgatattgttcat

SEQ ID NO: 13698 - DNA, 2451 bp, Homo sapiens
  SIMILAR (1)..(879): 931254mologous to Homo sapiens putative p150,accession number U93572,Smith-Waterman Score=1386.
atgacgccaggtgaagtacggcgcctatatttcatcattcgcacttttttaagctacggacttgatgaactgatccccaaaatgcgtatcaccctgccgctacggctatggcgatactcattattctggatgccaaatcggcataaagacaaacttttaggtgagcgactacgactggccctgcaagaactggggccggtttggatcaagttcgggcaaatgttatcaacccgccgcgatctttttccaccgcatattgccgatcagctggcgttattgcaggacaaagttgctccgtttgatggcaagctggcgaagcagcagattgaagctgcaatgggcggcttgccggtagaagcgtggtttgacgattttgaaatcaagccgctggcttctgcttctatcgcccaggttcataccgcgcgattgaaatcgaatggtccagacgtggtgattaccgtcgatttctttggcgataaaatggagtgggtggcaccgcacatgggcaccgatgttgcgctgatgctggggatcgcccatacgctggtggaaaatggttggcacgacgaagcgtttctggcgcgttgcaccacaggttatgccgtcttcgcctcttatttgctgggcgagagtgacggaatagcgaaaaccgccgaatgggcagcagagatttgtggtgttggcgcagcgaaaatccgcgagctggcggctattttccaccaaaataccaccatgctgatggcaggctggggaatgcagcgccaacagtttggtgagcaaaaacactggatgatcgtcacgctggcagcaatgttggggcaaatcggcacacccggcggcggttttggtctttcttaccattttgccaatggtggtaaccccacgcggcgttctgcggtgctctcttccatgcagggcagcttgccgggtggctgcgatgcggtggataaaatccctgttgcccgcattgttgaagcactggaaaaccctggtggcgcatatcaacacaacggtatgaaccgacatttcccggatattcgttttatctggtgggcgggcggtgccaactttactcatcatcaggataccaatcgcctgatccgtgcctggcaaaaaccggagctggtggtgatctctgaatgcttctggacggcggcggcaaaacacgcggatatcgttctgcctgcgactacctcttttgagcgtaatgatctcaccatgaccggtgattacagtaatcagcatctggtgccgatgaagcaagtggtgccgccacgctatgaagcgcgtaatgattttgatgtttttgccgagttaagtgaacgctgggagaagggcggttatgcacgttttacggaaggaaaaagtgagctgcaatggctggaaacgttttataacgttgcccgacagcgcggggcaagccagcaggttgaattgccgccatttgctgagttctggcaagccaaccagttaattgagatgccggaaaacccggacagcgagcggtttattcgcttcgctgatttttgccgcgatccgctggcgcatccgttaaaaaccgccagcggcaagattgaaatcttctcacagcgtattgccgattacggttacccggattgccctgggcatccaatgtggctggagccggacgaatggcagggcaatgccgaaccagaacagttgcagatgctcgccgggatgattgacctgatgccgtcgtcgatggcgttgctggcaccaaacgtgaactcgtatcgccgcttccagccgggaatgcgtccgtggggccataacaaccgcaccgtcgccctgcgtattccgtgcggcgaccgtcataatcaccgcgtggaatatcgcgtggcgggtgccgatgccaacccatatctggtgatggcagcgatttttgccggtattttgcatggccttgataacgagctgccgttgcaggaagaagtcgaaggcaacgggctggaacaggaaggcttaccctttccgattcgccagagcgatgccctggacttgtgtttcagcgacatacttgtatctccgaacatgtacattgacgatggcatgaaacgcgactggccagttatgaaacagtgcgcgctgcaacgcagatggcgtatattgccagatcactacggtactgaaccagctgaaaaacgacccggattcgcgccgcattattgtttcagctacgcgttattggtgcatatgatggcgcagcagtgcgatctggaagtgggtgattttgtctggaccggtggcgacacgcatctgtacagcaaccatatggatcaaactcatctgcaattaagccgcgaaccgcgtccgctgccgaagttgattatcaaacgtaaacccgaatccatcttcgactaccgtttcgaagactttgagattgaaggctacgatccgcatccgggcattaaagcgccggtggctatctaa

SEQ ID NO: 13699 - DNA, 1613 bp, Homo sapiens
  SIMILAR (1184)..(1876): 941254mologous to Homo sapiens putative p150,accession number U93574,Smith-Waterman Score=1192.
actggaaactggcgttaggttttagcgttgaacaggctgatggtcgcattacgccaccgccattcccggtactgctgtggctgtggaactcggtaaaggtcgccgggatttccccgattggcattgtggcgctctccaccacctgcgcctacgctttcgcccgtatgcgctttccaggcaaagcgacgctgctgaaaggaatgctgattttccagatgttcccggcagtactttcactggtcgcgttgtatgcgttgtttgatcgtctgggtgagtacattccattcattggcctgaatactcacggcggcgtaattttcgcgtatctgggtgggattgcgctgcatgtctggaccatcaaaggctatttcgaaaccatcgacagttcgctggaagaagctgctgcgctggatggtgcgacaccgtggcaggccttccgccttgtcctgttgccgctgtcagtaccgattctggcggtggtattcatcctgtcgtttatcgctgccattactgaagttccggtcgcgtcgctgttactgcgtgacgtaaacagctacaccctggccgtggggatgcagcaatacctcaacccgcaaaactacctgtggggtgactttgccgccgctgccgtgatgtctgcattaccgatcaccatcgtcttcttgctggctcaacgctggctggtcaacggcctgacggcagtcgctacattaggtggtttattatttggctacgacaccgccgttatttccggtactgttgagtcactcaataccgtctttgttgctccacaaaacttaagtgaatccgctgccaactccctgttatgtccggaaaatgaccttaaggcatttatcgcttttccgtcatcactttatttcgacgatccaaactggataccccctttattcattgaacgcaacgagcatttgtctgcgaaaaatccggggacggaccatatcatctggcaggcgtgggtggcaaaaaaagcggggcagatagttgggcgtattaccgcgcaaatagataccttgcaccgcgagcgttacggcaaagataccggtcatttcggcatgattgacgccattgatgatccgcaggtttttgccgcgttgtttggcgcagcggaagcgtggttgaagtcacaaggtgcaagtaagatcagcggtcctttcagcctgaatatcaatcaggaaagcggattactgattgaaggttttgacacaccaccctgtgcgatgatgccacacggcaaaccgtggtatgccgcgcatattgaacaactgggttatcacaaaggcattgatttactggcgtggtggatgcagcgaaccgatctcactttctctccggcgctaaaaaaactgatggatcaggtgcgcaaaaaggtgaccattcgctgcatcaatcgtcagcggtttggcgaagagatgcagatcctgcgtgagattttcaactctggctggaagcacaactggcgatttgtgccgattaccgaacatgaatttccgaccatgggccgaccacttaaatatctggtgcccgacgatatgatctatatcgctgagattgattctgcacctgcgcgtttattgtcggcttgccaacaataa

SEQ ID NO: 13700 - DNA, 1629 bp, Homo sapiens
  SIMILAR (358)..(2415): 801254mologous to Homo sapiens putative p150,accession number U93565,Smith-Waterman Score=2670.
atggacatttggctttgtgagagttatgtggccgatcaggcaatcaggtgcggcatgggttctgcggtggaggtgcagccgaagaagaggcggctagagcgcgacaaagaagaggcagatgtatggaggcagtgggctggaactggggcacgggggctgtgccagactcgagacaaagctggcagggcactaggcgagagcgacgcgagaagcgagctggctgcgacagcagctgcagccgcgaagactgactggagaggctgccctggctacactcggagacgacagcggaagacaggacgacgcacgcgacctccagcgatagccgaggtctgcgcgcgcggcgcccgcgactggcgccgaactggcgaagagaagaagcagagctgcgcaggactgcgtccgacgacacagcacacgaaacgagacctggagcagcagacagctgcacgggaggacctctcatgggactacctctcctacaccctggccgtggggatgcagcaatacctcaacccgcaaaactacctgtggggtgactttgccgccgctgccgtgatgtctgcattaccgatcaccatcgtcttcttgctggctcaacgctggctggtcaacggcctgacggcagaggtcgctagcagccgaaagcactggaacaagttctgtgcatgcggagctgacgagaacggagcaccgaactggaagatagtactcatgagacataaacgctccctctgcgagaagcgtagtgacgcgtcgggttcacaacgacatgagcaccggagagcagcaggtgcgaagcctgaaggagccgagtacataggcgaactggcagcagccatcagcgacatcggtcgacgagtgaagaccagcgatgagccagcaagggagaccaacagcaacgagcagccgcgggcgagagcgagcagctgcaacagacacggaccgccagcgagcgcgggcctccgcgcacaagcaacgaactgcgatcgagacgcaaccacagcgacaagcatgcgaccccacggaacagcgggagccagctgccgcaatgcgagcaacagcaacgtgctgccggctgcagcaactggctgcgagcgaccaccagccagcagcgagcgagcaggcagcatgcaagcagccggcaagacggcggcaaccgaccagccagcagaacagcagacacgcgtggacaacccagcagacaccagcgaacgagcagccaggcgagcagcgcacgaaccaacgcaacgtgacaggccagcagccacgcaagacaacaaggcgcggcagacagccggcccacacgagccggaaggaccgagccgaacaagccagcgccagccagaccagcgcgcacagagcaaacgacaagcgagcagcgaagcgaggatcaacgagagacggacgagaggagacgaaggcacggcagagcgcaggcaacaccggagagagcgaggcgcacacacggacaaacggaaccgagatgggagcacgctgccgacggctgagacggacactcgcgacaagacgggagccttgccctgtcatcggctgactgcccgaccaggagctcactcgctcgccacgacgctctgcgcgagagacgtgcggcaccgagcaggctag

SEQ ID NO: 13701 - DNA, 119 bp, Homo sapiens
  SIMILAR (3)..(116): 941254mologous to Escherichia coli VirK protein,accession number D90725,Smith-Waterman Score=174.
cgcagatagctcgaaaagagattgccgcaatcgccagtaaaaaaggggctgaataccgtcggcgctatgagatgctagacgctattcagccacaaatggccacgatgtttcgcggttaa

SEQ ID NO: 13702 - DNA, 5421 bp, Homo sapiens; identical to SEQ ID NO: 9235
  SIMILAR (730)..(1497): 911254mologous to Homo sapiens putative p150,accession number U93563,Smith-Waterman Score=1176.

SEQ ID NO: 13703 - DNA, 933 bp, Homo sapiens
  SIMILAR (1127)..(1969): 921254mologous to Homo sapiens putative p150,accession number U93564,Smith-Waterman Score=1388.
ttattgcgttggttgttgtttgacgacattaatcatccacggtacgccaaatttatcggtgactttgccaaagccatgcgcccagaaagtttcctgccaggccatttcgatttttccgttagcggcaagattgtcaaaccagcgttttccttcttcgacctgttgcgaatcgagcaccagcgtaaagccggagtagctggcttttcctgacggcatggcatcgctcatcatgatgtcgcttccggcaatgcgcacattggcgtgggcgatggcggtatcgggaaattgcattccggaagggcagttctcggcgctgtcctgcgctgattttggcatttcgccgaagctgattggtatagagcagttccgcgcccaacgtacgttgataataggcaatcgcgtcggaacagttaccggccaacgagagttcgaaatttatacggatgagaggcggcctgataagacgcgcgagcgtcgcatcaggcagtcggcactgttgccggatgcgggcgtaaacgccttatccggcctacggagggtgcgggaatttgtaggcctgataagacgcgcaagcgtcgcatcaggcagtcggtaccattgccggatgcggcgtaaacgccttatccggcctacggagggtgcgggaattcgtaggcctgataagacgcgcaagcgtcgcatcaggcagtcggcaccgatgccggaactacctggtcccccggtgattgaaacttcaactaggaacttcaaagaaaactgggaagaaaacttctgttatctggaattcacaattgccaaattaggaaccaccaggaaaagaatacaggaaaactgcaaagggcagcccctgggtcctgcgggagttcaggtgtctctgagaaacactgggaccgaagcaaagatccagtccacagttacacagcctggcggaaa

SEQ ID NO: 13704 - DNA, 1000 bp, Homo sapiens
  SIMILAR (667)..(260): 1001254mologous to Escherichia coli similar to,accession number D90882,Smith-Waterman Score=703.
gataatacttttaaactcggccccggcgtggatgtgaactatatgctgcacacgcagaataagtgaggttgatgtttggccgcgccaatgcctgatgcgacgcttgccgcgtcttatcaggcctacaaatgctccccgtaggccggataaggcgtttacgccgcatccggcgatattagtttacgccgttaacagattagctatcgtgcgcacaccaagtcccgtagcgcccgcagaccactgttcaaccggcgctttacgtcgccgagcagtcgatatgcagccagccttgctgatagttctcaacaaagtgcgacaggaagcccgccgccgtgctcgcgcctgccggatacgccgcgcttccggtattgttcagttcggcaaagttagacggcagctggctgcggtggaactccgccagcggcagacgccagaacggttcgttctcctgcgcggcactcgccagcaagcgaccggccagcgcatcgtcaaaactgaacagcgcgtgataatcattacccagcgcagttttcgccgccccggtgagggtcgccgcatcaatgatcatttccggtttctgcgcactggcatcaatcagaccatcggcaagcaccagacgcccttcggcatcagtgttcatcacttcaacttttttaccgttgcgatagaacctgcacaggaaagcgacgagctgatcgttaaagatgctaacggcaatctgctggctgacggcgacagcgttaccatcattaaagatctgaaggtgaaaggccggataaggcgtttacgccgcatccggcaacggtgccgactgcctgatgcgacgcttgcgcgtcttatcaggcctacaaattcccgcaacctccttaacagctgctccgcggcgcccgaggcccggaccaccgatcccataaagcgctacaacaggcccacaaacgtggggaacagcggaaccagcgaccgagccacaaagaggatccagccggaacccacagactaa

SEQ ID NO: 13705 - DNA, 858 bp, Homo sapiens
  SIMILAR (1)..(300): 1001254mologous to Escherichia coli No definition line found,accession number U00006,Smith-Waterman Score=515.
atgaatggcactatttatcagcggatagaagacaatgcgcatttcagggagttagtcgaaaaacggcaacggtttgccaccatcctgtcgattattatgctggcagtttatatcggctttattttactgatcgccttcgcgcccggctggctgggcacgccgctgaatccgaacaccagcgtcacacgcggtattccaattggtgttggagtgattgtgatctcctttgttctcaccggtatctacatctggcgggcgaacggcgaattcgaccgtcttaataatgaagtcctgcatgagcggggccgtagagcgccagccaacgaactggcaggcgattcttatgttcctgattttcgtcgtgtttacgctcggcattacctactgggcatcaaacgcgtacgttctcgccggataaggcgtttaccccgcatccggcaacggtgccgactgcctgatgcgacgcttgcgcgtcttatcaggcctacaaattcccgcaccctccgtaggccggataagggcgtttacgccgcatccggcaacagtgccaactgcctgatgcgacgcttgcgcgtcttatcaggcctacaaattcccgcaccatccgtaggccggataaggcgtttacgccgcatccggcaatcgggtgcacgatgccctgatgcgacgcttgcgcgtcttatcaggcctacaaattcccgcaccctccgccggataaggcgtttacgccgcatccggcaatggtgccgactgcctgatgcgacgcttgcgcgtcttatcaggcctacaaattcccgcaccctccgtaggccggataaggcgtttacgccgcatccggcaacagtgccgactgcctga

SEQ ID NO: 13706 - DNA, 1605 bp, Homo sapiens
  SIMILAR (457)..(1032): 981254mologous to Escherichia coli K12 putative oxidoreductase,accession number AE000373,Smith-Waterman Score=961.
atgcagtttgccgtcagcggcaaccggttcagtctggaaaccggaactatcaactttttgctgggcaacgaaacgaccatcttcgacgttaatccagtgcagataaccttcactgtcaccgaccaccaggttgccattatacagcaccggagaagtcagcaggcgatgcagcagatcgctttgtgtccacagcgtaacgccgccatcaatggtcaacgccatcacccggtcattttgatcgaccagatagatgcgattgccgtcgacgatgaaatcattcaccgaacccagttcgcgtttccacataatctgaccactgcgcagatcaagcgccgtcaggttaccattataccccagcgcgaaaacaacgccgttaacaacgacgggagtcgtgtcaacatcgctcagacggtcaatttcggggatcctctagagcgcctcagaaaggagctcaccgcagaggaaatagccaacagcgtcagtcacggcattgggttggtgtttggtatcgttgggctggtgttgctactggttcagccggtggatcttaatgccagcgccacagcgataaccagctacagcctctatggcggcagtatgatcttgctgttcctcgcttcgacgctctatcacgccattcctcatcaacgggcaaaaatgtggctgaagaaatttgaccattgcgctatttacctgttgattgccggaacctacacgccgtttttgctggtggggctggattctccgttagcgcgcgggttgatgattgttatctggagcctggcattgctgggtattctgtttaaactgaccatcgcgcaccgattcaaaattttatctctggtgacctatctggcgatgggctggctgtcgctggtggtaatttatgaaatggcagttaagctcgcggcgggcagcgttaccttactggcggtaggcggcgtggtttattcgctcggggtgattttctacgtctgcaaacgcattccatacaaccatgccatctggcacggcttcgtgctcggcggtaacgatgctatcgcctggggtaaaaaaaatggcaagacccaggaccaacaggtggtcgcagcgtgtgacaaactgccggtcaatttcggtgctgaaatcctcaaaatcgtacccggtcgcgtgtcaacagaagttgatgcacgcctctcttttgataaagaaaagagtattgagaaggcgcgccatctggtggacttgtatcagcaacaaggcgttgagaaatcacgcattctgatcaagctggcttcgacctgggaaggaattcgcgcggcagaagagctggaaaaagaaggtattaactgcaacctgacgctgctgttttcttttgcacaggcacgggcctgtgcggaagcaggcgtttttctgatttcgccgtttgtcgggcgtatttatgactggtatcaggcacgcaagccgatggacccgtatgtggtggaagaagatccgggcgttaaatcggtgcgcaatatctacgactactataagcaacaccactatgaaaccattgtgatgggcgcgagcttccgtcgcaccgaacaaatcctcgccttaaccggctgcgaggggatcctctag

SEQ ID NO: 13707 - DNA, 591 bp, Homo sapiens
  SIMILAR (190)..(414): 1001254mologous to Escherichia coli K12 putative oxidoreductase,accession number AE000373,Smith-Waterman Score=384.
atgaaacaatgcaacgcaacgggagaaataacatggccgaacatcgtggtggttcaggaaatttcgccgaagaccgtgagaaggcatccgacgcaggccgtaaaggcggtcagcatagcggcggtaattttaaaaatgatccgcaacgcgcatctgaagcgggtaaaaaaggcggtcaacaaagcggtgctgaccatcgcgcaccgattcaaaattttatctctggtgacctatctggcgatgggctggctgtcgctggtggtaatttatgaaatggcagttaagctcgcggcgggcagcgttaccttactggcggtaggcggcgtggtttattcgctcggggtgattttctacgtctgcaaacgcattccatacaaccatgccatctggcacggcttcgtgctcggcggtagtcgaataccgcagcggctcgatatgcaatgtattcgcatcgtcgcgtacgcggaagatgctatccggttccatatcgttattcatgacgacctgtaccacgacctgaccatcttccagttttaccgcagccagtaccgcaccgggacgacgccagttctcgcccattttcagctctaa

SEQ ID NO: 13708 - DNA, 2772 bp, Homo sapiens
  SIMILAR (382)..(765): 1001254mologous to Escherichia coli K12 putative oxidoreductase,accession number AE000303,Smith-Waterman Score=716.
atgatcgaaccttttaccattgcggctaacgtaaccggacatggtcaaccgactgaaaatgataccgttctggtttatggtgccggtccaatcggcctgacgatcgttcaggtattaaaaggcgtctataacgttaaaaatgtgattgttgccgatcgcattgatgaacgactggaaaaagcgaaagagagcggggctgactgggcgattaataacagccagacaccgcttggcgagattttcactgaaaaaggcatcaagccgacattaattatcgatgcggcttgtcatccttctatcctgaaagaggccgtaacgctggcttctccagcggcacgctttgaacagtggttacatatcgttagtgtatttgagtcaaatgtgaccaccggcatcatgcagtacgggtatcggatagtggaagatatggcaagcgggttgtcgcattatctcgccgatcagggatttgattcgctgcaggagatggtaggtctggcgaataacaatattgtcccggcggaagatttagaccgcagttatattgtctatccccgtatcaatcttgataaatgtgttggctgtggacgctgttatatttcctgttacgacggcggtcaccaggcgatggaatggagcgagaaaacccgcacaccgcattgtaataccgagaaatgtgtgggttgtctgctttgtggtcacgtctgcccggtgggttgtattgagctcggggaagtgaagtttaagaaaggcgagaaagaacacccgagacgcatccggcatttggttcctgtcgccggatgcggcttgaacgccttatccggcctacaaaaccataccaatcagtatgttgagcttattgtaggcccggataaaacgccccagcgcttgcatacgggatttggcttcctggtggccggatactgcgttgaacgcctttatctggcctacaaaacccgcctagacgaactctactatggacccgcggctttactgcgcggctggggctataacgtcgcgctggcgaacagcgggcgacaggcgttggagcaggtgcgggaacaggtttttgatcttgtgctttgcgatgtgcgaatggcggagatggacggcatcgccacgctgaaagagatcaaagcgttaaacccggcaattccggtgctgattatgactgcgtactccagcgtcgagacggcggtagaggcactgaaaactggggcgctggattatctcatcaagccgctggatttcgataacctacaggcgacgctggaaaaagcgctcgcgcatacgcacagtattgatgctgaaacacctgcggtgactgccagccagttcgccctcattctttacgaagcccagcgtcagcggcaaaatgcaggcatgtacctgcgtgaaaacagcatgttgccggaagcagagcaacaacgcctgttgtttgaaggcggctatccggtgctggcgaaagtcgcaaaacgcaaaggcctgccttatccccacgtcaatcagcaaggcgagatcgaagctgatgccgactggtgggctactatgcaggctgcaggttccctaacgggcgttggcgcagcacttagtaacaaactggcgaaaatcaacctgcataccgtgcaggatctactcttacaccttcccctgcgctacgaagatcgcacccatctctaccccatcggagaactactgccgggcgtttatgccacggtggaaggcgaagtgctgaactgcaatatctccttcggcggtcggcggatgatgacctgccagatcagcgacggttccggcatcctcaccatgcgctttttcaatttcagcgcggcaatgaaaaatagcctggcggcgggccgccgtgtactggcttatggcgaagcaaagcgcggtaaatatggtgcggagatgatccacccggaataccgcgcagatccgcccattcgtgctaaagccgcggaaattgccgttgcgcatgctcattatctgagtatcgagttttatcgaattgtccgcatcgacccgcatgccgaagaattcttgagtaatgaacaagttgagcggcagttgaagagtgcgatggaacgctggattattaacgtgctttctgcccaggttgacgatgtcgaaaggctaatacaaatccagcataccgtcgcggaagtgcatgcccgcataggaattccggtagaaattgtcgagatggggtttcgggtgctgaaaaaaatcctctatccggtgatcttctcttcggattattccgccgcagaaaaacttcaggtctaccatttctcgattaacagtattgatatcgcgatggaagtgatgactcgcgcgtttaccttctggcgtttgttattccggtatggctggcgaatatcctcttctctgttatctggctgcgttacttccgccaggggccggtggaatggctctggcgtagtgaatatgatcaccattcgtgatgtagcgcgtcaggctggcgtctctgtggcaacggtttcccgggtgctcaataacagcacgctggtcagtgccgacacgcgtgaagcagtaatgaaagccgcgagtgagctggattatcggccaaacgccaatgcccaggcgctggcaactcaagttagcgacaccattggcgtggtggtgatggacgtttctgatgcgttttttggcgcgctggtaaaaacggtggatctgggtcctcagcagcatcagaaatacgtgctaatcggcaatagctattatgaagcggaaaagcaggccttaattgattga

SEQ ID NO: 13709 - DNA, 1534 bp, Homo sapiens
  SIMILAR (975)..(547): 981254mologous to Escherichia coli mannitol permease,accession number V01503,Smith-Waterman Score=708.
tcaaagcaagcgttcgttaaaagcttgcgttagagcgtgcgcaagagcctcgtgtagcaagtgctctgtgcgatacagaggtatcttcaggcgagtgactgcggttccggtgctgctggcgtccagggaagcgtgcgcgctggctttttccgcgccatctttcatcacctgttgcaggaaggcttcatcgttgcggaaacggtgatagcgttcctgcaattcagtcagcataccggaaacggcatcagccacttcacctttcagatgaccatacatcttgccttcgaactgtttttccagttctgggatgctctggcccgttaccgagcagactacatgcttcactaagttgccctcatttatcccgggagccagcacactttccaggatgatgtatgcgcccgtcttcacccaagtatcatagaattccatacgcaggtaatttgaagatccagatttcacattcatctgaggtgaacaggtcccgtttattgagtatgaaataggaatatccagattcctcgcgagtatggaattgtatgattctctgtgacctgccagcagttccagcacttcatccacgctggtggtgtgtgccagacgctcgatgacggactcatcatccagtgcattggtcaggctggtgataacctgaatgtgctcgttgttacgggcagcaataccaatcaccagacgggcaatgtcatcttcttcttcaccgaagcgcacgccttccgggtactggcagaacacgacgcccgttttcagtacgcgatctttcgcttcaaccgtaccgtgtggcaccgcgatagactcacccagataagtcggggtcagtttttcacgatccagcatcgcctgaacgtattccggctcaacgtaaccgcctttcaccagctgctcgccagcaaaacgaatcgcttcttctttggttgccgctttgcgaccgaggaagatgttctccgcgcctagtttctcttcgttgccgtgtggcgtgggcagcaccaacgttcggacccgatcagggatttgattcgctgcaggagatggtaggtctggcgaataacaatattgtcccggcggaagatttagaccgcagttatattgtctatccccgtatcaatcttgataaatgtgttggctgtggacgctgttatatttcctgttacgacggcggtcaccaggcgatggaatggagcgagaaaacccgcacaccgcattgtaataccgagaaatgtgtgggttgtctgctttgtggtcacgtctgcccggtgggttgtattgagctcggggaagtgaagtttaagaaaggcgagaaagaacacccggtaacgttgtaaaaccagagacgcatccggcatttggttcctgtcgccggatgcggcttgaacgccttatccggcctacaaaaccatacaaatcagtatgttgagcttattgtaggccggataaaacgcgccagcgttgcatccggcatttggctcctgttgccggatgcggcgtgaacgccttatccggcctacaaaaccacaca

SEQ ID NO: 13710 - DNA, 999 bp, Homo sapiens
  SIMILAR (179)..(409): 321254mologous to Mus musculus E2F1-inducible protein,accession number AF176514,Smith-Waterman Score=89.
atggctggcttcctcgggcttgccctcctaaggcgcccgcttcgaacgctttttccacgtacaccgagtcccttggtacaggcaccggtcggccctacgtcctcgcgcatacagccggttcggtgcgttaagccgcgctgtttcccgatagcgatttctggttttgacagtggcttctctacctttgctcagggctttgtcgcgctggggagtttccgtctctcttacatcaccttctacgcgttgattgcggtggcgttcgtctgggtgttgtggaacaaaacccgcttcggtaagaacatttttgccattggcggtaacccggaagcggcaaaagtatctggtgtcaacgtcggcctgaacctgctgatgatctacgcgttgtctggcgtgttctatgcctttggcgggatgttagaagccggacgtatcggctctgccaccaacaacctcggctttatgtatgagctggatgctatcgcggcgtgcgtggtaggcggtgtatcgttcagcggcggtgtggggacggtgattggcgtggtgaccggggtaattatttttaccgtcatcaactatggcctgacgtatatcggcgtaaacccatactggcagtacatcatcaaaggggcgattattatcttcgccgtagcgctggattcactgaaatacgcgcgccggataaggcgttcacgccgcatccggcagtggtgcaccaatgctggatacttacatcaacgcccccataatcttcaactccagctcatccggcacttcgttatacgacagcacatgcagccccggcgcaaacaaccttgcataacgcgccagcaaagggcgcagctgcggtggcaccagcagcaccgggtctttccccgccgctttcatctgctctttcacctgtggcatcgtactctggaactggttgagcatattcggatcgaccggcacgctgtcgagcatcactttcccgccctgttgcgcctgattcaccacagttag

SEQ ID NO: 13711 - DNA, 989 bp, Homo sapiens
  SIMILAR (116)..(376): 981254mologous to Homo sapiens interferon-inducible protein 9 -27,accession number J04164,Smith-Waterman Score=455.
ctacaatgggctggtgtagaaactgctggctttttgtttcccccagcccttgggaaccaaagtaatcttgataaatgtgttggctgtggacgctgttatatttcctgttacgacggcggtcaccaggcgatggaatggagcgagaaaacccgcacaccgcattgtaataccgagaaatgtgtgggttgtctgctttgtggtcacgtctgcccggtgggttgtattgagctcggggaagtgaagtttaagaaaggcgagaaagaacacccggtaacgttgtaaaaccagagacgcatccggcatttggttcaaaaccatacaaatcagtatgttgagcttattgtaggccggataaaacgcgccagcgttgcatccggcatttggctcctgttgccggatgcggcgtgaacgccttatccggcgcgcgtatttcagtgaatccagcgctacggcgaagataataatcgcccctttgatgatgtactgccagtatgggtttaccccgatatacgtcaggccatagttgatgacggtaaaaataattaccccggtcaccacgccaatcaccgtcccacaacggcccccacacagagttagttctctgtttgaacgcagcccagtctgcaaataaacacggcgcatactggcgtgaatatcgcggatgcgttcgaggacagaagaaccgacaggcggattcttcagccgctcatcgtccatcacaaaaccttagaccagcgtggccgtactataggagagcagggtggacgcgtgtagacccgttgaacgagctgtgcgaagagaggactacgatgtgcgtcaggaccctcagctgcaggtctgtggagtttgcgtggaggtctgctagacaataccattcagaccataggcagggcaaggacttcatgactataacaccagaagcgaatgtggccacagtcaatagccccaatgaacttggacgaagactgggcgcagtcgttaaactttaa

SEQ ID NO: 13712 - DNA, 1335 bp, Homo sapiens
  SIMILAR (116)..(376): 981254mologous to Homo sapiens interferon-inducible protein 9 -27,accession number J04164,Smith-Waterman Score=455.
atggatggtcgtctggacgctgttgtattcactggtggtatcggtgaaaatgccgcaatggttcgtgaactgtctctgggcaaactgggcgtgcttggctttgaagttgatcatgaacgcaacctggctgcacgtttcggcaaatcaggcagtcaggcggctcgcgtcttgcgcgataaccagttcttcgttggttgggataaccaccgcaggacgggtaccttctttgttgatgaaaccagatttgccgaaacgtgcagccaggtgctgttttttacattggcaacaaggtcaatatctgtccagcaatggctggacaggcgatgcaaaacagtaatgacagaaacagaattattctcttcatcagcttacgttgagtgggatgcatatatagttcctgaatctgcggcgaaacggaaactgtgccgcactcttacccgcatgaccataaacaaagtgagactggataggacctacagggaggaaatgcagatcggtagccgtggatctctagagtcatctttggatctgatgaatactattattaatatgatcgccgcaggtccatgcttccgccgttattacatcctgccgacttatccgagcgatctggcagcgattcagtttgaccgttccggcaccacccacatcggtcgcttcgtcatcaaccacagctttattctgccggggttgattggtgtgagcgtatcgtgcgtcttcggctggatcttcgccgcgatcgttgccgacttcgacggcgaaaccatcatgaaagtggaaccagaagccctgcgccctgctggcgcagcaagcctttcacgacgcttcttttatgctccgcccggcacaccagaaacaggttgcggctattcttcacgatccagaagccagcgaaaacgacaagtacgtggcgctgcaattcttaagaaactccgaaaatcgcccaaaggcgtgtcccgacctgccagcataccgcacgcgatcatcgtcggccagcgcgtgtggaccggcggcggtgatgaagaaacgctaccgggttgcaccactacagtgactcaccgcttcactaaaaatctgcgtcatcacgtagaaaatgccgatctattgatcgttgccgttggcaagccaggctttattcccggtgactggatcaaagaaggcgcaattgtgattgatgtcggcatcaaccgtctggaaaatgtcgccatgttactcatcctgttgatctcgctcggtaccctggatccgctagagtcctttgattcgctgccgtggtatcagataatcaccgattatctgtggcatatcacgctgccggtgctggcttattggtag

SEQ ID NO: 13713 - DNA, 3288 bp, Homo sapiens
  SIMILAR (1152)..(1403): 971254mologous to Homo sapiens Human secreted protein, SEQ ID NO: 5920,accession number G01839,Smith-Waterman Score=443.
atgccgatcacattacggcggtcagtggaaaaagagcagctgattgaaatagccaatacgataatgccgtttggcaaatacaaagggcgtcgcttaatcgacctgccggaggagtatctgctgtggtttgcccgcaaagatgagttcccggcagaagctcgctacacccacatcgacttgcacgtaccagccccacttctcgtcatgttcacgctagacacgcgccagagcgcctgtgaccggaacccgcatttgcccatacacgtctgcagtagctggacatcgccgaaatgcgcccctcgattgtggacacgcgctctacttccacgcacacggacgccgccatacgccacgggcacgaccatcgggtcaagagcatcctggtttgtaacgtttcctgatgcgtcgttttaccgccggaaagcgccccgccaagaatttcacacatcgctgcaagggcgtagcctttatgttcggcaaaggtcaacagcgaacccaaccgaaattacccgtcgtacactgatccacaaaatggtggaagtgaacgcctgtttaaaacagctcgataacaaagatatcgctgactacgaacacaaccagctgatgcgtcgcctgcgccagttgatcgcccagtcatggcataccgatgaaatccgtaagctgcgtccaagcccggaagccataatgacggaacaagaaaaaacctccgccgtggttgaagagaccagggaggccgtggacaccacgtcacaacctgtcgcaacagaaaaaaagagtaagaacaataccgcattgattctcagcgcggtggctatcgctattgctctggcggcgggcatcggtttgtatggctgggacagaaatatattgaaaacgagggtgtggcaaactaaactcccgctgatcgccattttgcgcggtattacgcccgacgaggcgctggcgcatgttggcgcggtgattgacgccgggttcgacgcggttgaaatcccgctgaattccccacaatgggagcaaagcattcccgccatcgttgatgcgtacggcgacaaggcgttgattggcgcagttgggcgggcagcgagagttgcgagaggaatgctttactgtaatgcggcagcgaattatcgtagttacgtgatcgacacaatgcaccagctgagtcctggttattcagatgtttatgctgctgaccggggcgctgattattatcctgaccaaaaccaatcccgcgtctatctcaaaaaacgaagtcttccgttccggtatgatcgccatcgtggcggtgtacggtatcgcatggatggcagaaaccatgttcgcgaagcgattcgcgtggtgctggcgattatcgcctttgcctccatcatcttcggtaacctgatggcgctgagccagaccaatatcaaacgtctgctcggttactcatctatctctcacctcggctatctgctggtagcgctgattcgctgcaaaccggcgagatgtcgatggaagcgcagcctcggcgcgttcggcgtggtcagcctgatgtccagcccgtatcgtggcccggatgctgattccctgttctcttaccgcgtgatgacggtgatgatgctgtctctggccggtaacccgatgaagcttatttatcgaacagttatacgtgctagcggtcgatgtctagacacacttgtagacgcacagactttcgcggctaatgcagcaaactatgatacctggacttatatcgataatcccgttacagcacttgattgggatcatatggataaggcaggcactgtagatggcaactatgtaaactatagtggttttgtctattacaacaacaccaatggtgattccgatcagtcctttagcggcgacaaggacatgatttttgccatcctgaagcagcacgcaaagagtggcgaagatatctttggtgatggcgtacttgatgtaatgcaggatggctttggtttcctccgctccgcagacagctcctacctcgccggtcctgagggattaaaggtcgcggttattgcggtcgatcccagcagcccggtcactggcggtagcattctcggggataaaacccgcatgaatgacctggcgcgtgccgaagcggcgtttattcgcccggtaccatcctccggtcatatgggcggtgccagtcagcgagcgcgggaattaatgctgttatgcgaagcagcgggttatgacgtagtgattgtcgaaacggttggcgtcgggcagtcggaaacagaagtcgcccgcatggtggactgttttatctcgttgcaaattgccggtggcggcgatgatctgcagggcattaaaaaagggctgatggaagtggctgatctgatcgttatcaacaaagacgatggcgataaccataccaatgtcgccattgcccggcatatgtacgagagtgccctgcatattctgcgacgtaaatacgacgaatggcagccacgggttctgacttgtagcgcactggaaaaacgtggaatcgatgagatctgggacctgcaggcatgcaagaacaaactgaaaaacccgccacaaagcctgaaagaactggttgagagcgatcaaaactggcgggtgatttatcaggatccgcgcaccagtacaccggggctgggtctgttgctatggatgcaaaaagtctatggcgatgacgccccacaagcctggcagaaactggcgaagaaaacggtcacggtcaccaaaggctggagcgaagcctacggcctgtttttaaaaggtgaaagcgatctggtactgagttacaccacctctccggcttatcacattctcgaagagaagaaagataactacgccgccgcgaacttcagcgaaggtcactatctgcaagtggaagtcgccgcccgcaccgctgccagcaagcagccggagctggcgcaaaaattcctccagtttatggttctccggtttccagaatgcgactgccagccatcgtggcgactcgataaaacaaaatccatcgcgttctggattgacctgcagagcaagagcatcatgctggaactactttttgtgattggcttttttgtcatgctgatggtcaccggcgtttcgttgctgggcattatcgccgcgctggttgtggcgacggccattatgttcctcggcggtatgctggcattgatgataaagttgctgccgtggcaactactggcgattgcggtggtaaggtcccgggtccggaggggaaacttacccccccgggtcgaagaaccccaaggaaagtatttcgggttacggcaaccgtaa

SEQ ID NO: 13714 - DNA, 2004 bp, Homo sapiens
  SIMILAR (393)..(1082): 311254mologous to Mus musculus proline-rich protein MP- 3,accession number M12100,Smith-Waterman Score=131.
atgacgcaacaaatcaccctcattaaagacaaaattctctccgataactatttcaccctgcacaacattacttacgatctcacgcgcaaagacggcgaagttatccgccataaacgtgaagtgtacgatcgcggcaatggtgcgacgatcctcctgtacaacacgaagaaaaagaccgtggttctgattcgtcagttccgtgtcgctacctgggttaatggcaatgaaagcgggcagctgattgaaagctgcgccgggctgctggataacgacgaaccggaagtgtgtattcgcaaagaagcgattgaagagacgggctatgaagtgggtgaagtgcgcaaattatttgaactgtatatgtcgccaggcggtgtgactgagctaatccacttttttatcgccgaatacagtgacaatcagcgcgctaacgcccgtggcggtgtcgaagatgaagatattgaagtgctcgagctggtccagtgcggcgggcagatcggtgtaccagataccgtgcttgctgttttcgccaccggtattggttttttggctatgtccgtgaccaaaccccggattaacgcgcagccatacccgatgccctggcgaaacctggcccagttggtcgagcatatcaacagaacccgcattcaccggaatttgcaattcactgacgcgttcaagcgtcgcctgatcgataacatctgccgtaaaaacaatatcatcgggacccacaccgggcagtcgaaattcagcgggcaaacgcaacagattttcggcgagatcccccaggttgttcctgcctctgaacttgctgccgccatgaagcagattaaagaactccagcgcctgctcggcaagaaaacgatggaaaatgaactcctcaaagaagccgttgaatatggacgggcaaaaaagtggatagcgcacgcgcccttattgcccggggatggggaacgaaccgatgactggatggatggccgccgcagtcgtcacactgatgatacggatgtgcttctccgtatacaccatgttatcggagagctgccaacgtatggttatcgtcgggtatgggcgctgcttcgcagacaggcagaacttgatggtatgcctgcgatcaatgccaaacgtgtttaccggatcatgcgccagaatgcgctgttgcttgagcgaaaacctgctgtaccgccatcgaaacgggcacatacaggcagagtggccgtgaaagaaagcaatcagcgatggtgctctgacgggttcgagttctgctgtgataacggagagagactgcgtgtcacgttcgcgctggactgctgtgatcgtcttagttccagagggaggaatgctgccgccaaaagacagagggatgatccattgcgctggaagtttaggctgccatctggtggcaccaagctcctcatgcctctggatcaacaggctcccgctagattcgcgccgtttgtgacctgtacactgaccattctttgcggtacgggtcatgtggtttacaccattctgccgatcatctacgacgtcgccattaagaacaacatccgtccggaacgtccgatggcggcaagttctatcggtgcacagatggggattatcgccagtccggtgtcggttgcggtcgtgtctctggttgcgatgctgggtaatgtcacctttgatggtcgccatcttgagttcctcgatctgctggcaatcaccattccatcgacgttaatcggtatcctggcgatcggtatcttcagctggttccgcggtaaagatctggataaagacgaagagttccagaaattcatctccgtaccggaaaaccgtgagtatgtttacggtgataccgcgacgctgctggataaaaaactgccgaaaagcaactggctggcaatgtggattttcctcggggcaatcgctgtaatcgcccttcttggtgctgattcggacctgcgttcatccttcgggggaaaccgcttgcgatggttctggttattaaaatgtttatgctga

SEQ ID NO: 13715 - DNA, 921 bp, Homo sapiens
  SIMILAR (3)..(137): 911254mologous to Mus musculus Pro-Pol-dUTPase polyprotein,accession number Y12713,Smith-Waterman Score=212.
atgataagacgcgtaagcgtcgcatcaggcaatgaatacccaatgcgaccagcttcttatatcagaacagccccaacggtttatccgagtagctcaccagcaggcacttggtttgctggtaatgctccagcatcatcttgtgggtttcgcgaccgatacctgattgtttgtagccaccaaacgccgcatgtgccgggccagattaccgttgcggctccagacgcccgcgcccaggccatattgcgtatcgttcgccagctccagcgcttcttccatcgttttgaaggtggtcaccgccagcaccgggccaaaaatctcctcctggaacacccgcatattgttctgaccaaacaaaatcgtcggttcgaggcagatgcgctccagcctgatccagcatggcaacaggggacgctttccaacggtttacagtggcaagtgctgaccaccccccagcgtcccagcgatcgtgttgaaattcgcctgctggttaataccggttcgctcgccgaaagtacacaacagagcggttacagtcacgccatccctcgtattgcgctaacgcaaagcggtggccttgacgcagcacaggcgcgttcattgtggcagcaggggatcgaccctaaacgcccgatgccgccggtaattgtctcttatgacaccacgctgtttaatctgagtttgcccaataaccgtaacgatttgctgaaagaagcgctctcttatctggcaaatgccactggcaaattgaccatcacaccagaaaccatcaaccacgcgctgcaaagtcatgacatggtggcaaccctggtctttcgatacttaaagaagggctggtggcgctatcgtctgaaagggtcaaccttgttaagtcacgatcctgcccatccgctgaaacaacccgttgaagcggaaaaaatttaa

SEQ ID NO: 13716 - DNA, 1371 bp, Homo sapiens
  SIMILAR (1)..(159): 731254mologous to Mus musculus Pro-Pol-dUTPase polyprotein,accession number Y12713,Smith-Waterman Score=185.
atgtgccccattgaggaaactgcgtcatccttcggcggcaaaccgctgtcgatggtactggttattcagatgtttatgctgctgaccggggcgctgattattatcctgaccaaaaccaatcccgcgtctatctcaaaaaacgaagtcttccgttccggtatgatcgccatcgtggcggtgtacggtatcgcatggatggcagaaaccatgttcgcaccggcttgctacggttattacatcctgccgacttatccgagcgatctggcagcgattcagtttgaccgttccggcaccacccacatcggtcgcttcgtcatcaaccacagctttattctgccggggttgattggtgtgagcgtatcgtgcgtcttcggctggatcttcgccgcgataaagcgtgacgccgccgccggacgtgcgaaagaaaatgtcatctttcatcacttcccgttccagagcgtcaaggctgatatcgcgaccaatccgttcaaacgccccggaggggcattcatccgcatcacgcaaacatttcgcacagtgcagacatttcgcctctctgcgtaccgtctggattttgccggagatcgactccggattagcacaccacgggcaaagatgcggacagcctttaaaaaagaccaccttcgacaaagaaggcgctgtatccggcaacgcgcaccaccagcccggcataatcttgtgggcgctgttgcgcttcccgcaacggtcgccggagtgaatttcacgttcagcaacgtaccgttagacagcagcgtgttatcgagcttactgactgacttcagtaccgctgttggcagcattgttatgctggcggtgatcatgggtctgatgctggcgttcgatatgggcggtccggttaacaaagtggcctatgccttcatgctgatttgcgttgctcagggtgtttataccgtggtggccatcgctgccgtgggtatttgtatcccgccgctggggatggggctggcgacgctgattggtcgtaaaaatttctccgcagaagagcgcgaaaccggcaaagcggcactggtgatgggctgtgttggcgttactgaaggggcgattcctttcgccgctgccgatccgctgcgtgtcattccttccatcatggtcggttcagtttgtggtgcagtaactgcggcgctggtcggtgcgcagtgctatgcaggctggggtggtctgattgtgctgccggtggttgaaggcaagctgggttatatcgcagcagtggctgtcggagcagtggtgacggctgtttgtgtgaacgtgctgaaaagtctggcgcgtaaaaatgggtcttcgactgatgaaaaagaagacgacctggatttggattttgaaattaattaa

SEQ ID NO: 13717 - DNA, 2186 bp, Homo sapiens
  SIMILAR (1111)..(1674): 901254mologous to unidentified cloning vector 29kD protein essential for the replication of mini F plasmid,accession number AB015619,Smith-Waterman Score=886.
gttgtatttctcggtattcagcaggtagtgtctattactatccctcttaccatcatcagcacaacccagtccaagtacagaaattacagaaggaactacagagataccttactcggaagattggctttgaggcagtcatgaggattcggtgcaccaaagaagaagaaagtcaaacaaaatcaaagcagcaggacagtgataaactgaactccctcagcgttccttccgtttcaaagcgagtagtgctgggtgattcagtcagtacaggaacaactgaccagcagggtggtgtggccgagtgcagtagtgatgtcaaccttgagctccggcagcggaacagaggggacctgacagcggactcggtccagaggggttcccgccatggcctagagcagtacctttccagattcgaagaagcaatgaagctaaggaaacagctgattagtgaaaaacccagtcaagaggatggaaatacaacagaagaatttgactcttttcgaatatttagattggtgggatgtgctcttcttgctcttggagtcagagcttttgtttgcaaatacttggctcgcagcaacatcggaaagtgtggacgattgcagcggtgtaaagcccccgagcgggaagaacggcacgtaggcaatgccatcgtgggccaaagcatcaatcattgcatcatcagcacggtgcgcgatgttgtattcgttttgcacacagacaatttcggcaatcttgcgcgcctctgcaacctgcgtcggtgtgacgttgctcaggccaatatgttttaccaggccttgttgttgcatctctgccagcacggtcaggctggcctcaatcgatccttccgctgggccatgaccatcccccatcataacgcgcaggttaaccacatccagcacgtccagcccgagattacctctgccggagaaaatgcgggcaaccaggatgcgtacctgcgtccatccttcggcggcaaaccgctgtcgatggtactggttattcagatgtttatgctgctgaccggggcgctgattattatcctgaccaaaaccaatcccgcgtctatctcaaaaaacgaagtcttccgttccggtatgatcgccatcgtggcggtgtacggtatcgcatggatggcagaaaccatgttcggtgcgcatatgtctgaaattcagggcgtactgggtgaaatggtgaaagagtatccgtgggcctatgccattgttctgctgctggtttccaagtttgtaaactctcaggctgcggcgctggcggcgattgttccggtcgcgctggcgatcggcgttgatccggcatacatcgtggcttcagcaccggcttgctacggttattacatcctgccgacttatccgagcgatctggcagcgattcagtttgaccgttccggcaccacccacatcggtcgcttcgtcatcaaccacagctttattctgccggggttgattggtgtgagcgtatcgtgcgtcttcggctggatcttcgccgcgatatctaggtccaaagagaaaactgatggtggggaaagttctaaagagaagaaaaaagacaaagatgacaaggaggatgaaaaagaaaaagatgctggcgaggggaaaataattaaaaagagtagtgggttctctggtaagggattcaagtttgatgaaacagaacaagctttggctaatgagaggaagaagttacaaaaagcagctcttggtctacaagattcagatgatgaggatgctgcagttgatccagcctttttccacgagtcagatatactttccctacactgtgttaataaggatatgctggtgagaacacgacatctggtcggccttatttcgggagtactgattctttcagtattgctgcctgtcggcttaagcatctggctggcccatcagcaggtagaaacatcgtttattgaagagctggatacctattcctcccgcgtcgctattcgagccaataaggaagtggcttatatcgataacaacgttccccagtgttcgtctctggagcatgaaagtccgcccgataccttccccgagccaggtaaaatttcgaaagatggttatcgtgtctggttaacatcgcataacgagtttaggcattatccgttacatggtcgccatgggaacggcacattatgtcgtcatgatcgaccccgcttcctttattga

SEQ ID NO: 13718 - DNA, 1925 bp, Homo sapiens
  SIMILAR (628)..(1221): 991254mologous to unidentified cloning vector 29kD protein essential for the replication of mini F plasmid,accession number AB015619,Smith-Waterman Score=1042.
atggggattatcgccagtccggtgtcggttgcggtcgtgtctctggttgcgatgctgggtaatgtcacctttgatggtcgccatcttgagttcctcgatctgctggcaatcaccattccatcgacgttaatcggtatcctggcgatcggtatcttcagctggttccgcggtaaagatctggataaagacgaagagttccagaaattcatctccgtaccggaaaaccgtgagtatgtttacggtgataccgcgacgctgctggataaaaaactgccgaaaagcaactggctggcaatgtggtgtttcctcggggcaatcgctgtagtcgcccttcttggtgctgattcggacctgcgtccatccttcggcggcaaaccgctgtcgatggtactggttattcagatgtttatgctgctgaccggggcgctgattattatcctgaccaaaaccaatcccgcgtctatctcaaaaaacgaagtcttccgttccggtatgatcgccatcgtggcggtgtacggtatcgcatggatggcagaaaccatgttcggtgcgcatatgtctgaaattcagggcgtactgggtgaaatggtgaaagagtatccgtgggcctatgccattgttctgctgctggtttccaagtttgtaaactctcaggctgcggcgctggcggcgattgttccggtcgcgctggcgatcggcgttgatccggcatacatcgtggcttcagcaccggcttgctacggttattacatcatgccgacttatccgagcgatctggcagcgattcagtttgaccgtcccgccacaacccacatcggtggtttcgtcatcaaccacagctttattctgccggggttgattggtgtgagcgtatcgtgcgtcttcggctggatcttcgccgcgatgtacgggttcttataaatgcactttgcgtgccgcccgtgactacgcggcacgccattttcgaataacaaatacagagttacaggctggaagttatgtcaaacaaaccctttatctaccaggcacctttcccgatggggaaagacaataccgaatactatctactcacttccgattacgttagcgttgccgacttcgacggcgaaaccatcctgaaagtggaaccagaagccctgaccttgctggcgcagcaagcctttcacgacgcttcttttatgctccgcccggcacaccagaaacaggttgcggctattcttcacgatccagaagccagcgaaaacgacaagtacgtggcgctgcaattcttaagaaactccgaaatcgccgccaaaggcgtgctgccgacctgccaggataccggcaccgcgatcatcgtcggtaaaaaaggccagcgcgtgtggaccggcggcggtgatgaagaaacgctgtcgaaaggcgtctataacacctatatcgaagataacctgcgctattcacagaatgcggcgctggacatgtacaaagagtggcaagtgctgaccaccccccagcgtcccagcgatcgtgttgaaattcgcctgctggttaataccggttcgctcgccgaaagtacacaacagagcggttacagtcacgccatccctagtattgcgctaacgcaaagcggtggccttgacgcagcacaggcgcgttcattgtggcagcaggggatcgaccctaaacgcccgatgccgccggtaattgtctcttatgacaccacgctgtttaatctgagtttgcccaataaccgtaacgatttgctgaaagaagcgctctcttatctggcaaatgccactggcaaattgaccatcacaccagaaaccatcaaccacgcgctgcaaagtcaggacatgagacagggggctctaaccacaagggtgtcagcatccctggtccagcacgagaggagggaagtgcacaaggcagctcgaggcttgctataa

SEQ ID NO: 13719 - DNA, 682 bp, Homo sapiens
  SIMILAR (682)..(281): 881254mologous to Escherichia coli glycerol-3-phosphate dehydrogenase subunit A,accession number M20938,Smith-Waterman Score=586.
ggacgcccagaaagcgcgaaagggtaatatatggcgccgaggcaggggggcgaacacaaccgcgcggagacgacggcgaaccggaacaaataaaccgggcgcctaaggacgggaagagtggagtgaacaggcccagcaggctgaatagcaagaccagggcccagagccacgggggaaaggacagcggccaaaatgccagtgcgaaagcgggtcggatagctcgatatgcagcccgcccaatccgtgatagacccagcgggtagattggcgctcgcgcagtagcatctccccaggcgatggtttgcacgcctttccagcgttcggtaaggaagggggaaagatgctcgatagattgcgcgaacgtcgtgacgttaaaacgttgcagcagtccggcagcgcggcaggcgcagagttcgccctggcaggtgcccatccccacacgggtacgacggcgtaaatccagcaggctattaacgtttaaattttataccgcgtactgcacttcacccgcagttaccgcttcgcactcacataccaggctacggtgcagacggccttcgctcagccaggcaggcgtgcgatcgccatgacaataaaccgcagaaccgcacagcggggcaggcagggacatggcttaacgcaaggtagcttcaaaaaattattgtgacacaggcagtgccaa

SEQ ID NO: 13720 - DNA, 942 bp, Homo sapiens
  SIMILAR (1)..(648): 991254mologous to Escherichia coli similar to voltage-gated chloride channel protein,accession number U70214,Smith-Waterman Score=1103.
atggtgttggggcgcgaagggccaaccgtgcagatcggcggtaacattggccgtatggtgcttgatattttccgcctgaaaggtgacgaagctcgccatacgctgctggcaaccggtgctgctgcggggctggctgcggcctttaacgcgccgctggcgggtattttgtttattatcgaagagatgcgtccgcagtttcgctatacgttaatttcgattaaagcggtatttattggtgtcattatgtcgaccattatgtaccggatttttaatcatgaagttgcgttgattgacgtcggtaaactttctgatgcgccgcttaatacgctgtggctttatctgatcctcggtattatttttggcattttcggccctatttttaataaatgggtgctggggatgcaggatttgctgcaccgtgtgcacggcggcaatattaccaaatgggtgctaatgggcggtgcgattggcggtctgtgtggattgctggggtttgtggcaccagcaacgtcgggcggcggttttaacctgattcctatcgctaccgcggggaatttcagcatgggaatgctggtgtttatcttcgtcgcgcgggtcattaccaccttactctgcttctcttccggcgcgccgggcggtatgtttgcacaggtcgcccagaagctggcggcagaacaggttgatctctacctcacctggggcgaaccgccggaactggttaaagagaaaatcgaacaagtgcgggcgaaagctgccgcgcatggacgcaaaattcgtttcggtattcgtctgcatgtgattgttcgtgaaactaacgacgaagcgtggcaggccgccgagcggttaatctcgcatcttgatgatgaaactatcgccaaagcacaggccgcattccgcccggacggattccgtagggcaacagcgaatggcggcgttacataa

SEQ ID NO: 13721 - DNA, 1007 bp, Homo sapiens
  SIMILAR (180)..(461): 1001254mologous to Homo sapiens Protein sequence encoded by clone p199-7 (PL mutet.rsT4),accession number P93369,Smith-Waterman Score=542.
atgcttgcaaccgctgctgctgcggggctggctgcggcctttaacgcgccgctggcgggtattttgtttattatcgaagagatgcgtccgcagtttcgctatacgttaatttcgattaaagcggtatttattggtgtcattatgtcgaccattatgtaccggatttttaatcatgaagttgcgttgattgacgtcggtaaactttctgatgcgccgcttaatacgctgtggctttatctgatcctcggtattatttttggcattttcggccctatttttaataaatgggtgctggggatgcaggatttgctgcaccgtgtgcacgcaggtactattaccaaaggggtgctttactatattggcgacaggaataagcgcatcaagtaacagcggccagttttcttcattatcaaggaaacgggcgatattcaccgcgcgaaattcggtggcgttattgcgcagcacatacagttccggcagctctatttctgcggtttcaacggcaaggccgagttcacgcaacgaagctgccgcaagttaccgcttcgcactcacataccaggctacggtgcagacggccttcgctcagccaggcaggcgtgcgatcgccatgacgataaaccgcagaaccgcgcagcggggcaggcagggagatgactttacgcaaggtaacttcagcgggttcttgtgaaccagaaagaagccagatcggcagtcgtacaggggcgcgtgttgcccagtttgcggcataccgcgtcggtagcccattcagccatcagccgataggtcatcagtttgccaccggtgatggtgataaatccgtccagaccatcgcgttcagcatggtcgagcagcacgatgccacggctgacgttacgtccgctcgggtcgtcatcgttggcacccagagggctgatgaactggtgtcccgaaagacggcatctccctctgttactgaggctgaactccaactcctaagcttacaagatccttccacacttgattaa

SEQ ID NO: 13722 - DNA, 615 bp, Homo sapiens
aggtaagacaaccaagtgattatataatgaacaaaacagaattttacgcggatttaaatcgcgactttaacgcgctgatggcgggagaaaccagttttctggcaacgcttgcgaacaccagtgcgttgttatatgagcgtctcactgacataaactgggcaggtttttatttgcttgaggacgatacactggtactcggaccatttcagggcaaaattgcctgtgtccggatacccgtcgggcgcggcgtgtgcggcactgcggttgcccgcaatcaagtgcagcgtatcgaggatgttcatgtgtttgacgggcatattgcctgtgatgcggcgagtaattctgaaattgttctgccgctggtggtgaaaaatcagattattggtgttctcgacatcgatagtaccgtcttcggtcgctttacagacgaggacgagcaaggcttacgtcagcttgtggcacagcttgaaaaagtgcttgcaacgacggattacaaaaaattctttgcgagcgtcgcaggataatcaacggataacgtagcatttactgatagcgtcattataatgacgcctgttcatgcctgcgcttgttggctacgtccgttgtaatcaggaa

SEQ ID NO: 13723 - DNA, 548 bp, Homo sapiens
  SIMILAR (7)..(417): 751254mologous to Haemophilus influenzae Rd transcription accessory protein (tex),accession number U32738,Smith-Waterman Score=538.
atgagccgtctggggccgaaagccttcgagcagtgcgcgggcttcttgcgcattaaccacggtgataacccgctggacgcgtctaccgttcacccggaagcctatccggtggtggaacgcattctggcagcaacacagcaggcactgaaagatctgatgggtaacagcagcgaactgcgtaacctgaaagcgtctgactttactgatgagaaattcggtgtgccgacggtaaccgacatcatcaaagagctggaaaaaccgggtcgcgatccgcgtccggaatttaaaaccgctcagtttgccgatggcgtcgagacaatgaacgacctgcaaccgggtatgatcctcgaaggcgcagtgaccaacgtcaccaactttggcgcgtttgtcgatattggcgtgcatcaggacggcctgggcagcaaagtgactggagatgtggaggaaagcgtcatctcggcaacgcagagtcatgagaaggactgggtgcagatgaaggatgttgagtgtgctgatgcagtggtgatggcatattctgcagttggaag

SEQ ID NO: 13724 - DNA, 1192 bp, Homo sapiens
  SIMILAR (391)..(1170): 941254mologous to Escherichia coli hycD,accession number X17506,Smith-Waterman Score=1242.
ttcaaaaacagaggctttttcctctgctgtaaatgttcgtctcattcaaaaaacctccgcaaccccatgttttcacataactgttgcgttgaccaattgaatctacaattacagtatgatggccacggctggctgacagacatcagccacctgagcgaaggccaccgtgttgccgtccactatggctatgacgataaaggccgcctgaccggcgaatgccagacggtggagaacccggagacgggggaactgctgtggcagcatgagacgaaacacgcatacaacgagcaggggctggcaaaccgcgtcacgccggacagcctgccgccggtggagtggctgacgtatggcagcggttacctggcgggaatgaagctgggcgggacgccgctggtcgagtatacgcgggacaggctgcaccgtgagacggagtatcgcgacattatcaaactgctggggcgtcagagcgtcggcccggatgcctccggctgggtgttccgcctgacgccgtatgtgatggtgggcgtcatgctgactatcgctactgcgctgccggtggtgaccgtcggttctccgctgccgcaactgggtgatttgatcaccttactgtatctctttgccatcgcgcgtttcttctttgccatttctggtctggataccggtagcccgtttaccgctatcggcgcgagccgtgaagcgatgcttggcgtgctggtcgaaccgatgctgctgcttggtctgtgggttgccgcacaggttgccggttccaccaacatcagcaacatcaccgacaccgtttatcactggccgctgagccagagcatcccgctggtactggcgctttgtgcctgtgcgttcgccacctttatcgaaatgggcaaactgccgttcgacctggcggaagccgagcaggagctgcaggaaggcccgctctctgaatacagcggcagcggctttggcgtcatgaaatggggtatcagcctgaaacagctggtggtgttgcagatgttcgtcggggtgtttattccgtggggacaaatggaaaccttcaccgccggtggactgctgctggcgctggtgattgccatcgtaaaactggtggtcggcgtcctggttatcgcgctgttcgaaaacagcatggcccgtctgcgtcttgatattactccgcgggacatgatacgaatcgagctcg

SEQ ID NO: 13725 - DNA, 1397 bp, Homo sapiens
  SIMILAR (814)..(1755): 971254mologous to Cloning vector pBACe3.6 levansucrase,accession number U80929,Smith-Waterman Score=1632.
ctatgtgacgccggactggaagaagatctgtttgtctctgcgcgtccgaatattgaactgctgccggaaggccagtttaaataccacgtcgattttgagcatctgcatattggcgaagaaaccgggatgatttgcgtctcccggccgacgaatccaacaggcaatgtgattactgacgaagagttgctgaagcttgacgcgctggcgaatcaacacggcattccgctggtgattgataacgctggctcccgctgcggcattatcatcgccaatgaaaaaatcatcaccgccatcaccaatatgaacggcattatcagcctggcacctggcggtattggtccggcgatgatgtgtgaaatgattaagcgtaacgatctgctgcgcctgtctgaaacagtcatcaaaccgttttactaccagcgtgttcaggaaactatcgccatcattcgccggaccaagcagctctatcagcgcctgaaagcacgcggcgtgctgaactgccgatttcgtcgtgccggcaccatccacggcaaaatgccacgccatccgggataccaccagacactcggtgctgccttcccacagttggcgagtgaagaccgcggtgtcgttttcaagtacataggtgagggcgatcaggttggtggcgtggcagtgcatgatcacccgatctttgccgttggtggctttaatgcgctcgcagtgggaaaggaagtgagccggaagttcggaagtggggacggcttcgttggttaacccccaaagaatgtggtagcccgcgccgtcgctgtcgacttttacgatgcctaagttagccgcaggatcaagctggacgttacggaagaatttgcccgagccggtgacaataaacggtgtatttgccagtaaaggcatgggctggctgagcgggatatagcgcggttgttggtggaaattgtcgtgatatggtgcgatatcggcgtcatccaggcgtagcgtcaggttgccgccgttgcgctcatcccagcctttcagccagccgtcggtggtggctttgatcattccctggacaaaccaggactgagtaatgttttgcatgttctgtgttcctgtaaattcggtgttgtcggctgcacgacccgtaggccggataacgcgctcgcgccgcatccggcaatcaatgcctgatgcgctgctgtcgcgtcttatcaggcctacaactattgccgacctgtaggccgtaatatcaaagcgaagatcaaccgtcaggggatctggatcgaaaaactggaacataatccaggcaaatatatcccggaagacgtgcgcaaagcgggagaaggcgaagcggtgcgcgttgaccttaaccgtccgatgaaagagatcctcgcacagttgtcgcagtatcccgtttctac

SEQ ID NO: 13726 - DNA, 2334 bp, Homo sapiens; identical to SEQ ID NO: 10324
  SIMILAR (1)..(948): 951254mologous to Cloning vector pZC320 SopA,accession number U26464,Smith-Waterman Score=1559.

SEQ ID NO: 13727 - DNA, 1709 bp, Homo sapiens
  SIMILAR (485)..(829): 991254mologous to Plasmid F Protein D,accession number M12987,Smith-Waterman Score=581.
gcgtttctttaatcccatcaacgaatgcctgcaactcctccaccgtgccattaaatacattaaaatccaccggaccattgatgccatctacctgtccacggtcggaatgctgccagaagcgccaggccattccgtcattgtccggacgacgttgatagtaaaccgtcagcaactgttaaaagtgagccgtctggggccgaaagccttcgagcagtgcgcgggcttcttgcgcattaaccacggtgataacccgctggacgcgtctaccgttcacccggaagcctatccggtggtggaacgcattctggcagcaacacagcaggcactgaaagatctgatgggtaacagcagcgaactgcgtaacctgaaagcgtctgactttactgatgagaaattcggtgtgccgacggtaaccgacatcatcaaagagctggaaaaaccgggtcgcgatccgcgtccggaatttaaaaccgctcagtttgccgatggcgtcgagacaatgaacgacctgcaaccgggtatgatcctcgaaggcgcagtgaccaacgtcaccaactttggcgcgtttgtcgatattggcgtgcatcaggacggcctggttcacatctcttcattgtcgaacaagtttgtggaagatccgcataccgtggtgaaagcgggcgacattgtgaaggtgaaagtgctggaagtggatcttcagcgtaaacgtatcgccctgactatgcgcctggatgagcagcctggcgaaaccaacgctcgtcgcggcggcggtaatgaacgcccgcaaaacaaccgcccggcagccaaaccacgcggtcgtgaagcgcagcctgccggtaatagcgcgatgatggatgcgcgctatcccggacgcgcatcactattatcacggtgaaaaagtggcattcggtacgctgacgcagctggttctggaaaatgcgccggtggaggaaatcgaaaccgtagctgcccttagccatgcggtaggtttgccaataactctcgctcaactggatattaaagaagatgtcccggcgaaaatgcgaattgtggcagaagcggcatgtgcagaaggtgaaaccattcacaacatgccgccggtgaacgcgaaccggcagagcagtgcagtatgatggcccggcgctgacagacatcagccacctgagcgaaggccccgtgttccgtccactatggctatgacgataaagccgcctgaccggcgaatgccagacggtggagaacccggagacgggggaactgctgtgcagcatgagacgaaacacgcatacacgagcaggggctggcaaccgcgtcacgccggacagcctccgccggtggagtgctacgtatgcagcgtacctgcggtaccgaatcgagtttctgtcgctgagctgcgcaatctggaagcgtcggtcgattactctgcgcgtctggcactgctggaagagcagaaatcgttgccgtggcagtcgttctgggaaatgtattgccaacgtcacgatacgccagcaggtagcgaatggctggagagcgtgcgggaggtcggcaatagttgtaggcctgataagacgcgacagcgtcgcatcaggcattgattgccggatgcggcgcgagcgccttatccggcctacgggtcgtgcatccgacaacaacgaatttacaggaacacagaaggtaacagcatttctcaacaaggtcactactgccat

SEQ ID NO: 13728 - DNA, 1587 bp, Homo sapiens
  SIMILAR (904)..(1557): 921254mologous to Escherichia coli tas,accession number Y14609,Smith-Waterman Score=1033.
atggtaaaagaaggcaccttccgtgaagatctcttttatcgccttaacgttattcatttaatactgccgcctctgcgcgatcgccgggaagatatttccctgttagctaatcactttttgcaaaaattcagtagtgagaatcagcgcgatattatcgacatcgatccgatggcaatgtcactgcttaccgcctggtcatggccgggaaatattcgagagctttccaacgttattgaacgcgccgtcgtgatgaattcaggcccgatcattttttctgaggatcttccgccacagattcgtcagccagtctgtaatgctggcgaggtaaaaacagcccctgtcggtgagcgtaatttaaaagaggaaattaaacgcgtcgaaaaacgcatcattatggaagtgctggaacaacaagaaggaaaccgaacccgcactgctttaatgctgggcatcagtcgccgtgcattgatgtataaactccaggaatacgacgccaccggcttctttcgtgacggcatgaccatcatggtgggcggatttatggggattggcactccatcccgcctggttgaagcattactggaatctggtgttcgcgacctgacattgatagccaatgataccgcgtttgttgataccggcatcggtccgctcatcgtcaatggtcgagtccgcaaagtgattgcttcacatatcggcaccaacccggaaacaggtcggcgcatgatatctggtgagatggacgtcgttctggtgccgcaaggtacgctaatcgagcaaattcgctgtggtggagctggacttggtgggtttctcaacccaacgggtgtcggcaccgtcgtagaagaaaggcaaacaagcattgacacttcgacgcgcaaaaggccatttgaactgggacgtccgtcgcgcaataatgacaagggcatccgcccgagatcaggcgctggatcggaagaatatccgcgaacgctgcatgacagcctcaagcgcctacagactgattacctcgatctttatcaggtgcactggccgctgcgcccgttctactgcttcggcaaactcggttatagctggacggattctgcgcctgcggtttcgcagctggatacgctggacgcactggcagagtaccaacgcgcgggaaaaattcgttatatcggcgtgtcgaacgaaactgcatttggcgtaatgcgctacctgcatctggcggacaaacacgatctgccgcgtattgtcaccattcagaacccttacagtctgttaaaccgcagttttgaagtaggtctggcagaagtcagccagtatgaaggggtcgaactgctggcctattcgtgcctgggtttcggcacgctgaccgggaaatatctcaatggtgcaaaacccgctggcgcacgtaatacgctctttagtcggttcacccgctatagcggtgagcaaacgcaaaaagccgtcgcggcgtatgttgatatcgccagacgtcatggcctggaccctgctcagatggcgctcgcgtttgtacgccgtcaaccgtttgttgccagcactctgcctgggcgcaaccacgatggatcagctgaaaactaa

SEQ ID NO: 13729 - DNA, 621 bp, Homo sapiens
  SIMILAR (154)..(402): 841254mologous to Escherichia coli tas,accession number Y14609,Smith-Waterman Score=334.
atggctgtcagcagaatgaatcttgttggctcaggcctgaagactgcactggattcttttgctgacttgaaccttttcatgccttcagctcttttagatcgatttatgaagaaacacaatctaaacagaccaataaaaggtaaggagattgaatcagaaataaaaagatactcatcaaagaaaagcccaagaactggtcattccgtcgcggcgtatgttgatatcgccagacgtcatggcctggaccctgctcagatggcgctcgcgtttgtacgccgtcaaccgtttgttgccagcactctgctgggcgcaaccacgatggatcagctgaaaactaacatcgaaagtttgcatctggagttaagcgaagacgtattagctgaaattgaagcggtgcatcagcgccgttattgccagcgcaaacagcgcaccgaagccaatgccaatgggcacgaccgggatgcctatcattaccgccagcgagtaaatgcccagcatcaacaacatggcgctgttttcgccaagcaacgcattgagcggaacgacaaaaaagcccccatcacgccaatcagttcgggggatatgtgcatattgggcgctctagaccaatccgatcagtaa

SEQ ID NO: 13730 - DNA, 952 bp, Homo sapiens
  SIMILAR (475)..(948): 991254mologous to Escherichia coli NADH dehydrogenase I, subunit nuoC,accession number X68301,Smith-Waterman Score=843.
aactttccggcatccgcgaagaataaggcaatcaaaatgacgcagaaaattgaacaatctcaacgacaagaacgggtagcggcctggaatcgtcgcgctgaatgcgatcttgccgctttccagaactcgccaaagcaaacctaccaggctgaaaaagcgcgcgatcgcaaactgtgcgccaacctggaagaagcgattcgtcgctctggtttacaggacggcatgacggtttccttccatcacgctttccgtggcggtgacctgaccgtcaatatggtgatggacgtcatcgcgaagatgggctttaaaaacctgaccctggcgtccagctccctgagtgattgccatgcgccgctggtagaacacattcgccagggcgtggttacccgcatttatacctccggcctgcgtggtccactggcggaagagatctcccgtgcttactgcgccgacagtcaccacggaccatttgcaatggtgaacaatatgaccgacttaaccgcgcaagaacccgcctggcagacccgcgatcatcttgatgatccggtgattggcgaactgcgcaaccgttttgggccggatgcctttactgttcaggcgactcgcaccggggttcccgttgtgtggatcaagcgtgaacaattactggaagttggcgatttcttaaagaaactgccgaaaccttacgtcatgctgtttgacttacacggcatggacgaacgtctgcgcacacaccgcgaagggttacctgccgcggatttttccgttttctaccatctgatttctatcgatcgtaaccgcgacatcatgctgaaggtggcgctggcagaaaacgacctgcacgtaccgaccttcaccaaactgttcccgaacgctaactggtatgagcgtgaaacctgggatctgtttggcattactttcgacggtcacccgaacctgcgatggatcccct

SEQ ID NO: 13731 - DNA, 738 bp, Homo sapiens
  SIMILAR (166)..(729): 971254mologous to Escherichia coli Citrate lyase alpha chain (acyl lyase subunit) (citF) homolog,accession number D90702,Smith- Waterman Score=957.
attttcaatggatttaatgcgctcgacgttggcgatactcatggcatttttatcccatgcgtcaacatcataaccattggctgccaggtaaagactgttacgaccattgccacagcccagatccagcgttttacccggtttaaccacttttcacgcttccagtacttcagaaactcgccaaagcaaacctaccaggctgaaaaagcgcgcgatcgcaaactgtgcgccaacctggaagaagcgattcgtcgctctggtttacaggacggcatgacggtttccttccatcacgctttccgtggcggtgacctgaccgtcaatatggtgatggacgtcatcgcgaagatgggctttaaaaacctgaccctggcgtccagctccctgagtgattgccatgcgccgctggtagaacacattcgccagggcgtggttacccgcatttatacctccggcctgcgtggtccactggcggaagagatctcccgtggtctgctggcagaaccggtgcagatccactctcacggcggtcgtgtgcatctggtacagaacggcgaactgaatatcgacgtggctttcctcggcgtcccgtcctgtgatgaattcggtaatgccaacggatacaccggtaaagcctgctgcggatccctcggctatgcaatagtcgatgccgacaacgcaaaacaggtcgtgatgcttaccgaagaactgctgccttatacggataatccggaagcctga

SEQ ID NO: 13732 - DNA, 1116 bp, Homo sapiens
  SIMILAR (754)..(1083): 981254mologous to Escherichia coli Pyruvate-flavodoxin oxidoreductase (EC 1.-.-.-),accession number D90775,Smith-Waterman Score=537.
atggctgagctggttcgtcctttaaccgtccattgtaatgttatacgccgtgaattacccttaatgttgatggtcagcgtggtgcctggttccgtactctatgacggacaacttagtcgcagcgatggtatctttctcctctttctggctgtgctatggctgctgttcattgttaaacttgcacgtcaggctgaacgtcaggggactgacagcctgaccagagagcagcttgcagagctgccgcgtgacggcggattgcccgtcgcgtttttatggctcggcattgcgcttatcatcatgccagtggccacgcggatggtggttgataacgccacggtgctggcgaatttttttgccatcagcgagttgacgatgggtctgacggcaattgctatcggaaccagcctgccggaactggcaaccgcaatagcgggggttcgcaaaggtgaaaacgccattgctgtcggaaatatcattggcgcaaacatttttaatattgtcatcgtgttgggtttacccgcgctgataacgccaggagagattgattgcatcaggaattcgcactggaagttaacccgtgtgaagaaggctatttgctggccaacctttatggattatggatggctgctaacgaagaggtttgaagctcccgacaaatccacttcgcacaacctgcatttccttaacctgccaggaatcgaccgtagcaaactggaacgtattgatattcgtacatcgcagctgattacaccgctgtttgaatattcagataatgccgaatttggccttggtttccgcctgacggtcgatcaacaccgtgtccgcgtgctgcgtctgctggatcaatttgccgataaaatcccggcggaattactgacggcgttgaaatcagacgccacgccagaggttcgtcgtgaacaggttgcagctttacgccagcaactcaacgatgttgccgaagcacatgaactgctacgtgatgcagatgcactggtggaaaaatcaatctggctgattggtggtgatggctgggcttacgatatcggctttggcggtctggatcatgtattgagtttgacggaaaaaggagcaactttatttaacctctctctataa

SEQ ID NO: 13733 - DNA, 6231 bp, Homo sapiens
  SIMILAR (5454)..(5621): 711254mologous to Homo sapiens Human secreted protein HLYES38, SEQ ID NO:220,accession number Y86305,Smith-Waterman Score =183.
atgctacgctccactggcttcttccgggccattgactgcccctattggtctggggcgcccggggggccctgccggcggccctactgccacttccggcaccgcggggcccggggctccggcgcgcccggtgacggcggagaggcgccccccgcagcagcgtttcttggaggagatgtgggatttggattggagaaaaagagggacatcgcaaggaaagtcgtggagggagggttatcgagtgtgatgtcattcagactcccctgttacctctgtcccttgatagtggctctctgcttcacccagcccctgacttccttcgtcccagatttcctcattgggcggagtctgtgtcctactgagaggcaggacactgtcttccaggagagggaacccttccggggaggattgcaggaaagtccagggctctccagagtggctcagaggccctcagagaccaaaagggagccagcactgcctcaggagcaggccctagggagacaggatctggaagccatggaagtgggcctgcgcagtcctgagttggccaccgccccgtgcaccacggccgaggaggaggtggacttcaggggtgctgtcctccagacccctcttcccagagggtctgttatgggatgggcgctcccgtggacacaaccagcccctgccttgcgcttcgcgaggcctccgggtcccggcctcccgctgtccctgcagggttcccgggaacaggaggggccttccgccttcgcagttggtgttgggtgcagcataaatgaaggccagattgcatttgctgtaccccatgggactgcgggcttggtgtgggcccgtgcgcctttgttggaatctgatctcactgggtttgtggagctgcttttcaaagggctgggttacgacccctacaaccctgagctgcccaagccccccgcgcagagggagaatggcaccctgggcctgggggaggagccgcgcccggatgtgctggagttggagctggtcaaccaggccatcgaggccgtgcgcagtgaggtggagctggagcagcggcgctaccgggagctgctggagacgacccgtgagcaccgctccgccgaggcccccgccctggcgccccgcggccccaacgccagccccactgtgggcccggacgaggatgccttcccactggccttcgactacagccccggcagccacggcctattaagccctgatgccggctaccagcccaccccactggccgcccctgccgagccgggcagcaagtactcgctggcgtccctggacaggggtcagggcagaggtggagggggtggcggtgccctggaatacgtccccaaggctgtgagccagccccggcggcacagccgccccgttcccagtggcaagtacgtggtggacaactccaggccacccacagacctggagtatgaccctctctccaactactcggcccggcacctcagcagggccagctcccgggatgagcgggccgccaagcggccccggggctcccgcggcagtgagccctacacacctgctcccaagaagctctgtgacccctttggcagttgcgatgcaaggttctcagactcagaagatgaggccgccacggtcccaggtaacgagcccaccacggccagcacccccaaagccagggccgaccctgagatcaaggccaccgggcagccaccctccaaagagggcctggaggccgaggggggcggcctgcgggagaccaaggagacggccgtgcagtgcgacgtgggggacctccagccgcccccagccaagcccgcctccccagcccaggtccagtcctcacaggatgggggctgccccaaggagggaaaacccaagaagaaaaaaaccggggccccacctgcccccagctgcaaagacggggcccaggggaaggacaagaccaaggacaagggccgagggcggcctgtggagaagccccgtgcggacaagaagggcccgcaggccagcagcccccggcgcaaggcagagcggccggaagggaccaagaagaagccatcttcggccactcctgtggccacctcagggaaagggaggcctgaccggccagcgcggcggccgagccccacaagcggggactcccgaccggcggccggcagaggcccaccccgccccctccagctgcccgacaggaagagcaccaaggccccgtcggggaagctagtggagcggaaagcccgctcactagacgagggcgcctcccaggacgcccccaagctgaagaagcgggccctgagccacgccgacctctttggggacgagagtgaggacgaggccgcagggccaggggtgccgagcgtgtggccctctgccctccccagcctcagctcggactcagactccgactcagactccagcctgggcttcccggaggcgcaggggccgcccaagcggctcaaggcctccccgcccccctcccccgccccatcctcctcctcctcctcctcctcctccacctccagcgcgggggcggatgtggactactcggccctggagaaggaggtggactttgactccgaccccatggaggagtgcctgcggatcttcaacgagtccaccagcgtcaagacggaggacagaggccggctggcccggcagaggtcactggcccgtggccaccagccaggcttctgtggccacgtgcacacgccccccaaggaagagaagagtgaggagaaggggctttcgggtctgaccactctgttccccgggcagaagaggaggatctcccacctttccaagcaaggccaggaggtgcccccgctgtgctgccaggccttagcatttgtggtgacgcaggtggagcccccgaggaggggtcccgcggtgcccccggcccggcccccgacggcgcaggaggtgtgctacctgcgggcccagcaggcgcagagggcatcggcgagcttgctgcaggcccccgccaggctggcagagaagtcgccctccgtccacatttccgcccctggcgagaagaggaggatcgcccacatccccaacccccgcctggctgcagggccagatggcatttcgagggatgttgctctgagactagggccagatgtccctgctcacagctccccttcctgggtcggtgccgagcccccagtccagaagcccccctgccacacagacgtacatgcccagatgcacgtgctgctggcgctgagcggccgcggctgcctggtgctccgccacgtggtgatgggcagccactcgccctgtgcccacaccccctgtgccccgccagcccccacaggtgccaagaggacccttgcggccagcggcagccagtcctccaacggccctgagccaggtggccagcagctgaaaacacgcacattgtcggggatggcgtccaagactaccaccaccatcatccctaagcgaatcgcccacagtccatccttacagagtttaaagaaacccattatccccaaagagtttgggggcaaagtccccaccgtcatccgccagcgctatctcaacctgttcatcgaggagtgtctcaagttctgtacctccaaccaggaggccatagagaaggcactgaacgaggagaaggtggcctatgaccgcagccccagcaagaacatctacctgaatgtggccgtgaacaccctcaagaagctcaggggcctggcccccagcgctgtgcccggcctcagcaaaaccagtggccgcagggttgtgtcccacgaggtggtgttggggggcaggttggccgccaagaccagcttctcgctcagccgtccaagcagcccccgggtggaggacctgaaaggggctgccctgtacagccgcctcagggagtacctgctcacccaggaccagctcaaggagaacggctaccccttcccgcacccagagcggcccgggggcgcaatcatcttcacagctgaggagaagaggcccaaggactgtgagtcgctggcctgcgacggcctagcttcctgcaggacctgctgccgctgtggcaccgagtacctcgtgtcctcttcaggccgctgcatccgggacgaggagtgttattaccactggggacggctgcgccggaaccggggcaaccacgcagccacgctcagggcacatggccagccttgcacagccctgtggcggcccctaaagccatcgcctcagggatacctggagggtgctgcccggggcagcgctgccaagaggcctctgcagagggcactggtctccctggatccaggcctgggcgtcctggctgccacacgactgccggggcctgtggccggaggctgggagacccagtacatgtgctgctcggctgccgccggctctgtcggctgccaagtcgcaaagcaacacgtgcaggatggccggaaggagcgccttgagggcttcgtgaagacctttgagaaagagctctcaggagacacccacccggggatctacgccctggactgcgagatgtcctacaccacatatggcctggagctgacgcgcgtcacggtggtcgacacggacgtgcacgtggtttatgacaccttcgtgaagcctgacaacgagatcgtggactacaacaccaggttttcgggggtgacggaggctgaccttgccgacacaagtgtcacgctgcgtgacgtccaggccgttctgctgagcatgttcagcgctgacaccatcctcatcggacacagcctggagagcgacctcctggccctgaaggtgccctgccggcccgggtcccgcgcggttctccagcaggacctgcgcaggccccacgtcatccacagcaccgtggtggacacgtctgtgctcttcccccaccgcctgggcctcccctacaagcggtccctgcggaacctcatggccgactacctcagacagatcatccaggacaatgtggatgggcacagctccagcgaggacgccggcgcctgcatgcacctggtgatctggaaggaccgttggcaccgggctaacggttccaccacgtccgccgccctggacgcccgcggcctgcccccccctgcctctcctgcgccgactcccaggagcaccagagctggccctgagccaagccctgccccaccaggacctggggacacgggtgactcagacgtgactcaggaaggctcaggtcctgctggcatccgcggagccccaccagcatgggcagcctcggccagagagaagatctccaagatgaggacaggaactcaggtgctgatcctgggcagagggggcggtgcagcattcacctggaaggtccaggccaacaaccgtgcctacaacgggcagttcaaggagaaggtgatcctgtgctggcaaaggaagaaatacaagaccaatgtcatccgcacggccaagtacaacttctactcgttcctgccgctgaacctgtacgagcagttccaccgcgtgtccaacctgttcttcctcatcatcatcatcctgcagaactttccggcatccgcgaagaataaggcaatcaaaatgacgcagaaaattgaacaatctcaacgacaagaacgggtagcggcctggaatcgtcgcgctgaatgcgatcttgccgctttccagaactcgccaaagcaaacctaccaggctgaaaaagcgcgcgatcgcaaactgtgcgccaacctggaagaagcgattcgtcgctctggtttacaggacggcatgacggtttccttccatcacgctttccgtggcggtgacctgaccgtcaatatggtgatggacgtcatcgcgaagatgggctttaaaaacctgaccctggcgtccagctccctgagtgattgccatgcgccgctggtagaacacattcgccagggcgtggttacccgcatttatacctccggcctgcgtggtccactggcggaagagatctcccgtggtctgctggcagaaccggtgcagatccactctcacgggggtcgtgtgaatctggtacagagcggcgaactgaatatccacgtggctttcctcggcgtcccgtcctgtgatgaattcggtaatccaaacggctacaccgcctgctgcggctccctcggctatgcaatagttgatgccgacaacgcaaaacaggtcgtgatgcttaccgaagaactgctgccttatccgcataatccggcaagcattgagcaagatcaggttgatttgatcgtcaaagttgaccgcgttggcgatgctgcaaaaattcgcctggcgcgacccgtatga

SEQ ID NO: 13734 - DNA, 587 bp, Homo sapiens
  SIMILAR (142)..(732): 711254mologous to Streptomyces noursei NysC,accession number AF263912,Smith-Waterman Score=688.
aggatccccattcggcgctggcactgtatgatcagctttccaccatcgccccgacattaatcatcaattacgacgacaaaagctggcagtcgctgttaacgcagcttggcgaaattaccgggcatgagaaacaagcggcagagcggattgcgcagtttgataagcaactggcggcggcgaaagagcaaatcaaattaccgccgcagccggtcactgccattgtctatactgccgctgcacacagtgccaatctctggacgccagaatcagcacaagggcagatgctggaacaactcggctttacgctggcgaagttacccgcagggttaaatgccagccaaagtcagggtaaacgccatgacatcattcagcttggtggggaaaatctggctgcagggttaaatggcgagtcactattcctgttcgccggtgatcagaaagatgccgatgctatttatgctaatccgctgctcgcgcacctgcctgcagtacaaaacaagcaggtttatgcgctgggaaccgagacgttccgtctggattactacagcgccatgcaagtgctggataggcttaaggcgctgttttaa

SEQ ID NO: 13735 - DNA, 2403 bp, Homo sapiens
  SIMILAR (3)..(1334): 991254mologous to Escherichia coli Pyruvate-flavodoxin oxidoreductase (EC 1.-.-.-),accession number D90775,Smith-Waterman Score=2322.
ccatctggaaagaggaactctgtacccaatgtaaccactgcgttgccgcttgcccacactcagctattcgcgcaaaagtggtgccgcctgaagcgatggaaaacgcccctgccagcctgcattcgctggatgtgaaatcgcgtgatatgcgcgggcagaaatatgtcttgcaggtggcaccggaagattgcaccggttgtaacctgtgcgtcgaagtttgcccggcgaaagaccgtcagaatccagagattaaagccatcaatatgatgtctcgcctggaacatgtcgaagaagagaaaatcaattacgatttcttcctcaacctgccagaaatcgaccgtagcaaactggaacgtattgatattcgtacatcgcagctgattacaccgctgtttgaatattcaggtgcttgctccggttgtggcgagacgccgtatattaaattactgactcagctctatggcgaccggatgttgatcgctaacgccactggctgttcttcaatttatggcgggaacctgccctctacaccgtataccaccgatgccaacggtcgtgggccgggatgtgcgaactctctatttgaagataatgccgaatttggccttggtttccgcctgacggtcgatcaacaccgtgtccgcgtgctgcgtctgctggatcaatttgccgataaaatcccggcggaattactgacggcgttgaaatcagacgccacgccagaggttcgtcgtgaacaggttgcagctttacgccagcaactcaacgatgttgccgaagcacatgaactgctacgtgatgcagatgcactggtggaaaaatcaatctggctgattggtggtgatggctgggcttacgatatcggctttggcggtctggatcatgtattgagtttgacggaaaacgtcaacattctggtgctggatacgcaatgctattccaacaccggtggtcaggcgtcgaaagcgacaccgctgggtgcagtaactaaatttggcgagcacggcaaacgtaaagcgcgtaaagatcttggcgtcagtatgatgatgtacggtcatgtttatgtggcgcagatttctctcggcgcgcagctgaaccagacggtgaaagcgattcaggaagcggaagcgtatccggggccatcgctgatcattgcttatagcccgtgtgaagagcatggttacgatttggcactcagccacgaccagatgcgccaactcacagctaccggcttctggccgctatatcgctttgatccgcgtcgtgccgatgaaggcaaactgccgctggccttggattcacgcccgccgtcagaagcaccggaagaaacactcaggttgacattaactaatcccgcgtttcccgtgttacacctgactggaattgcaagttctgccgttctggccccaagaggtttatgccctacaacacggaaattggcagcgaagacatcacctaaatcaacttcaattgtctctccggcattgacggaacatgagccaagtgaattgatcgtaccagacagcgtcaccctgaccggctcaatgttggcgattgatgctccggtgatcgccagcggcgcgaccacgccgaataaccgcgtcgcggatgaccagggctttttacgccagtggagcaaggtggcgaaagaacgcaaactgcaacggttttatatcggcgaaccgagcgccgaagccgttgccgcgcaaatgccggatctgattttaattagcgcaaccggcggggattcggcgctggcactgtatgatcagctttccaccatcgccccgacattaatcatcaattacgacgacaaaagctggcagtcgctgttaacgcaacttggcgaaattaccgggcatgagaaacaagcggcagagcggattgcgcagtttgataagcaactggcggcggcgaaagagcaaatcaaattaccgccgcagccgggcgtggttacccgcatttatacctccggcctgcgtggtccactggcggaagagatctcccgtggtctgctggcagaaccggtgcagatccactctcacggcggtcgtgtgcatctggtacagagcggcgaactgaatattgacgtggctttcatcggcgtcccgtcctgtgatgaattcggtaatgccaacggctacaccggtaaagcctgctgcggctccctcggctatgcaatagttgatgccgacaacgcaaaacaggtcgtgatgcttaccgaagaactgctgccttatccgcataatccggcaagcattgagcaagatcaggttgatttgatcgtcaaagttgaccgcgttggcgatgctgcaaaaatcggcgctggcgcgacccgtatgaccactaacccgcgcgaactgcttattgcccgtagcgctgcggatgtgattgtcaactctg

SEQ ID NO: 13736 - DNA, 620 bp, Homo sapiens
  SIMILAR (1033)..(1341): 971254mologous to Homo sapiens 39k3 protein,accession number Y19062,Smith-Waterman Score=501.
tgattgaagcggaaagcctggatctgcgttactactccgtcatctataacctgattgacgaagtgaaagcggcgatgagcggtatgctgtctccggaactgaaacagcagattatcggtctggcggaagttcgtgacgtgttcaaatcgccgaaatttggtgccatcgcaggctgtatggttaccgaaggtgtggttaaacgtcacaacccgatccgcgttctgcgtgacaacgtggttatctacgaaggcgagctggagtccctgcgccgcttcaaagatgacgttaacgaagtccgtaacggtatggaatgtggtatcggcgttaagaactacaacgacgtccgcactggcgatgtgatcgaagtattcgaaatcatcgagatccaacgtaccattgcttaaggtttttagggttccatgcgggataaggcgtttacgctgcatccggcatggattgcctgatgtgacgctggcgcgtcttatcaggtcaacgtgaacagcccttccacctgaaattaattttaaaaaggggctaacagccccttttttgtcaggagaatttattatggcgaaaaaatttgttagcccgcagcgcgtagcgcagttaacacaaaaaga

SEQ ID NO: 13737 - DNA, 1281 bp, Homo sapiens; identical to SEQ ID NO: 12488
  SIMILAR (496)..(1281): 961254mologous to Homo sapiens putative p150,accession number U93563,Smith-Waterman Score=1277.

SEQ ID NO: 13738 - DNA, 1536 bp, Homo sapiens
  SIMILAR (211)..(843): 921254mologous to Mus musculus protocadherin,accession number AF281899,Smith-Waterman Score=1032.
atgattatctcaatagatgcagaaaaggcctttgacaaaattcaccaacccttcatgctaaaagctctcaataaatcagagaataaaatacctaggaatccaacttacaacggatgtgaaggacctcttcaaggagaactacaaaccactgctcaaggaaataaaagaggatacaaacaaacgcaacaacacgacatgcacatgagcacaaaaaatcaatatcatgaaaatggccatactgcccaaggaatgaaaggaattacccagccttctgcttttatacctacagctgaaagtaattcctttcagcctcaggtgaagactttgccatctccaattgatgctaaacagcagttgcaacggaaaatccagaagaagcagcaagaacagaaactacaatcccctttgccaggagaatctgcagcaaaaaagtcagaaagtgctacaagcaatggagtgactaatcttcctaatggaaatccttcaatcctttctcctcaacctattggtatcgttgtggcagctgtccctagtcccattccggtccagcggactaggcaattggtaacttcaccgagtccaatgagttcttctgacggcaaagttcttcccctcaatgtacagtcccatcaaaactgctggtggacccgcttcaacatgagttctctaaatgtggtgaaaatgacaacaatatccctcacacccagcaacagtaacacccctcttaaacattctgcctcattcatcagtgctacaggaacaacagaagaatcaaggagtgttccacagatcaagaatggttctgtcgtgtcgcttcagtctcctgggtccaggagcagcagtgcggggggaacatctgctgtggaagtcaaagtggaacccgaaacatcatcagatgagcatcctgtacagtgccaagagaactctgatgaggctaaagctccccagacacctagtgcccttttggggcagaaaagtaatacagacggagcactgcagaaaccttcaaatgaaggtgtcattgaaataaaagcaactaaggaacgcagatcctcaccagcaacggaacaaagctggatggagaatgtctttgaggagcagagagaagaaggcttcagacgatcaaaccactcgcagatacgggaggacagtcaaacaaaaggcaaagaagagaaacgcctaaaggagctgatggagctgaaaaccaaggttcgagagctacgtgaagaatgcagaagcctcaggagccgatgcgatcaactggaagaaagagtatcagcgatggatgatgaaatgaatgaaatgaagcgagaagggaattttagagaaaaaagaataaaaagaaatgagcaaagcctccaagaaatatgggactatgtgaaaagaccaaatctacgtctgattggtgtacctgaaagtgatggggagaatggaaccaagttggaaaacactctgcaggatattatccaggagaacttccccaatctagcaaggcaggccaacattcagattcaggaaatacagagaacgccataa

SEQ ID NO: 13739 - DNA, 1323 bp, Homo sapiens
  SIMILAR (12)..(254): 971254mologous to Plasmid F Protein D,accession number M12987,Smith-Waterman Score=409.
ctagcagtctatttcgttgatcctttcaaaaaaccagctcctggattcattaattttttgaagggttttttgtgtctctatttccttcagttctgctctgattttagttatttcttgccttctgctagcttttgaatgtggttgctcttgcttttctagttcttttaattgtgatgttagggtgttaattctggatctttcctgctttctcttgtgggcatttagtgctataaatttccctctacacactgctttgaatgcatcccagagattctggtatgttgtgtctttgttctcgttggtttcaaagaacatctttattgctgccttcatttcgttatgtacccagtagtcgttcaggagcaggttgttcagtttccatgtagttgagtggttttgagtgagattcttaatcctgagttctagtttgattgcactgtggtctgagagataatttgttataatttgtgttcttttacatttgctgaggagagctttacttccaagtatgtgatcaattttggaataggtgtggtgtggtgctgaaaaaaatgtatattctgttgatttggggtggagagttctgtagatgtctgttaggtccgcttggtgcagagctgagttcaattcctgggtatccttgttgactttctgtctcattgatctgtctaatgttgacagtggggtgttaaagtctcccattattaatgtgtgggagtctaagtctctttgtaggtcactgaggacttgctttatgaatcttggtgctcctgtattgggtgcatatatgtttaggatagttagctcttcttgttgaattgatccctttaccattatgtaatggccttctttgtctcttttgatctttgttggtttaaagtctttctctctggctgcccttaacattttttccttcatttcaactttggtgaatctgacaattatgtgtcttggagttgctcttctcgaggagtatctttgtggcattctctgtatttcctgaatctgaacgttggcctgccttgctagattggggaagttctcctggataatatcctgcagagtgttttccaacttggttccattctccccgtcactttcaggtacaccaatcagatgtagatttggtcttttcacatagtcccatatttcttggaggctttgctcgtttctttttattcttttttctctaaacttcccttctcgcttcatttcattcatttcatcttccattgctgataccctttcttccagttgatcacatcggctcctgaggcttctgcattcttcacgtagttcttgagccttggttttcagctccat

SEQ ID NO: 13740 - DNA, 496 bp, Homo sapiens
  SIMILAR (1)..(1158): 911254mologous to Homo sapiens putative p150,accession number U93572,Smith-Waterman Score=1849.
cgtctttcattgccatacggaactccggatgagcattcatcaggcgggcaagaatgtgaataaaggccggataaaacttgtgcttatttttctttacggtctttaaaaaggccgtaatatccagctgaacggtccctcctcgagagtatctttgtggcgttctctgtatttcctgaatctgaacactggcctgccttgctagattggggaagttctcctggataatatcctgcagagtgttttccaacttggttccattctccccatcactttcaggtacaccaatcagacgtagatttggtcttttcacatagtcccatatttcttggaggctttgctcatttctttttattcttttttctctaaacttcccttctcgcttcatttcattcatttcatcttccatcgctgataccctttcttccagttgatggcatcggctcctgagtcttctgcattcttcacgtacttctcgagccttggttttcagctccat

SEQ ID NO: 13741 - DNA, 3735 bp, Homo sapiens
  SIMILAR (160)..(1077): 931254mologous to Homo sapiens putative p150,accession number U93572,Smith-Waterman Score=1538.
atgaattctgttatagttaaagagttgacggccacgtcgtgtgtggcgtcacatcctggtagatcccatgcacttttggcgatggccaaaggatttactacagagcagcgcttgagaatcaggagagcaatatgcgttgaagactccagtgcagcgctacgacgcgtacgcgacgttggagctcggagcactcgggagcacatctgctatcgtcgcacgtgccttgaagccacatcacgaaagcacaggacgctgctcatccaatacataataagactacacaccttaaaccacgctctgagacgctactcgagtctcacttggctaaagcagcgtatcacaactactccaacgcacttggccaatagcaagagtcgacaggccagtgtggcagactatgaagaaactgtaaagaaagcaacagaagcatggaaaatctgggcagatattcctgctccaaaacgaggagaaatagtaagacagattgacgatgccttgtgggagaagatccaagtactaggaagcgtggtgtctttggagatggggaaaatcttagtggaaggtgtgggtgaagttcaggagtatgtggatatctgtgactatgctgttggtttatcaaggatgattggaggacctatcttgccttctgaaagacctggccatgcactgattgagcagtggaatcctgtaggcctggttggaatcatcacggcattcaatttccctgtggcagtgtatggttggaacaacgccattgtcatgatctgtggaaatgtctgcctctggaaaggagctccaaccacttccctcattagtgtggctgtcacaaagataatagccaaggttctggaggacaacaagctgcttggtgcaatttgttccttgacttgtggtggagcagataccggcacagcaatggccaaagatgaacgagtgaacctgctgtccttcaccgggagcactcaggtgggaaaacagatggccctgatggtgcaggagaggtttgggagaagtttgttggaacttggaggaaacagtaccattattgcctttgaagatgcagacctcagcttagttgttccatcagctctcttcactgctgtgggaatagctggccagaagtgtaccactgcgaggcgactgtttgtacatgaaagcatccatcatgaggttgtaaacagacttaaaaaggcctacgcacagatccgagttgggaacccatgggaccctaatgttctctatgggccactccacaccaagcaggcagtgagcatgtttcttggagcagcggaagaagcaaagaaagaagcagaactcgaacccgtcagagcaccatcgctgattgctttctttcacggccactctgcctgtatgtgcccgtttcgatggcggtacagcaggttttcgctcaagcaacagcgcattctggcgcatgatccgattaccaacggtacccgaagcgccacgatacatgaagccaccgcagccggcagactgacaacggaagagagcattgaattcggaacactgagcaaagagtaccaccagtcgacctttgccgggcattttctggaggtcggcgtgcatagcgcgacgggagaagttcgggtccggcgtatgctcgctgtgtgtcctgcaggacgcatcctgaatccgaaaactgcgcgcagccaggtcattggcgcaatgactatgggcatgggcgcggcactgatggaggagctggcggtggatgaccgtttgggctacttcgttaatcacgatatggcggggtatgaggtgccggttcatccggatatcccaatacaggaggtgattttcctggatgatacacgaccccatatcctccccgatgaaggccaaagctgccggatgtggtttaaggaggaacaatgtcatacccgctttcttgacaaagacgaacactggcataagccagagcaggcgtttctcaccgatgaccaccggaccattctgcgcttcgccgtagaggcgctaatgtccggtaaagagcgtgctgtgaaatgtgagatgtccgtggcttttcggtatcccggtagccgcgccattttccctataatcccatgttctgcaaagcccgtccgcatgtcaacttgctcatggcgggccactgtcattgccatgagtttgcgcctaacggaggtgttaggccagcaaaatcgctacgggtcaaacaacccatacgcacatggcccaaacgtccgtccgtctttttgtgtcgccacagtccgtgctgtcagttctattccaaccgctccaaaatcggcgctatacgatggcaggtcagttcacctaaaatctccattgacgggatgccgttgtagcgttccagtcgcgggtgaagtaaagcatacgtaccacggacagtattctatccgctcaccttatgtccggcccaaacccccaccggcctttctgattatttctgtaaaatcggcgctatacgatggctcacttctttatgtactattggttaatcgtactcctccgccttcactttttggcctatcactcctgccggtggttttacaaatgcgcacccatccagaactgcgcgatttcccaatcagcggtatcggcggcattgaaacctgggaggatgcggctgagtttttattgctcggcgcagcaacgttacaggtgaccaccggcatcatgcagtacgggtatcggatagtggaagatatggcaagcgggttgtcgcattatctcgccgatcagggatttgattcgctgcaggagatggtaggtctggcgaataacaatattgtcccggcggaagatttagaccgcagttatattgtctatccccgtatcaatcttgataaatgtgttggctgtggacgctgttatatttcctgttacgacggcggtcaccaggcgatggaatggagcgagaaaacccgcacaccgcattgtaataccgagaaatgtgtgggttgtctgctttgtggtcacgtctgcccggtgggttgtattgagctcggggaagtgaagtttaagaaaggcgagaaagaacacccgggactggttctggttaaaataagatgctcgggaacactctttcatagagagtggttgtcaacgaggttgtgcaagaaggagagtcatcctggaaaagataaagggaaacaacaggaaatggagaagaaatgtgtacaaagctcgagttcctgcctgatgcgacgcttgcgcgtcttatcaggcctacaaattcccgcaccatccgtaggccggataaggcgtttacgccgcatccggcaacggtgccgactgcctgatgcgacgcttgcgcgtcttatcaggcctacaaattcccgcaccctccgccggataaggcgtttacgccgcatccggcaatggtgccgactgcctgatgcgacgcttgcgcgtgcttatcgaggccgtacaaattctccgcaccctcccgcaggacagcgccgagaactgcccttccggaatgcaatttcccgataccgccatcgcccacgccaatgtgcgcattgccggaagcgacatcatgatgagcgatgccatgccgtcaggaaaagccagtactccggctttacgctgtgctcattcgcaacagtcgagacaggcgcccgttctctggcggtaaaccccaggaaaagggctaacgggttcgccaaccacgtcgaggtttccatcgccacagggtcccacaagcaccaattccgtcaaaccacatcatga

SEQ ID NO: 13742 - DNA, 1341 bp, Homo sapiens
  SIMILAR (550)..(2007): 941254mologous to Homo sapiens putative p150,accession number U93572,Smith-Waterman Score=2397.
ctatcctgtcgtcatggaagtgatatcgcggaaggaaaatacgatatgagtcgtctggcggcctttctttttctcaatgtatgagaggcgcattggagttctgctgttgatctcattaacacagacctgcaggaagcggcggcggaagtcaggcatacgctggtaactttgaggcagctggtaacgctctatgatccagtcgattttcagagagacgatgcctgagccatccggcttacgatactgacacagggattcgtataaacgcatggcatacggattggtgatttcttttgtttcactaagccgaaactgcgtaaaccggttctgtaacccgataaagaagggaatgagatatgggttgatatgtacactgtaaagccctctggatggactgtgcgcacgtttgataaaccaaggaaaagattcatagcctttttcatcgccggcatcctcttcagggcgataaaaaaccacttccttccccgcgaaactcttcaatgcctgccgtatatccttactgggttgttcatagcttttttcatcgccggcatcttcttcagggcgataaaaaaccacttctttccccgcgaaactcttcaatgcctgccgtatatccttactggcttccgcagaggtcaatccgaatatttcagcatatttagcaacatggatctcgcagataccgtcatgttcctgtagggtgccatcagattttctgatctggtcaacgaacagatacagcatacgtttttgatcccgggagagactatatgccgcctcagtgaggtcgtttgactggacgattcgcgggctatttttacgtttcttgtgattgataaccgctgtttccgccatgacagatccatgtgaagtgtgacaagtttttagattgtcacactttctctctgctgcccttaacattttttccttcatttcaactttggtgaatctgacaattatgtgtcttggagtttctcttcccgaggagtatctttgtggcgttctctgtatttcctgaatctgaacgttggcctgccttgctagattggggaagttctcctggataatatcctgcagagtgttttccaacttggttccattctccacatcactttcaggtacaccaatcagacgtagatttggtcttttcacatagtcccatatttcttggaggctttgctcatttctttttattcttttttctctaaacttcccttctcgcttcatttcattcatttcatcttccattgctgataccctttcttccagttgattgcatcggctcctgaggcttctgcattcttcacgtagttctcgagccttggttttcagctccat

SEQ ID NO: 13743 - DNA, 954 bp, Homo sapiens
  SIMILAR (253)..(897): 921254mologous to Escherichia coli put. Cyt repressor (aa 1- 341),accession number X03683,Smith-Waterman Score=1041.
atggtgctgaccgtcatgttcttcgtcttcagttgtgtactgagcctgactccggcagaccttggctgcggtaagtctatcgaaatcaacaagctgaaccgtatcactgcgctgttcatgctggtaacgacctggattgttgccaccctgaacccgagcatcctgggtatgattgaaaccctgggcggtccaatcatcgcgatgatcctgttcctgatgccgatgtacgcaattcagaaagtaccggcaatgccctatgggcgcaacgtcaagcgtaatgatcccgcaaccatctgggtgattgtcccggatatctgcgatcccttcttcagcgaaattattcgcggtatcgaagttacgccggcaaatcacggatatctggtgctgattggcgactgtgcgcatcaaaatcagcaggaaaaaccttttatcgatttgatcatcaccaagcaaattgatggcatgttgttgctgggttcaaggctgccgtttgatgccagcattgaggaacagcgtaatctgccgccgatggtgatggcgaacgaatttgcaccggagctggagctgcctacagttcatatcgacaatctgaccgccgcatttgatgcagtaaattatttatatgagcaagggcataaacggattggctgtatagccggtcccgaagagatgccgctgtgtcactaccgcctgcaaggctatgttcaggcgctgcgtcgctgcggcattatggttgatccgcaatacatcgcccgtggcgacttcaccttcgaagccggaagcaaagcgatgcagcagctgcttgatcttccacaaccgcctactgctgtcttctgccatagcgatgtgatggcgctcggcgcatttctcaggcgggatgatgtcgggcttgcaatatatgcccaaaattccccgccagcaggcgttgctgaaaatcttatatcacaaatgtga

SEQ ID NO: 13744 - DNA, 910 bp, Homo sapiens
  SIMILAR (946)..(2256): 951254mologous to Homo sapiens putative p150,accession number U93574,Smith-Waterman Score=2181.
ttcttatgccgtcactgcccgtgatggtgctgccgctgctggcctttgcgggcggcatggcggggttgatattgctgaagatgctggcaaagacccaccagccgatgaagtggcgctcaccggcgtggcgctttctgcatgctgggccagcctgacggattatctgatgctctcgcgcccgcaggatgtgaacaacgccctgcggcagcttatggggccgtgactggagctttgtgaagattgccatcccgctgatgattttatttctgccgctgagcctgagtttttgccgcgatctcgacctccttgcactcggcgatgcgtgcgccaccacgctcggtgtgtcggtgccccatacccgattctgggctttgttactagcggcgtggccctgcggcccgattagctttattggtctcgtggtgccgcatatgatgcgtacatcaccggtggacgtcaccggagactgctgcctgtttcggccggggacaggggcgtgcgtgggagtatgaccgagcgccggtaccggatcctgtggacccttaagtaccattggggattgccacagccccggcagtttaccggtcagcttgagcatgaaattagtcagaatgtgccgtttgctaacgaatgggctgaattgctgttcgggcagttgtgattgttgctgaatcgccatcgttacaccagtgattcgtgcccgccaacatccagcgaaacgttgctggataagctgattacccggctggcggctagcctgaaaagtccctttgcgctggataaattttgtgatgaggcatcgtgcagtgagcgcgttttgcgtcagcaatttcgccagcagactggaatgaccatcaatcaatatctgcgacaggtcagagtgtgtcatgcgcaatatcttctccagcat

SEQ ID NO: 13745 - DNA, 1395 bp, Homo sapiens
  SIMILAR (95)..(277): 651254mologous to Mus musculus reverse transcriptase,accession number U15647,Smith-Waterman Score=227.
ttacattttggcatgattttgcagtggctggtaccggttgttcctttccatgtttagcacttccttcaggagctcttttagggcaggcctggtggtgacaaaatctctgagcatttgcttgtctgtaaagtattttatttctccttcacttatgaagtttagtttggctggatatgaaattctgggttgaaaattattttctttaagaatgttgaatattggcccccactctcttctagcttgtagggtttctgccgagagatcggctgttagtctgatgggcttccctttgagggtaacctgacctttctctctggctgcccttaacattttttccttcatttcaactttggtgaatctgacaattatgtgtcttggagttgctcttctcgaggagtatctttgtggcgttctctgtatttcctgaatctgaatgttggcctgccttgctagattggggaagttctcctggataatatcctgcagagtgttttccaacttggttccattctccccatcactttcaggtacaccagtcagacgtagatttggtcttttcacatagtcccatatttcttggaggctttgctcatttctttttattcttttttctctaaacttcccttctcgcttcatttcattcatttcatcttccattgctgatacgctttcttccagttgatcgcatcggctcctgaggcttctgcattcttcacgtagttctccaggcttggtttccagctccatcagctcctttaagcacttctctgtattggttattctgttcactctgatgatagtttcttttgctgtgcagaagctctttagtttaattagatcccatttgtcaattttggctcttgttgccattgcttttggtgttttagtcatgaagtctttgcccacgcctatgtcctcaatggtattgtctcggttttcttctagggtttttatggttttaggtcttacatttaagtctttaatccatcttgaattaatttttgtatacggtgtaaggagagggtccagtttcagttttcttctgaagcctacttctgtcaatttgtcaaactcattctccatccagttttcttcccttgctggcaaggagttgtgatcctttggaggagaataggcattctggtttttggaattttctgccttttgcactggtttctccccatcttcatggatttccttacctttggtgtttgatgttggtgacctgccagaggccagctggagctctcctgtatgaggtgtctgttggcccctactggaaggtgtctcccagtcaggagacatgggggtcagtgacccatttgaggaggcagtctgacctttagcagagcttgaacgctgtgctgggagatctgctgctctcttcagagccat

SEQ ID NO: 13746 - DNA, 895 bp, Homo sapiens
  SIMILAR (403)..(1197): 951254mologous to Homo sapiens putative p150,accession number U93563,Smith-Waterman Score=1368.
atggggaaaaaacagagcagaaaaactggaaactctaaaaagcagagtgcctctcctcctccaaaggaatgcagttcctcaccagcaacagaacaaagctggacggagaatgactttgacgagttgagagaagaaggcttcagacgatcaaactactccgagctacaggaggaaattcaaaccaaaggcaaagaagttaaaaactttgaaaaaaatttagatgaatgtataactacaataaccaatacagtgaagtgcttaaaggagccgatggagctgaaagccaaggctcgagaactacatgaagaatgcagaggcctcaggggccgatgtgatcaactggaagaaagggtatcagtgatggaagatgaaatgaatgaaatgaagcgagaagggaagtttagagaaaaaagaataaaaagaaacgaacaaagcctccaagaaatatgggactatgtgaaaagaccaaatctacgtctgattggtgtacctgaaagtgacggggagaatggaaccaagttggaaaacactctgcaggatattatccaggagaacttccccaatctagcaaggcaggccaacattcagattcaggaaatacagagaatgccacaaagatactcctcgagaagagcaactccaagacacataattgtcagattcaccaaagttgaaatgaaggaaaaaatgttaagggcagccagagagaaagaagatctaactagccacaatattcccttaaaccaaagcctaatccagagtaaggctttaactctcatcaattctgtaaagcctgaaagaggtgaggaagctgcagaaggaaagtttgaaactggcagagatcggttcatgacgtttaaggaaagaaggtgtctccataacataaaaccacaag

SEQ ID NO: 13747 - DNA, 1727 bp, Homo sapiens
  SIMILAR (745)..(1146): 881254mologous to Homo sapiens putative p150,accession number U93572,Smith-Waterman Score=595.
atgggaaaaaaacagaccagaaaaactggaaactctaaaaagcagagtgcctctcctcctccgaaggaacgcagctcctcaccagcaacggaacaaagctggatggagaatgactttgacgagttgagagaagaaggcttcagacgatcaaactactctgagctacaggaggaaattcgaaccaatagcaaagaagttaaaagttttgaaaaaaaattagacgaatggataactagaataaccccaccgcagagaaaggcccttaaaggaccctgatgggagcctgaaaaccccaaggcacaagaacctccgtgacgaatgcataagccctcagtagccgattcaatcagctggaagaaagggtatcactgatggaagatcaaatgaatgaaatgaagcgagaagacaagtttagagaaaaaagaataaaaagaaacgaacaaagcctccaagaaatatgggactatgtgaaaagaccaaatctacgtctgattggtgtacctgaaagtgacggggagaatggatctaagttggaaaacactctgcaggatattatccaggagaacttccccagtctagcaaggcaggccaacattcagattcaggaaatacagagaacgccacaaagatactccttgagaagagcaactccaagacacataattgtcagattcaccaaagttgaaatgaaggaaaaaatgttaagggcagccagagagaaagacagatcaacgagacagaaagtcaacaaggatacccaggaattgaactcagctctgcaccaagcggacctaatagacatctacagaactctccaccccaaatcaacagaatatacatttttttcagcaccacaccacacctattccaaaactgaccacatagttggaagtaaagctctcctcagcaaatgtaaaagaacagaaattataacaaactatctctcagaccacagtgcaatcaaactagaactcaggattaagaatctcactaaaagccgctcaactacatggaaactgaacaacctgctcctgaatgactactgggtacataacgaaatgaaggcagaaataaagatgttctttgaaaccaacgagaacaaagacaccacataccagaatctctgggacgcattcaaagcagtgtgtagagggaaatttatagcactaaatgcctacaagagaaagcaggaaagatccaaaattgacaccctaacatcacaattaaaagaactagaaaagcaagagcaaacacattcaaaagctagcagaaggcaagaaataactaaaatcagagcagaactgaaggaaatagagacacaaaaaacccttcaaaaaatcaatgaatccaggagctggttttttgaaaggatcaacaaaattgatagaccgctagcaagactaatgaagaaaaaaagagagaagaatcaaatagacacaataaaaaatgataaaggggatatcaccaccaatcccacagaaatacaaactaccatcagagaatactacaaacacctctatgcaaataaactagcaaatctagaagaaatggatacattcctcgacacatacactctcccaagactaaaccaggaagaagttgaatctctgaatagaccaataacaggatctgaaattgtggcaataatcaatagtttaccaaccaaaaagagtccaggaccagatggattcacagccgaattctaccagaggtacaaggaggaactg

SEQ ID NO: 13748 - DNA, 1856 bp, Homo sapiens
  SIMILAR (25)..(954): 881254mologous to Homo sapiens putative p150,accession number U93569,Smith-Waterman Score=1387.
tcagattttagttatttcttgccttctgctagcttttgaatgtgtttgctcttgcttttctagttcttttaattgtgatgttagggtgtcaattttggatctttcctgctttctcttgtgggcatttactgctataaatttccctctacacattgctttgaatgtgtcccagagattctggtatgttgtgtctttgttctcgttggtttcaaagaacatcttcatttctgccttcatttcattatgtacccagtagtcattcaggagcaggttgttcagtttccatgtagttgagcggtttttagtgagattcttaatcctgagttctagtttgattgcactgtggtctgagagatagtttgttataatttctgttcttttacatttgctgaggagagctttacttccaagtatgtggtcagttttggaatagatgtggtgtggtgctgaaaaaaatgtatattctgttgatttggggtggagagttctgtagatgtctattaggtccgcttggtgcagagctgagttcaattcctgggtatccttgttgactttctgtctcgttgatctgtctaatgttaacagtggggtgttaaagtctcccattattaatgtgtgggagtctaagtctctttgtaggtcactcaggacttgctttatgaatctaggtgctcctgtattgggtgcatatatatttagggtagttagctcttcttgttgaattgatccctttaccattatgtaatggccttctttgtctcttttgatctttgttggtttaaagtctgttttatcagagactaggtttgcaacccctgcctttttttgttttccatttgcttggtagatcttcctccatccttttattttgagcctatgtgtgactattttggcatgattttgcagcggctggtaccggttgttcctttccatgtttagcgcttccttcaggagctcttgtagggcaggcctggtggtgacaaaaatctctcagcatttgcttgtctgtaaaagattttatttctccttcacttatgaagcttagtttggctggatatgaaattctgggttgaaaattcttttctttaagaatgttgaatattggcccccactctcttctggcttgtagggtttctgccgagagatccgctgttagtctgatgggcttccctttgagggtaacccgacctttctctctggctgcccttaacacttttttccctcatttcaactttggtgaatctgacaattatgtgtcttggagttgctcttctcgaggagtatctttgtggcgttctctgtatttcctgaatctgaacgttggcctgccttgctagattggggaagttctcctggataatatcctgcagagtgttttccaacttggttccattctccacatcactttcaggtacaccaatcagacgtagatttggtcttttcacatagtcccatatttcttggaggctttgctcatttctttttattcttttttctctaaacttcccttctcgcttcatttcattcatttcatcttccattgctgataccctttgtagttctcgagccttggttttcagctccatcagctcctttaagcacttctctgtattggttattctagttatacattcctctaaatttttttcaaagttttcaacttctttgtctttggtttgaatgtcctccagtagctcagagtaatttgatcgtctgaagccttcttctctcagctcgtcaaaatcattctccatccagctttgttccgttgctggtgaggaactgcgttcctttggaggaggagaggcgctctgcgttttagagtttccagtttttctgttctgtttttcccccat

SEQ ID NO: 13749 - DNA, 2618 bp, Homo sapiens
  SIMILAR (166)..(711): 561254mologous to Homo sapiens A protein related to Drosophila naked cuticle polypeptide,accession number B08216,Smith- Waterman Score=445.
atgaatgaaatgaagcgagaagacaggtttagagaaaaaagaatagaaagcaatgagcaaagcctccaacaaagaggggagtatgtgaaaagaccaaatctacgtctgattggtgttcctgaaagtgacgggcagaatggaaccaagttggaaaacactctgcaggatattatccaggagaacttccccaatctagcaaggatttatcaaacactgaccatgtcctatcatggccttatttactatcccggaaagcacctggccgctggtcaccatggtggtgattatggggccaatctcgtttacggcgatatggcagaacagaaatgctcgaagatcctggcattcgcacacatcatgatggtgctgaccgtaatgttcttcgtcttcagctgtgtactgagcctgactccggcagacctggctgcggctaaagagcagaacatctcgattctgtcttacctggctaaccactttaacgcaccggttatcgcgtggatggctccgattatcgcgattatcgctatcaccaaatccttcctcggtcactacctgggcgcacgtgaaggcttcaacggtatggtgattaaatctctgcgtggtaaaggtaagtctatcgaaatcaacaagctgaaccgtatcactgcgctgttcatgctggtaacgacctggattgttgccaccctgaacccgagcatcctgggtatgattgaaaccctgggcggtccaatcatcgcgatgatcctgttcctgatgccgatgtacgcaattcagaaagtaccggcaatgcgggaatctttagagtgtttaactgaggtcaccatcatgccgttaagtccctacctctcttttgccggtaactgttccgacgcgattgcctattatcaacgtacgttgggcgcggaactgctctataaaatcagcttcggcgaaatgccaaaatcagcgcaggacagcgccgagaactgcccttccggaatgcaatttcccgataccgccatcgcccacgccaatgtgcgcattgccggaagcgacatcatgatgagccaatgccatgcggtcaggaaaagccagctactccggctttacgctggtgctcgattcgcaacaggtcgaagaaggaaaacgctggtttgacaaatcttgccgctaacggaaaaatcgaaagggctgggcaggaaactttctgggcgcatggctttggcaaagtcaccgataaatttggccctactcaatgtaaagatcacaaggatgaagacctttatagtgatccacttccacaatgtaacaacgcctttctgggacttgccggcagcttatggggccgtgactggagctttgtaaagatggccatcccgctgaagattttatttctgccgctgagcttgagtttttgccgcgatctcgacctccttgcactcggcgatgcgcgcgccaccacgctcggtgtgtcggtgccccatacccgattctgggctttgttactagctgtcgccatgacatctaccggcgtggccgcctgcggcccgattagctttattggtctcgtggtgccgcatatgatgcgtagcatcaccggtggacgtcaccgcagactgctgcctgtttcggccctgacaggtgcgttgctgttggtggttgccgatctgctggcgagaattattcatcccccactggagctcccggttggcgtgctgaccgccattatcgacaatgcacgagttaatgtcgccatgaaccagacccggatcaatcatcttgccgttcgtcggttaaccgagctttccggcggtcagcgccagcgcgcatttctggcaatggtcctggcccagaatacgcccgttgtattacttgatgagccaaccacctatcttgatatcaatcaccaggtggacctgatgcggttgatgggcgaactccggactcaggggaaaacggtggtcgctgtgctgcacgaccttaatcaggctagccggtactgcgatcaactggtggtaatggcaaacggacatgttatggcgcaaggcacaccagaagaggtgatgaccccaggattgctgagaacagtattcagcgtggaagcggaaatacaccccgagccgcatcgggagatgctcgatcaggtgctgaaactcttttccattgtacctgactacgatctcaacataatgcagccaggacagggcctgacagagataacctgtcggattctggaagggctaaaacctattcttgccgagttcaaaccagacgtcgtgctggttcacggcgatacgacgacgacgctggcaaccagcctggcggcgttttatcagcgtattcctgttggtcacgttgaggctggtctgcgcacgggcgatctctattcgccgtggccggaagaggctaaccgtacattgaccgggcatctggcgatgtatcacttctctccaaccgaaacttcccggcaaaacttgctgcgtgaaaacgttgcggatagccgaatcttcattaccggtaatacagtcattgatgcaggatgttgccagtacccaaggccagcgatgtgccggttcatgtgccctttaggcagcgcctgtaatccacgtggcacgacttccgcaacatatgctgactga

SEQ ID NO: 13750 - DNA, 1797 bp, Homo sapiens
  SIMILAR (469)..(858): 321254mologous to Mus musculus occludin,accession number U49185,Smith-Waterman Score=132.
tcaagtagttttttccaattctgtgaagaaagtcattggtagcttgatggggatggcattgaatctgtaaattaccttgggcagtatggccattttcacgatattgattcttcctacccatgagcatggaatgttcttccatttgtttgtgtcctcttttatttccttgagcagtggtttgtagttctccttgaagaggtccttcacatcccttgtaagttggattcctaggtattttattctctttgaagcaattgtgaatgggagttcactcatgatttggctctctgtttgtctggtgttggtgtataagaatgcttgtgatttttgtacattgattttgtatcctgagactttgccgaagttgcttatcagcttaaggagattttgggctgagacgatggggttttctagataaacaatcatgtcgtctgcaaacagggacaatttgacttcctcttttgctaattgaataccctttatttccttctcctgcctgattgccctggccagaacttccaacactatgttgaataggagcggtgagagagggcatccctgtcttgtgccagttttcaaagggaatgcttccagtttttgcccattcagtatgatattggctgtgggtttgtcatagatagctcttattattttgaaatacgtcccatcaatacctaatttattgagagtttttagcatgaagagttgttgaattttgtcaaaggctttttctgcatctattgagataatcatgtgggttttgtctttggctctgtttatatggttggcctgccttgctagtattggtggaagttctcctggaataatatcctgcaggagtgttttccaacttggttccattctccccatcactttcaggtacaccaatcagacgtagatttggtcttttcacatagtcccatatttcttggaggctttgctcatttctttttattctttttttctctaaactttccttctcggcttcatttcattcatttcatccatttcatcttccattgctgataccctttcttccaagttgatcgcatcggcatcctgagggcttctgcatgtcttcacctagttctcgaggccttggctttcaagctccatcagctgctcctttaagcacttccctggtaatgggtaatcctagttatacattcttgctaaaatttttttccaaagttttcaacatcgttgccctttgggtatgaatgtccccccgtaggctcagagtaattttgatcggctgaagccttcttctctcagcgcgtcaaaaatcattctccatccagctttgttccgttgctggtgaggaactgcgttcctttggaggaggagaggcgctctgctgtttagagtttccagtttttctgttctgtttttttccccatctttgtggttttatgtacttttggtctttgatgatggtgatgtacagatgggtttttggtgtggatgtcctttctgtttgttagttttcctttgccgccttgcagtttgatctcagactgcagtgctagcaatgagcgagactccgtgggtgtaggaccctccgagccaggtgcgggatataatcttgtggtgcgccgttttttaagcccgtcggaaaagcgcagtattcgggtatgagtgacccgattttccaggtgccgtccgtcacccctttctttgactcggaaagggaactccctgaccccttgcgcttcccaagtgaggcaatgcctcgccctgtttcggctggcgcacggtgtgcgcacccactctcctgcacccactgtctggcactcc

SEQ ID NO: 13751 - DNA, 1877 bp, Homo sapiens
  SIMILAR (512)..(829): 341254mologous to Mus musculus proline-rich protein MP- 3,accession number M12100,Smith-Waterman Score=91.
  misc_feature (1)...(1877): n = a,t,c or g
ttgcaggtcgattttagaggttgaaaaatggttcccttcgctttgcggttgttgccaccaatttaagtacgggacgtgaattatggtttactgaaggcaatctccatcttgctattcgcgcatcatgcagtattccaggactcatggcacctgttgcacataacggctactggctggttgatggagcagtcgttaacccaattcctatttccctcacgcgtgcattgggggctgatattgtgatagcggttgacctgcagcacgatgctcatttgatgcaacaagatttgctctcctttaatgtcagtgaagaaaatagcgagaatggtgattctctgccgtggcatgcgcgtctgaaagaaaggttaggcagcataacgacacgtcgggcggtgacagcgccaacggcaacagagattatgaccacttctatccaggtgctggagaaccgccttaaaaggaaccgcatggcaggtgatccgcccgatattctgattcaacctgtttgcccgcaaatatctacgcttgatttccatcgcgcgcacgctgccattgcggccggacagctggcagtggaaaggaaaatggacgaacttttgccgttgaaaggcgatcgcgccaatgcagtggcgaatctggaaaaagccctcgcactggacccgcacagcagcaacaacgacaaatggaacagtctgctgaaagtaaaccgctactggctggcgatccagcagggcgatgctgcgctgaaagccaataatcctgaccgggcagaacgcctgttccagcaggcgcgtaatgtcgataacaccgacagttatgcagtgctggggctgggcgatgtggcgatggcgcgaaaagattatcccgccgccgaacgttattatcagcagaccttgcgtatggacagcggcaacactaacgccgtgcgcgggctggcaaatatttaccgccagcaatcgccagaaaaagctgaagcgtttatcgcctcgctctctgccagtcagcggcgtagcattgatgatatcgaacgcagcctgcaaaacgaccgtctggagagcaagtttatccaggggctgttctttgctggtcagattaacggcactaccggttacgaagaagccgctgcgcaaggtttgctggccggtcttaacgctgcccgtctgtctgctgacaaagaaggttgggctccggcacgttctcaggcgtatcgggtacgagctaggggtcgtgtcagngtggtgttagggcatgttttctcacccagtgatgcacagcttgcgcagctcaatgacggcgtgcccgttagcggcagtagtgggttgttcgacctggttcagaatatgtcaccggaacagcaacaaattttgctgcaggcttcagcggcgtccactttttcaggattaatcggtaacgccattctcgccggaggcgtaatattaattatccagctggtgtctgcgggtcagagagtcagtgcgctgcgagctattggtgccagtgcgccgatattgccaaagttatttattctgatttttctgactacccttttagtacagattggcatcatgctggtggtcgttccgggaattatcatggccattttactggccctggcaccggtgatgttggtacaggacaaaatgggcgtttttgcctcgatgcgtagcagtatgcggctgacttgggcgaatatgcgtctggtggcacccgcagtactgagctggttgctggcaaaaacactgttgctgctttttgcctcttcttttgccgcattaaccccggaaattggtgccgtactggcgaacaccttgagcaacctgatttcagccatattgctcatctatctgttccgcctgtatatgttgattcgccaataa

SEQ ID NO: 13752 - DNA, 444 bp, Homo sapiens
  SIMILAR (370)..(149): 971254mologous to Escherichia coli glyceraldehyde 3-phosphate dehydrogenase (AA 1-339),accession number X14436,Smith-Waterman Score=363.
atggtggatcaccaggctgcaactcttgctgatcataagaaaattcatacgggagaaaaaccccacaaatgtgacaaatgtggcaaagcttttaactgctcctcaaaccttactagacataaaaaaattcatactgatgagaaactctacaaacctaaaagatatgacaatgattttgacaacacctccaacttttctaaatatacaaaaaatcatcctggtgaaaaacctttaaaatgtgaagaattgcagatgctctggtatgagcttccagggtacctgagactgccctgtaagcagctgtggccagactgggtccctgggagaggccagcagaccaaggagtgctcagttggaccagcttcttctgatttgcaagaccatcctgcagaaattaggcccaacagttccgtagggctaaagtctcttatgggagacagttga

SEQ ID NO: 13753 - DNA, 810 bp, Homo sapiens
  SIMILAR (132)..(64): 521254mologous to Scyliorhinus canicula ATPase 8,accession number Y16067,Smith-Waterman Score=52.
gtggaggctgtgtgctgttgcactaaaggtggtgttggcttggggcaggatactggccagtaaaggttttgatgccttctctgtgccccccaagaaagagtgattgttcagagtgtgggaggttaccctgttctctgcacagtgttagcacaaaggcaggggtggagttttctggctctctgcccaccaaagtttcatctacaatggcagttgctgggagtggcaggggcatactacatttccatttgctggtggggcaagcaaagccaaactcacctttgcagacatgtgccagcaaagtaatatggggagttgccatggtcttgggggaagctggagtatagggaagaaacatgtgagctggtgcagtcacaggggctgccttgccggagctcttcatgggtcaggcatggcccaccagtgcagatgctatggtatgggctcctagggtacctgagactgccctgtaagcagttgtggccagactggatccctgggagaggccagcagaccaaggagtgctcagttggatcagcttcttctgatttgcaagaccatcctgcagaaattaggtccaacagttcccctagggctaaagtctcttatgggagaaagttgaaacctatggaaatggccgttaatggccacacttctacttaagggggcttttgcacctaaaccctttgggttaccaccatgaaccggggttgcttgcccccacctttttgcctgtcttctggttgctgcatctcagagacgtgtaggccagcaatcactcagtgcaagccgaacaagaaggaggaactttga

SEQ ID NO: 13754 - DNA, 618 bp, Homo sapiens
  SIMILAR (584)..(483): 481254mologous to Homo sapiens Angiogenic factor from human basic fibroblast growth factor,accession number R12112,Smith- Waterman Score=64.
tatgctggggccaagaggaaattttcttgaatgatccccccccgtagctttccacggctccactgggtctgcgatccaaaacttcagatcctaacagttgggcttttcaaacaacccagtttttaaaaatgaatgtggcttacccccaacattccagctgatcaaaagtacttgtttagaaaaataagtttaggaatgaagtggaaacaaggcctttgaaatgcagcttaacctaaatagcacattttagacttttcctccccactgcacattctttatggtgtaggggccagggagcctgcagtcttcacccctcctgagccctccttggcctcgggcttcctctcccctgctgctgaggccttcagtcaggggctggcatctgggagaaccttgaaactgtttcccatcccctttggcagcaagcaacaagcaccaaaacgctccagttaaccccagtgcaatcatcgttaacgtgaaacagctgcccgaggcctggcgtatccaccagaccgccccctcccctccatgctcagctgtgagtcaccagagaccccggctaaggcagggcccgggagggagcggggatgcgaaaaatgttgatggagcccagctgcg

SEQ ID NO: 13755 - DNA, 399 bp, Homo sapiens
  SIMILAR (11)..(184): 451254mologous to Hordeum vulgare pZE40,accession number X68600,Smith-Waterman Score=102.
atgtccctgcagacagccagcggcaccaaggcctgtccttggcaggtgtgcccagcaacagagggctcctcctggggaggcctgtccagctgccaggccccgccccgccacagcccccgctgtcctcctccctccctcagccgtgccagcagcggcacagaactggaattgccctggacggccacagctctgcatatcccccaggagtgtggacaagaaaaaataaacacaattagagttcacgacaatgggcccctgatggaagcaagcaacaagcaccaaaacgctccagttaacaccagtgcaatcatcgttaacgtgaaacagctgcccgaggcctggcgtatccaccagaccgccccctcccctccatgctcagctaggaagttgtccgcataa

SEQ ID NO: 13756 - DNA, 399 bp, Homo sapiens; identical to SEQ ID NO: 13755
  SIMILAR (1242)..(679): 981254mologous to Escherichia coli genF peptide,accession number M27058,Smith-Waterman Score=935.

SEQ ID NO: 13757 - DNA, 922 bp, Homo sapiens; identical to SEQ ID NO: 10778
  SIMILAR (7)..(519): 781254mologous to Homo sapiens unnamed protein product,accession number AK023130,Smith-Waterman Score=771.

SEQ ID NO: 13758 - DNA, 699 bp, Homo sapiens; identical to SEQ ID NO: 10779
  SIMILAR (1556)..(918): 1001254mologous to Escherichia coli genF peptide,accession number M27058,Smith-Waterman Score=1081.

SEQ ID NO: 13759 - DNA, 489 bp, Homo sapiens
  SIMILAR (3)..(191): 1001254mologous to Escherichia coli acetate kinase (EC 2.7.2.1),accession number M22956,Smith-Waterman Score=318.
ctatctcaagtaggcctgattccgcttcttcccactgtcagcatttggcagtttactccagggttcagctggtggaggaaggtgacagtcctggcaccccgccaagtacatcccggtggccacggccgccgcgctgctggtcggctccagcaccctcttcttcgtgttcacgtgagtcggcgccgcgtctgggggcacgcgggcagcgatgggcagggcccgcacagcccgggcacgggggcagcggtcgcgggggctggcggggccccgggcagtgggcgggcggggcgccggctgcaggcgatggcagtccctctccacccgctggggcccccttccaccaatctggggttgagacatagcccaggtggcacgaacgatggccacctgttccaaggtggggccacccctgagcatgtgagcctctgctgaactcctccgagactgctcagttcctgagaaggggttctgttgggtcggctggcccat

SEQ ID NO: 13760 - DNA, 450 bp, Homo sapiens
  SIMILAR (8)..(91): 501254mologous to Lycopersicon esculentum glycine-rich protein,accession number X55696,Smith-Waterman Score=55.
atggtgcggcgcgggcggccgcggggcgcgcggggaaggcgggagagcggcgcgggtgagtgggagcggcggctccggcatcagtttcggggatcgtgtaatccgatcccttctgactcacaagccctgagtgacagttctgatttggttcaaccgcgggagggaggggaaagagaaagaaagaaacccccagccgtacgcctctcctggcatccaatcgactttctggaaaaaggcttctctgattaccaccgccccccatccttggctccccatctccttgttttacattttcccaaagccatccccgaaactccctctcgcgggatgatgcctttggaagttcagggtttttctctccaccggactcgtctgccctcggggccaaatccgcgaagcgaggaggagctcccaccacacagcctgctgtccctatgggccactttataa

SEQ ID NO: 13761 - DNA, 274 bp, Homo sapiens
  SIMILAR (533)..(895): 981254mologous to unidentified cloning vector 29kD protein essential for the replication of mini F plasmid,accession number AB015619,Smith-Waterman Score=629.
ggacatggatgaagctggaaaccatcattctcagcaaactgttgcagggacaaaaaaccaaacaccgcatgttctcactcgtaggtgggaattgaacaatgagaacacatggacacaggaaggggaacatcacacactggggcctgttgtgagatttctagaagctctcaatcactttgagaaagcaagaaccttgatttatcgtcttcctggagtgttaacttggcccacgagtaatgtgattattgaagagtctcagccacaaaaaataaag

SEQ ID NO: 13762 - DNA, 545 bp, Homo sapiens
  SIMILAR (1)..(462): 861254mologous to Homo sapiens putative p150,accession number U93574,Smith-Waterman Score=703.
atgggcaaggacttcatgactaaaacaccaagagcaatggcaacaaaagccaaaatagataaatggaatctaattaaactaaagagcttctgcacagcaaaagaaactaccgtcagcatgaacaggcaacctacagaatgggagaaaatttttgcaatctacccatctgacaaagggctaatatccagaatctacaaagaactcaaacaaatttacaagaaaaaaaacaaccccatcaaaaagtggacaaaggatatgaacagacacttctcaaaagaagacatctatgcagccaacatacacatgaaaaaatgctcatcatcactggtcatcagagaaatgcaaatcaaaaccacaatgatatgccatctcattgtggcagttagaatggcaatcattaagtcaggaaacaacagatgctggagaggatgcggagaaataggaacacttttacactgttgggacatggatgaagctggaaaccatcattctgagcaaactatcgcaaggacagaaaaccgaacactgcatgttcttactcatag

SEQ ID NO: 13763 - DNA, 404 bp, Homo sapiens
  SIMILAR (261)..(163): 671254mologous to Homo sapiens PRO0117,accession number AF090895,Smith-Waterman Score=101.
tctctctttgctctcagggacatggatgaagctggaaaccatcattctcagcaaactatcgcaaggacaaaaaaacagacaccgcatgttctcactcacaggtatgatggcatattcctgtggtaccagctacttaggagactgaggtgagagatacagcttgagccagggaggttgagcctgcagtgagccgtgaatatgccacttcactccagcctgggcaacagagccagatcccatctccaagggaaaaaaaaaaccactcctagatgattactctagaatagaatctatgtcctcaaggagccatgaaagggaactcaaaggatttcaggattggcaggtgtgcaggttttggcttaataaaacaaatctcagggcttgaccctgtacacattaaaaaa

SEQ ID NO: 13764 - DNA, 432 bp, Homo sapiens
  SIMILAR (151)..(432): 1001254mologous to Homo sapiens V alpha gene segment,accession number X58737,Smith-Waterman Score=490.
atggatgaagctggaaaccataattctcagcaaactatcgcaaagacaaaaagccaaacactgcatgttctcactcataggtgggaattgaacaatgagaacacatggacacaggaaggggaacatcacacaccggagactgttgtgggggggaatggcaaaaaccaagtggagcagagtcctcagtccctgatcatcctggagggaaagaactgcactcttcaatgcaattatacagtgagccccttcagcaacttaaggtggtataagcaagatactgggagaggtcctgtttccctgacaatcatgactttcagtgagaacacaaagtcgaacggaagatatacagcaactctggatgcagacacaaagcaaagctctctgcacatcacagcctcccagctcagcgattcagcctcctacatctgtgtg

SEQ ID NO: 13765 - DNA, 370 bp, Homo sapiens; identical to SEQ ID NO: 12850
  SIMILAR (106)..(369): 901254mologous to Homo sapiens contactin-like; similar to U87224 (PID:g1857710),accession number AC004891,Smith-Waterman Score=453.

SEQ ID NO: 13766 - DNA, 214 bp, Homo sapiens; identical to SEQ ID NO: 12065
  SIMILAR (1)..(552): 1001254mologous to Cloning vector pZC320 SopA,accession number U26464,Smith-Waterman Score=971.

SEQ ID NO: 13767 - DNA, 420 bp, Homo sapiens; identical to SEQ ID NO: 12069
  SIMILAR (268)..(381): 861254mologous to Homo sapiens PRO1546,accession number AF116638,Smith-Waterman Score=183.
  misc_feature (1)...(420): n = a,t,c or g

SEQ ID NO: 13768 - DNA, 525 bp, Homo sapiens; identical to SEQ ID NO: 11704
  SIMILAR (111)..(1): 761254mologous to Homo sapiens Human secreted protein, SEQ ID NO: 7217,accession number G03136,Smith-Waterman Score=140.

SEQ ID NO: 13769 - DNA, 289 bp, Homo sapiens
  SIMILAR (1)..(138): 801254mologous to Homo sapiens reverse transcriptase,accession number L27428,Smith-Waterman Score=190.
atggaatactatgcagccgtaaaaaatgatgagttcatgtcctttgcagagacatggatgaagctggaaaccatcattctcagcaaactatcacaaggacagaaaaccaaacactgcatgttctcactcaaagatggaagacgttgccagcaggatcaaaaaaccctggattcatgtggcagatgcagggctggacccagtctaaatactacactgaaaccaaagagagtgaaaactgtatctgggaacaggataaaaagcaaccagaccaataaactgcagaagaaag

SEQ ID NO: 13770 - DNA, 997 bp, Homo sapiens
  SIMILAR (400)..(891): 991254mologous to Escherichia coli Paraquat-inducible protein A,accession number D90826,Smith-Waterman Score=863.
atggaatactatgcagccataaaaaaggatgagtttctctcctttctagggacatggatgaaactggaaaccatcattctcagcaaactatcgcaaggacaaaaaaccaaacactgcgactctagaggactccccgcgaccgagcgaaatcatctggtgaccgaagagggcgaatgctggtttgattcgccgatcatcgctgaatatattgaattaatgaatgtcgctccggcgatgttgccgcgcgatccgctggagtcgttgcgggtgcgcaaaattgaggcactggcggatggcattatggatgccgggctggtatcggtgcgtgaacagaagaggtttcagttaacaagtgctaaaaggacaaaatcaactttttatgggggcaaaaatccatggggcattcgtattgacgccaacgttatgcaaggcatctggcaaatgaccaaacagggcgatgcgataacggggtcgatggtctttttctgcgttattggtgccccgctcattctggtgacctccatagcttatttatggtttggtaaccgactgggaatgaatttacgtccggtactgctgatgcttgagcgacttaaagagtgggtaatgctcgatatctacctggtcggcattggcgttgcttctataaaggtacaggattatgcccatatccaggctggtgtcggcttgttctcttttgtggcgttggtgattttaacgacggtgacgttgtcacatcttaatgtcgaagaactgtgggagcgattttatccgcagcgccccgctacgcgtagggacgagaaacttcgtgtctgtcttgggtgccattttaccggctatccagatcagcgtggtcgctgcccgcgttgccatatcccgtacagactgcggacctgcacgcctgaaaggttggcggccagtggcagaaagacagagggcaaacctcagacagtatacagagaggaagagagagagacacagagagagagagagtcac

SEQ ID NO: 13771 - DNA, 192 bp, Homo sapiens
  SIMILAR (1)..(111): 861254mologous to Homo sapiens PRO1546,accession number AF116638,Smith-Waterman Score=166.
atggaatactatgcagccatcaaaaatgatgagttcatgtcctttgtagggacatggatgaaactggaaaacatcattctcagcaaactgttgcaaggacaaaaaaccgaacaccgcatgttctcactcataggcctttgtgaaatccggggcgacaaggtgggctcttctgtgcacgaaactttccctaag

SEQ ID NO: 13772 - DNA, 314 bp, Homo sapiens
  SIMILAR (2)..(97): 751254mologous to Homo sapiens Human secreted protein, SEQ ID NO: 6720,accession number G02639,Smith-Waterman Score=111.
atggatgaagctggaaaccatcattctcagcaaactatcgcaaggacagaaaaccaaacaccgcatgttcttactcatagttcagggtcacaggtggccagagcccctcgcagccgggacccctgtggacaggaggacatcccatcgcagagcacactcacacacacattcacactcgcttacactgggaccactcacacacacattcacactcgctcacactgggaccacacagatctgccagttcattccacttgcacagctctgagatgtgggaggaaacagcagtacccggcaaaagccaacacagacag

SEQ ID NO: 13773 - DNA, 210 bp, Homo sapiens
  SIMILAR (100)..(210): 1001254mologous to synthetic construct lac repressor,accession number A14595,Smith-Waterman Score=178.
atggatgaagctggaaaccaccattctcagcaaactattgcaaggacagaaaaccaaacactgcatgttctcactcatagggattttgccgatttcggaaccaccatcaaacaggattttcgcctgctggggcaaaccagcgtggaccgcttgctgcaactctctcagggccaggcggtgaagggcaatcagctgttgcccgtctcactg

SEQ ID NO: 13774 - DNA, 269 bp, Homo sapiens
  SIMILAR (1)..(135): 911254mologous to Homo sapiens PRO1546,accession number AF116638,Smith-Waterman Score=211.
atggaatcctacgcagccataaaaaatgatgagttcatgtcctttgtagggacatggatgaagctggaaaccctcattctcagcaaactatcgcaaggacaaaaaaaccaaacactgcatgttctcactcacagacgtgatcgcacgtcgtcgttcgtggacctcgatatagctgatgagtgttggtacatcgatatggagacgccgtgcaagtgcctcatcgtatcgagatctgtcgggatagacatgcgctcgtgtagtcgatgtac

SEQ ID NO: 13775 - DNA, 663 bp, Homo sapiens
  SIMILAR (302)..(436): 841254mologous to Homo sapiens putative p150,accession number U93572,Smith-Waterman Score=187.
atgggtcttaaatattgtgctctatatagattccaggtcaaaaagaataaaacatctggaattgtactagttttattgtctggtgaattaaaaaaggaggaggaggagaggacaaataagaaaaatgaaagaggaggaggggaacagaaggacatggatgaagctggaaaccatcattctcagcaaactatagcaaagacaaaaaaccaaacaccgcatgttcttactcataggtgggaattgaacaatgagtacacttggacacaggaaggggaacatcacacactggggcctgtcatgagccaagatcatactgaatgggcaaaagttggaagcattccctttgaaaactggcacaagacaaggatgctctctctcaccaatcctattcgacagagtattagaagccctggccagagaaatcaggcaagaaaagagataaaggacattcaaatagtaaaagaggaaatcaaactatccctgtttgcagatgatatgattctgtctctagaaaatctcacagtctctgctaaaaagctccttctgcttataaacaacttcagcaaagattcaagatacaacaccaatgtacaaaaatcaacaggaagactgagagccaaatcaggaatgcagtcccattcacaattgccacaaaaagcataa

SEQ ID NO: 13776 - DNA, 537 bp, Homo sapiens
  SIMILAR (259)..(372): 841254mologous to Homo sapiens PRO1546,accession number AF116638,Smith-Waterman Score=187.
atgctgctgttggagagccaggttcgcaaaagtgagcacatgcatagctgtggcagagctagggtctggagaatgtgtatggatgtaactgccttggttctgggtcagtggtgggcacaggattgcgaggggttagtggctctaataccagggttctttcttactggagcgaaccacgggatgtctctcaatctggggattccaagggacacggatgaagctggaaaccatcgttctcagcaaactatcgcaaggacaaaaaaccaaacactgcatgttctcactcataggtgggaattgggcaatgagaacacttggacacaggaaagggatcatcacacaccagggccttttgtggggtggggggaggggggagagatagcattaggagaaatatctaatgcaagccctaaagcagagcttagtccacaagggttcttggctttgcacaggagagagtgtaacgccaagccagaggtaaaagaaaacagcttttctgaagcagcagtgttacagctccagtggtgttacagctct

SEQ ID NO: 13777 - DNA, 1215 bp, Homo sapiens
  SIMILAR (172)..(273): 821254mologous to Homo sapiens PRO1546,accession number AF116638,Smith-Waterman Score=153.
atccttgcaagctccctaacaagcacacactcagaaaaagaagggggaatacaatggagcagaagaatcagaggactaccaatttccttacgattgcctccaattgctggagaccttagggacatggatgaagctggaaaccatcattctgagaaaactatcgcaaggacagaaaaccaaacactgcacgttctcactcataggtgggaactgaacaatgagaacactcggacacagggtggggaacatcacacaccagggcctgtcatgggtgctgccaaacttaataagagtgacatcatggataaggcaagtaacaagattagcacgtcaaaacgtaggaataactatgcttctggaaagaatgacaaaaggaaaaaatctaaaattctaatgtcggatcacaataaaagtgcagagcaaaagacaagaatagaagaggtgaagagacaacccctagcgccaacgctcggtactatccgtcttatttctggatcaaatcaacggtgtgaccgctgcggtggaggaactgggcgcactttaagtgaccgcagtgtctgctctagggcgtgcagacagcccccaggggagtgtgcaacagcggccagggcaagcggcgagggagcccgcggcctattctcccgagaactgccgctatccagcccgctgtcccaaaagcaccgaagcttggtggcgtcgacgaaaattacccagaaacagcgcttttgcatggggacttgggctccggacgcgagagggctgcatctgtgtttccataaacctgtcgagatcgctcgaggtcacctgcgactgaaagcagacaataaagcgcgcagctgtggcggcggccactacggctgggaaaccccggggcctgaacactgcggctttgccgaattatttgagggctcttcagatccaggaattccaggtgaagctgacaagcaccttggtattccaggactgggaggatggggaaggcatctctttgccaatgcgaggctccttcttccccatcgcccccctagtcaactccccaccccctataaaatcaaagaagctcagggcagaaaatttcttattggaaaaagcaatatccaaatgctttcggcactcaaatgccctttcgaaaatattgtcgacgacggttattacccggacaatgctgtcaatttctgtagtctgcagaaaatctttcctcagatagaaaaatag

SEQ ID NO: 13778 - DNA, 641 bp, Homo sapiens
  SIMILAR (290)..(3658): 811254mologous to Mus musculus JNK-binding protein JNKBP1,accession number AB029482,Smith-Waterman Score=4609.
atgctaaatgaaaagtttaaattttattccaaatgtagtaggaaattactaagtgaaggtgaccatcagatttgcatttttgaacgatcactcttactgctgcaggaaaaaaggattgaagaaaggccagcaaggaaagttgttggggttatcacaggaaacaggcaagtgacagtggtggggcttggtctagagttggggcagtggaaatggaaatgtgtggaagatcaaagactacagtcaaaatttggtgatagattcgatatagcagatgagatggggaattgtcaaatgactccttccagactgttagcaactagggacatggatgaagctggaaaccatcattctcagcaaactatcgcaaggacaaaaaaccaaacaccacatgtcctcattcataggcgggaattgaacaatgaggacacttggacacaggaaggggaacatcacacactggggcctgttgtggggaaagaaaaggcagaaggagaaaacaggattcagacaccagctgatttacagatttgtgataagaagatgtcgggaatcttccctctggtggtttctgttttctcaaaaaagcatgaggcaagtcatcagcttaaagcctgtgcagttagtgcatgtgagaagaacag

SEQ ID NO: 13779 - DNA, 804 bp, Homo sapiens; identical to SEQ ID NO: 6323
  SIMILAR (1)..(414): 771254mologous to Homo sapiens putative p150,accession number U93564,Smith-Waterman Score=569.

SEQ ID NO: 13780 - DNA, 1401 bp, Homo sapiens
  SIMILAR (484)..(801): 771254mologous to Homo sapiens beta V spectrin,accession number AF233523,Smith-Waterman Score=390.
atgggcaaggacttcatgtctaaaacaccaaaagcaatggcaacaaaagccaaaattggcaaatgggatctaattaaactaaagagcttctgcacagcaaaagaaactaccatcagagtggacagggacatggatgaagctggaaaccatcattctcagcaaactgttgcagggacaaaaaaccaaacaccgcatgttctcactcataggtgggaattgaacaatgagagcacatggacacaggaaggggaacatcacacaccggggcctgttggtcattatcgttattgtgatgctctttctatgctgggggaatatgactgggccctgcaagcaaacataaaagctcaaaaactctgtaaaaatgaccctgagggaatcaaggatctaattcagcagcatgtaaagttacaaaaacaaatagaagacctacaaggtcgaacagcaaataaggatccaattaaagccttttatgaaaacagggcctacacacctaggagtttatcagcacctatatttactacttcacttaactttgtggagaaggaaagagatttcagaaaaattaatcacgaaatggccaacggtggtaatcagaatctaaaggtggcggatgaggcgttgaaggtagatgattgtgactgtcatcctgaattttcaccaccatcaagtcagcctccaaaacataaaggaaaacaaaaatctcgaaacaatgaatcagaaaagttcagttctagttcaccattgactttaccagcagatttgaagaacatcttggagaaacagttttctaaatcttccagagctgcacaccaggattttgctaatataatgaaaatgctgagaagcttaattcaagatggctatatggccttattggagcagcgttgccgcagcgctgcacaggcctttacagagttgctgaacggtttagatcctcaaaaaataaaggaattatctgaagccgaaaaccagtttaagaggattattgaacactaccccagtgagggccttgattgcttggcctactgtggaattggaaaagtatatttgaaaaaaaacagatttctagaagctctcaatcactttgagaaagcaagaaccttgatttatcgtcttcctggagtgttaacttggcccacgagtaatgtgattattgaagagtctcagccacaaaaaataaagatgctgttagagaaatttgttgaagaatgcaagttccctccagtgccagatgccatttgttgctatcagaagtgccatggatattctaagatccagatatacataactgatccagactttaaggattttctacaaggaatatgtcttacccctgactgtgaaggtgtcatttctaagattatcatcttcagcagtggtggtgaagttaaatgtgaa

SEQ ID NO: 13781 - DNA, 1827 bp, Homo sapiens
  SIMILAR (1108)..(1185): 881254mologous to Homo sapiens PRO1546,accession number AF116638,Smith-Waterman Score=136.
atgaggaaacgcattctaggggacaatagcatggaggtcaaagcgctcaagatgtgcacagacaatagcaggctgcatggccagattgtacacggtgtgcaggagaggaacaagatgaaagctggaacctgtttctgttccatcaatgtcttcaaaatcccacgaataaaggatgaatttttgttgtctttgagtcgcaaaggtggaagagaccttcaaacatatgtacatggttcactctctattcttccacctccccaacaagggcagcccagtctctccctggatgtcttccatgaagtatggtcatccaagtttcaggaagagtcagaaactggaacgctaagtgacaagactggagaggagagagccctcctggatgctccctctagtagtggtaaacatcatagtcagactcatcctaatgatatgggggcagaggaaagcaatcaaatattgaaccattgcttattccagaccagggctactgcagtttgctgggggggttcacttcaggccctgttcatctggtttgctcccgtgcctgaagatgtcactcaaggaggctcctgtatagggtgtctgacaatccctgttggagggtctcaaccagttgggtggcacagggaacaagacccatttaacgaagcactttgttccttggtggagggggggcctcaggcccagggagatctgggatctgtccctgagcctctggctggagtttttggagttcctgcagggaagccccacccagtgaggaaggatgagtcagggtcaggtacaatctcctattctattctggccactgtggttagtggagagaatgtgttaaaagcctccctaaagaaggaagaattagatcacactgatggatgtgttgctgtgattgaaggtcagtcctggaaagagcatggtaatatggaaaaatcaagcttcctcactctgagtggcaaatgtttagggagtggatcagagagctgtctgcagcagcagaatatggtgatcacacttattcctttttcactctgtcgtcgttcatctaccatgggcagggacatggatgaagctggaaaccatcattctcagcaaactatcacaaggacagaaaaccagacaccgcatgttctcactcataggtgggaattgaacaatgagaacacttggacacagggcagggaacattttctcagttttggaggcttggcatctaagatcaagatgccagcaagtgaatgcatatgtcatttctctgactctggggtttccaaactgcaagctacagaatccataaaagagtcttattcattcaacaagcatataatgagtacctgctatgtggcagacactgttctagtactcagtgataaaaacaaacaattcttaccttgccctagaatggaaaagagatctgcttttcagttaatattcactgactgcctgctggtgccaatcattgtactaggtgctggagatacatccatggatcagctctacgtggcctctggtctgctggtgtttgcaggactgatttctgctgtctgccttgtggccatagccagagctgctgattctgcgctggatacagccaaggccctggactgtgactcctattacagccctgcagctctttttggagtgggaaggggtcattttcctggggttagaactctctttagttttctcaacacaggattactgaactctgaagaggaagaggaagattcatcaggtcctcaagccaggaggctttctggtgagctgctctggctgtgcacggaccctaaatcagcaaacagattacctcttatccctttctcaatgtag

SEQ ID NO: 13782 - DNA, 1233 bp, Homo sapiens
  SIMILAR (1)..(1632): 891254mologous to Homo sapiens homolog of Drosophila headcase,accession number AB033492,Smith-Waterman Score=2553.
atggtgttaagaggaaagtttatagcactaaatgcctacattaaaaagttggaaacatctcaaattaacaacctaacattacacctggaggaactagaagaacactggcaaactaaccctgaagctagcagaataaaaccaataaccaaaatcagagctgaattgcatgcaattgagaggacatacactcacgcctatgctgcctttttgaaaagtacaaggtccttaaagacattcacactgttggacctagtacagctacaagttggaaattatcataggaaaacaaccagagatatacagggatccttgctaccgccctgcagtttgatctcagactgctgtgctagcaatcagcgaggctccgtgggcgtaggaccttccgagtcaggtgtcggatacaatctcttggtgtaccgtttgttaagcccattggaaaagtgcagtattagggtgggagtgacccggttttccagggacatggatgaagctggaaaccgtcagtctcagcaaactatcgcaaggacaaaaaaccaaacaccacatgttctcactcataggtgggaactgaacaatgagaacacatggacacaggaaggggaacatcatactctaggaggagcgactcaagccttcgcgaaagaaaataaccaaaaagcatacaaagaaacgtacggcgtctctcatattacacgccatgatatgctgcagatccctaaacagcagcaaaacgaaaaataccaagtgcctcaattcgatcaatcaacgattaaaaatattgagtctgcaaaaggacttgatgtgtgggacagctggccgctgcaaaacgctgacggaacagtagctgaatacaacggctatcacgttgtgtttgctcttgcgggaagcccgaaagacgctgatgacacatcaatctacatgttttatcaaaaggtcggcgacaactcaatcgacagctggaaaaacgcgggccgtgtctttaaagacagcgataagttcgacgccaacgatccgatcctgaaagatcagacgcaagaatggtccggttctgcaacctttacatctgacggaaaaatccgtttattctacactgactattccggtaaacattacggcaaacaaagcctgacaacagcgcagtcttcaccacggggcgtcaaggaccgcgctggcgaaaaacggtacttcagcccgtgggaagatctgtttgttttgaagaaattaagaaaatag

SEQ ID NO: 13783 - DNA, 744 bp, Homo sapiens
  SIMILAR (7)..(1062): 981254mologous to Homo sapiens homolog of Drosophila headcase,accession number AB033492,Smith-Waterman Score=1924.
cgtcgacaaattgaggagtcatcaaagtatggaggacattggaagagaaggagcaagatgacatgacttcaagagtgggtgcaggtgggctgcttcccatcatgggacatggatgaagctggaaaccatcattctcagcaaactatcacaaggacagaaaaccaaacaccgcatgttctcactcgcaggtgtagaaacaggcataaagagatgaagtacttgccagggtcacacagctggtctatcatggagcaggacacaggaagaactgccctgtttaaagcagaggagagggcaggggtctgcagtcctgccactgatccttcccacagcacagattctgagaataaaaaagagagaaagaacaagagagagagagagaggaggaggaggaggaggaagagaagagaagagaagagaagagaagagaagagaagagaagagaagaggagagaagaggagagagagaaagacagaagaaagagaaagaaagaaaagagagaaagaaaggagagacagaaaggagagagaaaagagaaagaaagagagagagagaaagagagagaaaaagaaaggaaggaaggaaagagagagagacagaaagaaagagaaaaagagagagagagaaagagaaagaaagagaaagaaagaaagaaagaaagaaagaaagaaagaaagaaagaaagaaagaaagaaacagaacagacagacccgggagccagaaacaaaagcagaaatcggtga

SEQ ID NO: 13784 - DNA, 627 bp, Homo sapiens
  SIMILAR (396)..(506): 911254mologous to Homo sapiens PRO1546,accession number AF116638,Smith-Waterman Score=192.
ttttgttgtaaaactgtaaaataagcaaggccaaatatttattgtttggcaacacatagagatatatagagttttacatgtaaaattacctataaatgtcaacagcacattgacatggtaaatacgaagttcaaaatgggatatccctggcatggaatagagagctgggatggcggagggccacacgggaagctgcaatagaatttttgatgtttgcttcattctctaggtgatgtgttcactggtgttcatcttatcatgtttttaaattgacaagcatgttacatatacaccacagaatactatgcagccataaaaaatgatgagttcatgtcctttgtagggacatggatgaagctggaaaccatcattctcagcaaactgtcacaaggacaaaaaaccaaacaccgcatgttctcactcataggtgggagttgaacaatgagaacacatggacacaggaaggggaacatcacacaccgggacctgttgtggggtgtgaggaaccttcaccaccccattttgtggtacaaccatcatttactgatcaaaacagaaaactgatcgtggtcattgtttcttctctctccctgaaacgctatttcccatacaacccaaaaagtctcg

SEQ ID NO: 13785 - DNA, 497 bp, Homo sapiens
  SIMILAR (274)..(1053): 451254mologous to Mus musculus mSin3A,accession number U22394,Smith-Waterman Score=630.
gcgtcgacggcgggggtgtcttactatgttgctcaggctggtctcaagttactgggcctaagcctctcaaagtgccgggactacaggtgtgagccaccatgcccagagtagatgagtttatacaaagttatggcaatggcaaggaaagctatgagtctgtaacatctacttctttttggatgagttcatgtactttgcagggacatggatgaagctggaaaccatcattctcagcaaactatcacaaggacagaaaaccaaacaccgcatgttctcactcgtaggtggaaattgaacaatgagatcacttggacacagggttggggaacatcacacactgggcctgtcatgggatgggggaaggcattctgttgctcctgagataggaatctggcaggacttgttttaccagaaaccaatcgctaagaccccactggtgaaacaggatgaggtgaagaagccagtcaaaacctgccaaaacaaagatggccacaaaa

SEQ ID NO: 13786 - DNA, 1334 bp, Homo sapiens
  SIMILAR (146)..(1264): 1001254mologous to Homo sapiens hydroxyindole-O- methyltransferase,accession number M83779,Smith-Waterman Score= 1939.
tcaggaactggagcagcaaagagaagaacaaaagcgcagagagaaggaagcggaggagaggcagcgagcggaggaaagcaggctctgtgctccttgaagcaagcgctccagaggctccggaagccacggctggattggagacaagatgggatcctcagaggaccaggcctatcgcctccttaatgactacgccaacggcttcatggtgtcccaggttctcttcgccgcctgcgagctgggcgtgtttgaccttctcgccgaggccccagggcccctggacgtggcggcagtggctgcaggtgtgagggccagcgcccatgggacagagctcctgctggacatctgtgtgtccctgaagctgctgaaagtggagacgaggggaggaaaagctttctatcgaaacacagagctgtccagcgactacctgaccacggtcagcccgacgtcacaatgcagcatgctgaagtacatgggcaggaccagctaccggtgctggggccacctggcagacgccgtgagagaaggaaggaaccagtacctggagacgtttggcgttcccgctgaagagctttttacggccatctacaggtccgagggcgagcggctacagttcatgcaagctctgcaggaggtctggagcgtcaacgggagaagcgtgctgaccgcctttgacctgtcagtgttcccacttatgtgtgaccttggtgggacacggataaagctggaaaccatcattctcagcaaactatcgcaaggacagaaaaccaaacaccgcgtgttctcactcataggtggggctggagctctggctaaggaatgcatgtctctgtaccctggatgtaagatcaccgtttttgacatcccagaagtggtgtggacggcaaagcagcacttctcattccaggaggaagaacagattgacttccaggaaggggatttcttcaaagaccctcttccggaagctgatctgtacatcctggccagggtcctccatgactgggcagacggaaagtgctcacacctgctggagaggatctaccacacttgcaagccaggtggtggcattctggtaattgaaagcctcctggatgaagacaggcgaggtcctctgctcacgcagctctactctctgaacatgcttgtgcagacggaagggcaggagaggacccccacccactaccacatgctcctctcttctgctggcttcagagacttccagtttaagaaaacaggagccatttatgatgccattttagccaggaaataactgtttcttgtgacctggaactaacgtcaaagcacacaagacataataataaagacatgtacctcca

SEQ ID NO: 13787 - DNA, 720 bp, Homo sapiens
  SIMILAR (413)..(312): 741254mologous to Homo sapiens Human secreted protein, SEQ ID NO: 7217,accession number G03136,Smith-Waterman Score=124.
atggagcagctctcaccgatggccagctcctaccactctgaccacgctgctgtctccctggccatcttctttgactacaaaggaataaaactaggtatcaagctggcggctgttcccagtgccttgcccacccctgccgggccgtcggactcggcggggcccctgtggcatccctgtccagtccctgtcaccacccagtttttccctctggacccaggaattcaaagtaagcaaggaggtccgctgctccagttggctgcaaataattacaaccttaagcccaagcagcactttgggtcctggtttgggaccatgaagcggctcgggacatggatgaagctggaaaccatcattcttagcaaactatcacaaggacaaaaaaccaaacaccgcatgttctcactcataggcagtacagatcagcagcggctcgtagtgaagaacgttcaaggaagagtttgtcccggatcaacaggacatggggcttgggaagcctggactgccatgaggaaggtcgattcaccactacagacagggagcctgaggcctgggtggtgccgacaagtcggcagtcacgccaggtcaggaagcgccgaagccgcgggaaaccctggactccatcccgggatttgtccccgtgtcgaagatggtatccaggtcgccgaaaacttcccggaagtttagaccaagacctacttattatctacggtgtccgggaag

SEQ ID NO: 13788 - DNA, 262 bp, Homo sapiens
  SIMILAR (1)..(111): 811254mologous to Homo sapiens PRO1546,accession number AF116638,Smith-Waterman Score=156.
atggaatactatgcagccataaaaaaggatgagttcgtgttctttgcagggacatggatgaagctggaaaccatcattctcagcaaattatcacaaggacaaaagaccaaacaccgcatgttctcactcatagaggcgcccgacgtcccgacagctcctggagtgagaccaggactgagaacagggagaggcgacccgacccccagggcccggtgctcaggacaggtgaggggaaggaaagggtgctgacgggagtggggag

SEQ ID NO: 13789 - DNA, 618 bp, Homo sapiens; identical to SEQ ID NO: 12860
  SIMILAR (520)..(383): 451254mologous to Arabidopsis thaliana F24O1.6,accession number AC003113,Smith-Waterman Score=90.

SEQ ID NO: 13790 - DNA, 2059 bp, Homo sapiens
  SIMILAR (1543)..(2058): 981254mologous to Homo sapiens CD1c antigen precursor,accession number M28827,Smith-Waterman Score=922.
atggatgaagctggaaactatcattctaagcaaactatcacaaggacagaaaaccaaacacagcatgttctcactcatagtgaggaaactgtggctcaggaagatgatgtgcctttgacaaggtcatggttgctgaaagcactcaagccccaagaggttcagagcagagccaagtcccctgatggccagtacaaagaggaggagaaagagaaggacagcagagggtgctctctgctggatttccccagcatgccagcttcccactgtgcagataaagcaaaatctgataggagcggggaggaagtgggctcaggctccaggagtacaagttggtatgcaagcaagtcattccaaacgccgcctccacacaaaccctctgagctgcaaattattaacctgcttaactctattgcagaaacaagcgctgctggggtgttggaagttctggccagggcaattaggcaggagaaggaaataaagggtattcaattaggaaaagaggaattcaaattgtccctgtttgcagatgacatgattgtatatctagaaaaccccattgtctcagcccaaaatctccttaagctgataagcaacttcagcaaagtctcaggatacaaaatcaatgtacaaaaatcacaagcattcttatacaccaataacagacaaacagagagccaaatcatgagtgaactcccattcacaattgcttcaaagagaataaaatacctaggaatccaacttacaagggatctgaaggacctcttcaaggagaactacaaaccactgctcaatgaaataaaagaggatacaaacaaatggaagaacattccatgctcatgggtaggaagaatcaatatcgtgaaaatggccatactgcccaagaaagaagttcttcagatgcgaggtttcaacaaaaccactgtggttacacagttcatcctggtgggtttctccagcctgggggagctccagctgctgctttttgtcatctttcttctcctatacttgacaatcctggtggccaatgtgaccatcatggccgttattcgcttcagctggactctccacactcccatgtatggctttctattcatcctttcattttctgagtcctgctacacttttgtcatcatccctcagctgctggtccacctgctctcagacaccaagaccatctccttcatggcctgtgccacccagctgttctttttccttggctttgcttgcaccaactgcctcctcattgctgtgatgggatatgatcgctatgtagcaatttgtcaccctctgagggacatggatgaagctggaaaccatcattctcaggaaactattgcaaggacagaaaaccaaacactgcatgttctcactcataggtgggaattgaacattgagaacacatggacacaggaaggggaacatcacacactggggcctgttgtgggttcatgcttccctttgccagctgtctgctgttctcagggttgcttggaacagcttcataactgctggtgcccatggcaagaagatgatattgattccaagatcttctcatttgtcaaccaatcctgggcacgaggggagggctcaggatggctggacgagttgcagactcatggctgggacagtgaatcaggcacaataattatcctgcataactggtccaagggcaacttcagcaatgaagagttgtcagacctagagttgttatttcgtttctacctctttggattaactcgggagattcaagaccatgcaagtcaagattactcgaaatatccctttgaagtacaggtgaaagcgggctgtgagctgcattctggaaagagcccagaaggcttctttcaggtagctttcaacggattagatttactgagtttccagaatacaacatgggtgccatctccaggctgtggaagtttggcccaaagtgtctgtcatctactcaatcatcagtatgaaggcgtcacagaaacagtgtataatctcataagaagcacttgcccccgatttctcttgggtctcctggatgcagggaagatgtatgtacacaggcaag

SEQ ID NO: 13791 - DNA, 381 bp, Homo sapiens
  SIMILAR (1)..(216): 691254mologous to Homo sapiens Human secreted protein, SEQ ID NO: 7348,accession number G03267,Smith-Waterman Score=249.
atggataaattcttcgacacatacaccctcccaaaactaaaccaggaagaagttgaatctctgaatagaccaataacaggctctgaagttgaggcaataattaatagcttaccaaccgaaaaaagtccaggaccagatggattcacagccgaattccaccggacatggatgaagctggaaaccatcattctcagcaaactatcacaaggagaaaaaaccaaacaccgcatgttctcactcatagcttcccactgctacggtgtggctacggtttgttcatccccaccaaatctcatgttgaaatttgatccccagtgtggtggtattgacaggttgggcctagtggaaggtttctgggtcatggaggtggacacctcatga

SEQ ID NO: 13792 - DNA, 2039 bp, Homo sapiens
  SIMILAR (205)..(444): 861254mologous to Homo sapiens dJ120N9.1 (KIAA0656 protein (similar to clathrin assembly lymphoid myeloid leukemia protein (CALM))),accession number AL109915,Smith-Waterman Score=351.
atggccttcctagaaacttctgcacccctgtatgaacacatatggacacttcaggttgctttctccactgttggtctgggagagaccctgaaagttgccatgatcagcatgtccacatcatctgggtattttcttcagctattacaatactgctgctcctcaaccatcaccatcactggatacaagggcttcctaagagacctgaaggtggagacaagggccgatggtgtaatgaggacaatggctcccgaaaagctgctaaagagtatgccaatactacagggacaaattgatgcactgcttgaatttgatgtgcatccaaatgaactaacaaatggtgtcataaatgcagcatttatgcttcttttcaaagatcttatcaaactttttgcttgctacaatgatggtgttattaacttactcgggacatggatgaagctggaaaccatcattctcagcaaactattgcaacgacagaaaaccaaacactgcatgttctcactcataggtgggaatcgaacaatgagaacacttggacacaggaaggggaacatcacacaccagggcctgtcgtggggaggccagatgccacaccaaaggacatccaagcagcacaagaagttcatgtggacaggaacagagagctggttgcaggcaaaaggcctaaactatcaacagctgtagatccttcagccccaatcaaggcttcaggctgcttttccccactgtgcactccacatggcttcatgctgctgcagactccacccttcccagtggctccccaggcagcactcacaaactgctctcgccagctctcccgcggaggggcctactctgggggacaggaaatattgagagaccttggccttgatattccagaggttattcttttctgcttgacctcgagttacagagatgcagatgaagtcaaagaggataccagatgcagccagtctgctggggaggcacgtacgtctgagtgggcccagcacagctgttctccagggcaaggcttggccatggcagctgccccagcgcccgcattcagcccaacccaccaggtcaccccagtccagtccgtggtgctcagatccccaagcaatcacaggctttcggggaaagatgactctgagggaaaagagaggcagcaggatgaggagcccagcaaagagattggcagcattcgcccctgctctagagatctgtggaactctgaatttgagagagatgatttagggtatctggcagaagaaatttctaagtggcaaagtgttttgaacaaagcagagcataaacaaatcagagaaaactgctttgacaaagcaaagcataaaagtttggaaaatctgcagcctgacaatgagatagaaaagaaaaccccattttctggggagaaattcaagctggctgcagaaatttgcataagtcatgaggaattgaatgttcaccacctagacaatggggaaattgtctccaaggcatgtcagagacctttagggcagcctctgccatcacaggcctggaggcctaggagggaaaaatggtttcctgggctgaatccagtgcccctcagctatgtgcagcctcaggacttggtgccctgcatcccagctgctccagccgttaccaatgtacagctcagaccattgtttcagagggtacaagccccaagccttggcagcttccacgtggtgttgggcctccgtgtgcacagaagtcaagaattgaggtttgggaacctccatctagatttcagaggatgtatagaaacacttggaagtccaagcagaagttcacttcagggatggagccctcatggagaacctctgctaagagcccccactggggcactgcctactggagctatgagaagacggccacagtcctccagactccagaacggtagatccactgacagcttataccatgtgcctggaaaattctcagacactcaacaccagcccgtgaaaacagccacgaggggtgctataccctgcaaagccacagggacacagctgaccaagactatgggaacctag

SEQ ID NO: 13793 - DNA, 1974 bp, Homo sapiens
  SIMILAR (1033)..(1785): 751254mologous to Homo sapiens putative p150,accession number U93572,Smith-Waterman Score=1015.
atggataaattcctcgacacatacaccttcccaagactaaaccaggaagaagctgaatctctgaatagaccaataacagactctgaaattgaggcaataattaataggttaccaaccaaaaaaagtccagggaacagacagattcacagccgaattctaccagaggtacaaggaggagctgatcttcagagggaaggcactgagagtggagagaggaaagacccagaagctggaggtatgagggggaaggctgggaatcctatacaggactatagcacacccagacttgttcctggccctcagtggctctgggggaacagggacatggatgaagctggaaaccgtcattctcagcaaactattgcaaggacaaaaaaccgaacactgcatgttctcactcataggtgggaactgaacaatgagaacacttggacacaggaaggggaacatcacacaatggggcctgtcataggacctatgggaactctgctagactccactggtctgaacactgacacttggaagccttataactgcatctgtccagcttcagacagagtgcctgatcagatattgcctgaggacacttgcagacaggaatataattttggcaatactgaaaatggtgtcatgatgcaaccaagagaggctactgaagctgaggacactgacgcccacagcactcaagtgactgttccaggtcaaatagctgagaataaaatacctaggaatccaacttacaagggatgtgaaggacctcttcaagaaaaactacaaaccactactcaaagaaataaaagaggacaaaaactaatggaagaacattccatgctcatggataggaagaatcaacatcatgaaaatggtcgtactgcccaagggacatggatgaagctggaaaccgtcattctcagcaaactatcacaaggacagaaaaccaaacaccgcatgttctcactcataggtgggaattgaacaatgagaacacttggacacaggaaggggaacatcacacaccagggcctgtcatgggaattagaaaaagctattttgaaattcatatggatccaaaaaagagcccaaatagccaatataatcctatgcaaaatgagcaaaactggaggaatcatgctacccaacttcaaactatgccacagggctacagtaaccaaaacagcatggtagtggtacaagaacagacacatagaccagtggaacagaacagagtacccaggattaagcccacacacatacaaccatctgatcatctaaaaacctgacaaaaacaagaaatggggaatggattccctatttaataaatggtgctgggaaaactggctagccatatgtagaaagctgaaactggatcccttccttacaccttatgcaaaaatcaattcaagatggattaaagacttacatgttagacctaaaaccataaaaaccctagaagaaaacctaggtaataccattcaggacataggcatgggcaaagacttcatgacgaaaacacctaaagcagtggcaacaaaagccaaaactgacaaatggcatctaattaaactaaagagcttctgcacagcaaaagaaactaccatcagagtgaactggcaacctacagaatgggagaaaatttttgcaatctacccatctgacaaagggctaataaccagaatctacaaagaactcaaacaaattcacaagaaaaaatcaaacaaccccatcaaaacggacatggatgaagctggaaaccataattctcagcaaactatcgcaaggacaaaaatccaaacaccgcatgttctcactcataagtggaaattgaacaatgagaacacatggacacaggaaggggaacatcacacactggggcctgttgtggggtgttggtatctatggctgacagacctgaagacaaatcacatcacaggactctttgtggacactcccaaggacctgcctggagcccagtag

SEQ ID NO: 13794 - DNA, 1383 bp, Homo sapiens
  SIMILAR (314)..(397): 821254mologous to Homo sapiens Peptide sequence derived from a human secreted protein,accession number Y40039,Smith-Waterman Score=119.
tgttggattgatccttttatcattatataatgttccttttgtctaataattttctttgctctggagtctactgtatttgatattaatagtgtcactctgttttgattaatgtttgtacagtttatctttttatatactttatcaacctacgttgttcattatgttatgagtttcctaagaaaacatttttaggatgggtggagcaagatggtggaatagagaacaccaccgatcatacccactccccccgcaggaagactaagattggcaactatccacacaaaagcagcagtttcacaggaactaaaagtcagggacatggatgaaactggaaaccatcattctcagcaaactatcgcaaagccaaaaaaccaaacactgcatgttctcactcataggcacctaagagagaaaatcttcatcctacccttgggtcaaccacttagtcacgaatctctcatagtggtgtggaatccccggtcaaactggacagctgtgcaagcttttggcttagtgaagtcccacttcttccctaaagatacagtgtcctactcaaggacctgcccccctgaattgtttcttgccgctgtccctgtgctcacaggcatggactatgagatctatgaggtcagggactggggctcccctggatggtctggcctcagagctgctcaacaggagtccatgggcttttccctgaacacctgtgatttaagtacaacaagacctgctaacggttcttcctgggtcaaggggaccgagagatggtatgaagttcccagaagagccagagagagaaagcagaaccgcctaattctgatcctgactgtgcactctccacctggaaaaacgataatcaggtggaaatgcagaggagccacctggagcttgcactgcccccgacagtacaacgaatgtgctgcagacagggcaggtggaaggcgaggagaaaggtttcaggatccagtggcctcatgggtgatgagatggggtcccactgtgttgcccagactgagtgatgttattgtgacacagcttcagactcagtccccaactgtgcactgtgggagccacagcagtggaaatgtacgtgcacgtgcagcagcccaagggtggaagctgcagaggctggagggaggtgatgttgccaagcaaatgcagcagaaccagcctgactgcctgaaactgtgcctcaaaatagggaaaaacagggagaaacctgtaagcaggagcactagatgctacagccctgctgctcaaagtgtggtccatgaactagcagcatcaccaccacctgcagaagctcaggtcccactccctgctgaatcagaatctacagctcatgaagaaccccaggtggtttacaagcatactgaagtttga

SEQ ID NO: 13795 - DNA, 1438 bp, Homo sapiens
  SIMILAR (3)..(617): 901254mologous to Homo sapiens putative p150,accession number U93567,Smith-Waterman Score=1012.
tatttaataaatggtgctgggaaaactggctagccaaatgtagaaagctgaaactggatcccttccttacaccttatacaaaaattaattcaagatggattaaagacttaaatgttagacctaaaaccataaacaccctagaagaaaacctaggcaataccattcaggacataggcatgggcaaggacttcatggctgaaacaccaaaggcaatgggaacaaaagtcaaaattgacagatgggatctaattaaactaaagagcttctgcacagcaaaagaaactaccatcagagtgaacaggcagcctacaaaatgggagaaaatttttgcaatctacttatctaacaaagggctaatacccagaatctacaatgaactcaaacagatttacaagaaaaaatcaaacaaccccatcaaaaagtgggcgaaggatatgaacagacacatctcaaaagaagacatttatgcagccaacagacacatgaaaaaatgctcatcatcactggccatcagagaaatgcaaatcaaaaccacaatgagataccatctcacaccagttagaatggtgatcattaaaaagtcaggaaacaacaggtgctggagaggatgtggagaaaacaggaacacttttacactgttggtgggactgtaaactagttcaaccattgtggaagtcagtgtggtgattcctcagggatctagaactagaaataccatttgacccagccacccccattactgggtatatacccaaaggattataaatcatgctgctataaagacacatgcacacgtatgtttattgcggccacctattcacacaatagcaaagacttggaacccaaccccaaaatgtcccatccaatggatagactggaaatgaagaacatgtggccccttatacacccatggaatacctatgcagcccataaaaaaatgatgagttcgtgttcgtgtcctttgtagggaccatggatgaagctggaaacccatcattctcagcaaactatcgcaaggacaaaaaaaccaaacaccgcatgcttctcactcataggtgggaattgaacaatgagaacacttggacacaggaaaggggaacatcacacaccggggggcctgttggggggacatggatgaagccggaaaccatcattctcagcaaaatatcacaaggacagaaaaccaaacaccacatgttctcactcataagcgggagttgaacaatgagaacacatggacacagggaggggaacataacataccagggcctgttggcagctctgtgtgggccccagccaatttcacaccagtacccctctcatctcccacccaacactcccatgttgacatcactgcagactccactaatgcccacgctctggaatgcacaatccagaggagcaagggggtgaatcttagaccaagcacatcccggga

SEQ ID NO: 13796 - DNA, 468 bp, Homo sapiens
  SIMILAR (340)..(465): 831254mologous to Rattus norvegicus cytosolic peroxisome proliferator-induced acyl-coA thioesterase,accession number Y09332,Smith-Waterman Score=174.
atgggctgcagggagaaatttggtccccgcaactctgctgtgaggtggacattggcccattttacaaaagaggagtcgatatgtgccccatttggggcagcggcagatggaaagggggcagggccctgctacacagatgtggtccgcgggccacagcgttgtgtcacctgggatcctgttagaactcccatgtttcattatcaagtgcattttccaccgaagtccagtagcaaacaggccctgggcttggaggtcacctgctgtgaaaggtgtgtctcctctatggagctctgccacctgtggctcctgcggcccctcaaagcatcttggctgaacatacccagcccagtcaataggcccatcagcgagcccgagaccgaggacgagaagaagcgctttgaggaaggcaaagggcggtacctgcagatgaaggcgaagcgacagggccacgcggagcctcagccctag

SEQ ID NO: 13797 - DNA, 1534 bp, Homo sapiens
  SIMILAR (150)..(1280): 791254mologous to Homo sapiens acyl-CoA thioester hydrolase,accession number U91316,Smith-Waterman Score=1463.
tttttttttccagccaagcagcagctttattagtggtgctgggttcttcccataccctacagcgtgctcggaagcattccgcgccgggcctgccagacacctgcgcccttctgcagccgcccgccgcatccgccgccgcagcccccagcatgtcgggcccagacgtcgagacgccgtccgccatccagatctgccggatcatgcggccagatgatgccaacgtggccggcaatgtccacggggggaccatcctgaagatgatcgaggaggcaggcgccatcatcagcacccggcattgcaacagccagaacggggagcgctgtgtggcagccctggctcgtgtcgagcgcaccgacttcctgtctcccatgtgcatcggtgaggtggcgcatgtcagcgcggagatcacctacacctccaagcactctgtggaggtgcaggtcaacgtgatgtccgaaaacatcctcacaggtgccaaaaagctgaccaataaggccaccctgtggtatgtgcccctgtcgctgaagaatgtggacaaggtcctcgaggtgcctcctgttgtgtattcccggcaggagcaggaggaggagggccggaagcggtatgaagcccagaagctggagcgcatggagaccaagtggaggaacggggacatcgtccagccagtcctcaacccagagccgaacactgtcagctacagccagtccagcttgatccacctggtggggccttcagactgcaccctgcacggctttgtgcacggaggtgtgaccatgaagctcatggatgaggtcgccgggatcgtggctgcacgccactgcaagaccaacatcgtcacagcttccgtggacgccattaattttcatgacaagatcagaaaaggctgcgtcatcaccatctcgggacgcatgaccttcacggagcaattaattccatgagattcaaggtgttgttggacccagcccctgttgtggacagctttcagaagcgctaccggggccgccagtgcctttcttcaacctaggtgtcgctgagccaggaaaggcaggttcgctgcctgtgccccagctggtgccccgagaccgaggacgagaagaagcgcttttgaggaaggcaaagggcggtacctgcagatgaaaggcgaagcgaccagggccacgcggagcctcagccctagactcccctcctcctgccactggtgcctcgagtagccaatggcaacgggcccagtgtccagtcacttagaagttccccccttgggccaaaaacccaattcacattgagagctggtgttgtctgaagttttcgtatcacagtgttaacctgtactctttcctgcaaacctacacaccaaagctttatttattatcattccagtatcaatggttacacagtgtttgtcccgagcgccgggaggcgtttgggggcaggaaacccttcgggaatggttttccgagcacggtgttagggtatggggaagaacccagcaccactaataaagctgctgcttggctggaaaaaaaaaaaaaaaaaa

SEQ ID NO: 13798 - DNA, 421 bp, Homo sapiens
  SIMILAR (258)..(401): 371254mologous to Homo sapiens Fragment of human secreted protein encoded by gene 55,accession number Y36686,Smith-Waterman Score=76.
gtttaaccaggtagagataaacgaaagctttcagcagctgaactatcacacaaatcacaattaaggtggcatatgtgtttggaagacgtaaaatcaattcccgtgaagataatgttttagtctctatttgaacttgaaaacagaagtaaattttcagtagcaacagctggtcttgttccatccaggaggctctctattaactgtataagaagggcctttattacctcttctaatggttttcctctatggttttgtcttcatcaaaaaggcccagttgattgttgtgttgctgtttactgatgtggcacagaggacggcagctgggcgcccacccaccccggtgttgggccctccctcccctgagtgctgtttattgtttatggagggagaacaatggatcctgggaacaactggtcaggct

SEQ ID NO: 13799 - DNA, 465 bp, Homo sapiens
  SIMILAR (1)..(87): 961254mologous to Homo sapiens Human secreted protein sequence encoded by gene 2 SEQ ID NO:250,accession number Y91577,Smith-Waterman Score=155.
atggcgggcgcccctcccccagcctcgctgccgccttgcagtttgatctcagactgctgtgctagcaatcagcgagattccgtgggcgtaggaccctccgagccaggtgtgggatatagtctcatggtgcgccgttttttaagccggtctgaaaagcgcaatattcgggtgggagtgacccgattttccagcactgttcagaataaccaagatttggaagtgaaactggcctcgttgtctggggtgtcatcacccgaagttcttagtctcacagcccaagatatcaaggatgaggacactccaagggtgaggtctggaggcgggaagtccaagatcaaggctctggaaggtttggtgtctggtgaggggccagtctctgcttctaagatggcaccatttttgctgcgtcctccagagaagatgaatgttgtccacattgtggaagagatggaagggcaaaagtga

SEQ ID NO: 13800 - DNA, 926 bp, Homo sapiens
  SIMILAR (294)..(911): 811254mologous to Cloning vector pZC320 SopB,accession number U26464,Smith-Waterman Score=790.
  misc_feature (1)...(926): n = a,t,c or g
tgccttgcagtttgagctcagactgctgtgctagcaatcagcgagattccgtgggcataggaccctccgagccacgtgtgggatataatatcctggtgatccgttttttaagcccgtcggaaaagcgcagcccccgccgtgggagtgacccgattttccagtgcttgggaaccctcacaactggcagggattttgccgatttcggaaccaccatcaaacaggattttcgcctgctggggcaaaccagcgtggaccgcttgctgcaactctctcagggccaggcggtgaagggcaatcagctgttgcccgtctcactggtgaaaagaaaaaccaccctggcgcccaatacgcaaaccgcctctccccgcgcgttggccgattcattaatgcagctggcacgacaggtttcccgactggaaagcgggcatgattatcgtgtcctggtgggcgagctggatgatgagcagatggctgcattatccagattgggtaccgattatcgcccaacaagtgcttatgaacgtggtcagcgttatgcaagccgattgcagaatgaatntgctggaaatatttctgcgctggctgatgcggaaaatatttcacgtaagattattacccgctgtatcaacaccgccaaattgcctaaatcagttgttgctcttttttctcaccccggtgaactatctgcccggtcaggtgatgcacttcaaaaagcctttacagataaagaggaattacttaagcagcaggcatctaaccttcatgagcagaaaaaagctggggtgatatttgaagctgaagaagttatcactcttttaacttctgtgcttaaaacgtcatctgcatcaagaactagtttaagctcacgacatcagtttgctcctggagcgacagtattgtataagggcgataaccatggtgcttaa

SEQ ID NO: 13801 - DNA, 1335 bp, Homo sapiens; identical to SEQ ID NO: 12108
  SIMILAR (1)..(261): 771254mologous to Homo sapiens pot. ORF VI,accession number X03145,Smith-Waterman Score=351.

SEQ ID NO: 13802 - DNA, 756 bp, Homo sapiens
  SIMILAR (277)..(588): 791254mologous to Homo sapiens gamma-glutamylcysteine synthetase,accession number M90656,Smith-Waterman Score=388.
atggtgggctcccctcccccagcctcgctgctgccttgcagtttgatctcagactgctgtgctagcaatcagggagactccgtgggcgtaggaccctctgagccaggccttttacgcgtgctgttccctctgcccactttaccaccctgccccacttttgtacccctttatccagttcatctgtccctcccatcttgccttcaaattacttcctcttgtgtccgcaattggtgggttcttggtctccctgacttcaagaatgaagccgcggaccctcaaggtggcaatgcagtggtggatggttgtggcaaggcccagaacagcacggagctcgctgcagaggagtacaccctcatgagcatagacaccatcatcaatgggaaggaaggtgtgtttcctggactgatcccaattctgaactcttaccttgaaaacatggaagtggatgtggacaccagatgtagtattctgaactacctaaagctaattaagaagagagcatctgtggtctctcttatggagaaaatttttacccgatcaacttattctcgtgaagcacaagggcctgatatgaacaccccttctgtaggcattttcaaagaacttagtgaggtgccagcagctagaagtccaaaatcaaggtgtcagcagggccatgctccctctgaaggctctatggaaaaattatttcttgcttcttctagtttctggtggttgctggcaatccttggcgttcctggatttgcagcagtgtaa

SEQ ID NO: 13803 - DNA, 519 bp, Homo sapiens
  SIMILAR (295)..(516): 1001254mologous to synthetic construct lac repressor,accession number A14595,Smith-Waterman Score=354.
atggtgggcgcccctcccccagcctcgctgccgccttgcagtttgatctcagactgctgtgctagcaatcagccagactccgttggcgtaggaccctccgagccagggccagccgtgaagggcaatcagttgttgccggtctcactggtgaaagaaaaaccaccctggcgcccaatacgcaaacggcctctccccgcgcgtggccgattcattaatgcagctggcacgacaggtttcccgactggaaagcgggcagtgagcgcaacgcaattaatggattttgccgatttcggaaccaccatcaaacaggattttcgcctgctggggcaaaccagcgtggaccgcttgctgcaactctctcagggccaggcggtgaagggcaatcagctgttgcccgtctcactggtgaaaagaaaaaccaccctggcgcccaatacgcaaaccgcctctccccgcgcgttggccgattcattaatgcagctggcacgacaggtttcccgactggaaagcgggcagtga

SEQ ID NO: 13804 - DNA, 475 bp, Homo sapiens
  SIMILAR (282)..(365): 571254mologous to Homo sapiens Secreted protein encoded by gene 81 clone HNFJH45,accession number W88614,Smith-Waterman Score= 75.
cccacatgcaggcagtttctgcagcactggagggattgctctaagcttgtactttatgatttaagattaaatctactttaatactcaagagtcattctgtcctcctaggcctctgaagtctgtgatgggaggggctgccacaaaggtctctgaaatgccttcaaggccttttccccattttcttggccattagcacttggctcctttttacttatgcaaatttctgcagcctgcttgaattccttccctgaaaatgggctcttcttttctaccacatagctggctgcaaattctccaaacttttacgctctgcttcccctgtaaatataagttccaacttaacataatttctttgctcacaaatatgaccataggttgttgaaagcagccagggcgcatcttgaatgctttgctgcttagaaattttttctgccagataccctaaaatcatcactctcaagttcaaacttccaca

SEQ ID NO: 13805 - DNA, 1095 bp, Homo sapiens
  SIMILAR (1)..(351): 981254mologous to Homo sapiens p40,accession number U93564,Smith-Waterman Score=586.
atggaagatgaaatgaatgaaatgaagcgagaagggaagtttagagaaaaaagaataaaaagaaatgagcaaagcctccaagaaatatgggactatgtgaaaagaccaaatctacgtctgactggtgtacctgaaagtgatgcggagaatggaaccaagttggaaaacactctgcaggatattatccaggagaacttccccaatctagcaaggcaggccaacgttcagattcaggaaatacagagaacgccacaaagatactcctcgagaagagcaactccaagacacataattgtcagattcaccaaagttgaaatgaaggaaaaaatgttaagggcagccagagagaaagaggtctttgttccagagggaggaaccctgccacgaggaaacacaacaatgattccattaaactggaagttaagattgccacctggactctttgggctcctcctagctttaaggcaacaggctaagaatggagttacagtattggctggggtggttgacccggactatcaagatgaaatcagtctactactacacaacagagaaatcctcaatgttagtacattacagcaaagctatagttctggggaaaagcaggtatcttttttgatctcagactgctgtgctagcaatcagcgagattccgtgggcgtaggaccctccgagccaggtgtgggatatagtctcatggtgcaccgttttttaagtctgtctgaaaagcgcagtattcgggtgggagtgacccgattttccaggtgcgtccgtcacccctttcttcgactcagaaagggaactcctgaccccttgcgcttcccaaaaattcagaagctgctcaaactccagtgcagtcatggagcctccattacctgggaggcagcctccaagcagcatgcagccttgtcagaaactgcaccgccaagggtgagaatggcattagaagcaaagaggaaagattcaaacaggaacgagaatttggacaagcgaacactctgtgctgctcaagggaagagcacagtggaagtccaagggcgagtgtgtgcccagggcagggcaactgggctatgggctgattcccgggatgcatga

SEQ ID NO: 13806 - DNA, 744 bp, Homo sapiens
  SIMILAR (1)..(87): 821254mologous to Homo sapiens Human secreted protein sequence encoded by gene 2 SEQ ID NO:250,accession number Y91577,Smith-Waterman Score=127.
atggtgggcgccccttccccagcctcgctgctgccttgcagtttgagctcagactgctgtgctagcaatcagcgagattccgtgggcataggaccctccgagccacgtgtgggatataatatcctggtgatccgttttttaagcccgtcggaaaagcgcagtatttgggtgggagtgacccgattttccagcatacgttttgcttcttcactggtggatgcagcctttcttcagcctcttgaagcaaccatgggtaataagcgcaactgtaaatcaaaaccagttaatcttagaagccaaagaatgaccacaaacaaacttaagaactttactaggctcaagcagtattatcttgatgataaagacaacagttatcaactattatttaacaagtcattaaatgtgtgctactacctgtctcagtctgagatgaaaggagacgtctgtaccactgtgcaggaagagtggattctctgtggctctaatccctgtgtacttctggaactacctggtgcagcacaggctaactggggaaaagaatgtgcagccaggaatgtgttgtgggccagggagcttgagatgggtgtatggggacttggcttcaagagccatcttgggcaactcactctggctctgagtcctcatttgaaaatcattgggttgcactctgttatctgtggtctccaacctgggaaacctgggaaccacaggttaaaacaacaacaacaacgacaacaacaatga

SEQ ID NO: 13807 - DNA, 2883 bp, Homo sapiens
  SIMILAR (1567)..(2424): 951254mologous to Homo sapiens putative p150,accession number U93569,Smith-Waterman Score=1407.
atggcatggcagctggctgctctcagaatgacttgtcgggagagagagggtaagacacagggtaagcgtggcctttatgacttggctggggagccacgagctattgtgtggctgtatgctatggtcatgcagaccagcactgatgcaacacggcccgagcaggctcctctccatcagctgaagtccttcatctctcccatccttcctgctacgtgttccagggatggctcagctacatacctgaggcctggcaagttcactgatggctcctgcagaagcacaaactgcatgtctcccggtgacttggactgcactgacaccagttggattttacccagcagaccagatgcaggtgggagattccccatccgcacccctccctgtgtgcttgtggttcataagccaagccgacactgcagggagtggactgccaatactgtgttacctaagggcgctttggcaaagtggcttcttgagcccaaagcagacctacagggctggcatctgccagcagatgggcagtatacaaaaccttcaattagttacaacatcaaactttacatcaactgttataaccggactgtgactacggcagctcagcaccaacaggttcagaggaagcatggagcctccatcttcttggcagaaaatgtcgctgtgagggagaaagacaaagaggaacgcaaggtgactagggctccaacagagcaggcctggactgcaggatcgtggatagaaacagcctatagagaaataaagggagtagggcaagaaagtgtttgcataaccgtaatgcaccttgaagagttagtgtatgaactagcctggatcattatgtctgctgtggtagaggcttttgatccagtagcaccatccagcaaatgccggcttaacccagacccagacccttactgctgcacaccttacacactacacactagcccacctcctccaccttcctgctgcacaccctacaccctgcacactggcccacctccacagacacctttctgctgcacaccctataccctggacaccagcccatctccacagacacattcctgctgcacaccctacaccctacacactgtccccaccttccaccttcctgctgcccaccctatacacttgcacaccatcccacctccacagacacaaggccagggctttgtaagtgaggatgagtacctggagatctctgacatcaagcgagaccagtccggggagtacgaatgcagcgcgttgaacgatgtcgctgcgcccgatgtgcggaaagtaaaaatcactgtaaactatcctccctatatctcaaaagccaagaacactggtgtttcagtcggtcagaagggcatcctgagctgtgaagcctctgcagtccccatggctgaattccagtggttcaaggaagaaaccaggttagccactggtctggatggaatgaggattgaaaacaaaggccgcatgtccactctgactttcttcaatgtttcagaaaaggattatgggaactatacttgtgtggccacgaacaagcttgggaacaccaatgccagcatcacattgtatgttgaccacatagttggaagtaaagctctcctcagcaaatgtaaaagaacagaaattataacaaactatctctcagaccacagtgcaatcaaactagaactcaggattaagaatctcactcaaaaccactcaactacatggaaactgaacaacccgctcctgaatgactactgggtacataacgaaatgaaggcagaaataaagatgttctttgaaaccaacaagaacaaagacacaacataccagaatctctgggacgcattcaaagcagtgtgtagagggaaatttatagcactaaatgcccacaagagaaagcaggaaagatccaaaattgacaccctaacatcacaattaaaagaactagaaaagcaagagcaaacacattcaaaagctaacagaaggcaagaaataactaaaatcagagcagaactgaaggaaatagagacacaaaaaacccttcaaaaaattaatgaatccaggagctggttttttgaaaggatcaacaaaattgatagactgctagcaagactaataaagaaaaaaagagagaagaatcaaatagacgcaataaaaaatgataaaggggatatcaccacctatcccacagaaatacaaactaccatcagagaatactacaaacacctctatgcaaataaactagaaaatctagaagaaatggataaattccttgacacatacactctcccaagactaaaccaggaagaagttgaatctcagaatagaccaataacaggatctgaaattgtggcaataatcaatagcttaccaaccaaaaagagtccaggaccagatggattcacagccgaattctaccagagatacaaggaggaactggtaatttacagattcaatgccgtccccatcaagctaccaatgcctttcttcacagaattggaaaaaactactttaaagttcatatggaaccaaaaaagagcccgcatcgccaagtcagtcctaagccaaaagaacaaagctggaggcatcacattacctgacttcaaactatactacaaggctacagtaaccaaaacagcatggatcaagtccctgctgacctgggccatcatctgctataatctccaacatacccatgggccaacccacttttcttcatttatctgttcccacagtcattcaacaagcatttattgggagcaaattgctgatgaggccctggactacagtaacgaaacaccagtggcacataggtcagaccatgctggtttgagcagaagcgacaagaacgagaaccctgttggaattttcgagggtggctccaggacagccagctggtga

SEQ ID NO: 13808 - DNA, 631 bp, Homo sapiens
  SIMILAR (14)..(262): 651254mologous to Homo sapiens pot. ORF VI,accession number X03145,Smith-Waterman Score=259.
gcaatggcgggctcccctcccccagcctcgctgctgccttgcatttttgatctcagactgctgtgctagcaatcagcgagactccgtgggcgtaggaccctccgagccaggtgtgggatatagtctcgtggtgcgccgttttttaagcccgtcggaaaagcgcagtattcgggtgggagtgacccgattttccaggtgccgtccgtcacccctttctttgactcagaaagggaactccctgacctcttgggcttcccaagtcctgactccagcacctgaaaagcaaccagacaacaaattgccactgcccagaagaggctccagggacccaacagaatactttcatgggcaggaggtacgggacaagtcagatgaacacgtggatcatgtgtctcagatccatagtttcagagatgaagttaaaagacttggagctgaagattccagcaatgcagaaacgccaacagaactccatgagttcaacactggaggtgtctatcggcccccaaactcaacatctgtaattcagcctctagatcagggtgtcataaggacctttaagccttgttacacaaagtactctttggaaaagattgtcagtgccgtggaagagaaccctgatagaacatga

SEQ ID NO: 13809 - DNA, 1455 bp, Homo sapiens
  SIMILAR (1)..(204): 661254mologous to Homo sapiens pot. ORF VI,accession number X03145,Smith-Waterman Score=236.
atggtgggcgccccttccccagcctcgctgctgccttgcagtttgagctcagactgctgtgctagcaatcagcgagattccgtgggcataggaccctccgagccacgtgtgggatataatatcctggtgatccgttttttaagcccgtcggaaaagcgcagtatttgggtgggagtgacccgattttccagcatacattttgcttcttcactggtggatgcagcctttcttcagcctcttgaagcaaccatgggtaataagcgcaactgtaaatcaaaaccagttaatcttagaagccaaagaatgaccacaaacaaacttaagaactttactaggctcaagcagtattatcttgatgataaagacaacagttatcaactattatttaacaagtcattaaatgtgtgctactacctgtctcagtctgagatgaaaggagacgtctgtaccactgtgcaggaagagtggattctctgtggctctaatccctgtgtacttctggaactacctggtgcagcacaggctaactggggaaaagaatgtgcagccaggaatgtgttgcccgagcaggctcctctccatcagctgaagtccttcatctctcccatccttcctgctacgtgttccagggatggctcagctacatacctgaggcctggcaagttcactgatggctcctgcagtgccaataatgatatgaataataaggtccaggctgaggtagtctcagatggagatgaggaacttgttgggaagtggagcaaaggtgactcttggtatgtttcagcaaagacactggtggcattttgtccttgtcctacagatttgtggaactttgaagttgagagagatgattttgggtatctggcagaagaaatttataagcagcaaagcattcaagagagtcattcttcaacctcggacatgtgggagctaagacccagcatagttgaagtttatgatttcaggtgctcttggaagaaagcaggaagaaaagagcctgcagagacagggaaggtcaaaattctggtgtcacacagagaactggatggcccatttgagcataagcgaaccaggtacaaatgcatagaggatgcctttatttcctaccttaagaaatttgaaactgctaaggaagagagtgagacaagaagtgaaaggcaccatgcaggcgaagaattctgccttgtgaagatgagttttgttgtagtgcacggggagtctgcaggtgaatcttctctctctgcagacccactcctgttcctgtacagcaacctcaggacaatagtgatacatgtgcagggagcagaggctgttcaaatagagactaaaacattatcttcacgggaattgattttacgtcttccaaacacatatgccaccttaattgtgatttgtgtgatagttcagctgctgaaagctttcgtttatctctacctggttaaacaactttaa

SEQ ID NO: 13810 - DNA, 914 bp, Homo sapiens
  SIMILAR (188)..(307): 641254mologous to Homo sapiens TML1,accession number AB018563,Smith-Waterman Score=134.
  misc_feature (1)...(914): n = a,t,c or g
atgcctctgctgtgtagaagggaagcatcagacaacaagcaagctaacaatcgacgagataaaatcagaagtacctttgaagccccaatatctctccatcctgataacatcctcatccctccactcaagaactgccactatgaatttggtgtgagagtgtctctagattgtatacccaagagtggaaatttacattctctaccccaagaggaggtatcaagcagcaaattccagtttctgggaaatagtggaccagatcgtctccatggagcagctggtcctaacatattggccggcaaggaataactgactcctctggcctcatgtctcttcgggccccctcagtgaggatctttgtgtacttgctattccgtttgcacacccagcgtggcctccttgcaggcaggaggcagtggggcccctgcccactcagcttctctcattttcttcacttatcagtcttggcctgttccactcagatctacactgaaggcagttggcctggatgggcttcactaggggccccgtctgtgcactgggcccgtttcccctgctggctgcaagccatgggttctttttctcctctctgcccctcatgctgaccttctagatgccactcccaaatccccttcactccatacccaccaggcttcatgcccacccaggcctctggcaccctcagtgcagcccatgattgggaactcaccatcagcagtcagtggctcggtttaagagagggccgcagagggaactgggtcctgatgtggacttggatgccctggggggatagntctgctgacactgtggcctgaaatanaaaaagtgctgagcaagcagtgtatgctggagcctcagtagaccatctgcacaatggggacgtggagaggatggttggattatgcctctgcatgtca

SEQ ID NO: 13811 - DNA, 921 bp, Homo sapiens
  SIMILAR (897)..(184): 911254mologous to Escherichia coli Cytochrome C-type protein TorC,accession number D90829,Smith-Waterman Score=1126.
caagtgtaggggctcttcagaagcagcagggatggcaccaaaggagatgcatctcgttgcatttcccttcattcctttgcgttttctcgctggcgaagagtcgtcgtgcagaccacaatcaagatcccagagcgtcgcgaatggcattttcactgacttccagcccgctggcacgcagtgccgccagcgctgttgcggcattcggttgcgggacaagcggcaacggcagattttccagcgtgccgtgagcatatcgtcaagtttttcagcgtattgccatagcggtttacggtccgctaatgcgggatcggtaagcgcaccctgtaaagacgcctgacgccattgattgccgtattcgtcagcctgccattccccgtttacagtgagcgccttgataccttcttcacttaatgtggctagcgccagccgttgacctgccgccaggtagagcgtgttttcactgccctgcatttgataaccctgcaacagaacgatcggctgtttgccactggcatcaacgacggtgagatcggttccaggattcacggtagccagctcgcctatgtgagaagttttgaaaggataaatatgtgcgccattagtaactgaagtagcggcctgactttccagctcatgcgccgcgttgtcatccatttttatttctggcggaaaatgggcaatgcctttatgacaatcgatacaggtttcgctgtccttttgtgctttgttatgcattttctgcgcagattcactttgcgaggcaatatccatggcatcaaaagaatggcaactacggcacgttgcagagtcagtggcttttaattctttccatactgtttcggccatttcctggcgatgagcttcgaacttatcgtcactgtctattttgccgctaagacctgcaggcatgcgagtatgcat

SEQ ID NO: 13812 - DNA, 324 bp, Homo sapiens
  SIMILAR (82)..(324): 1001254mologous to Escherichia coli K12 probable UDP-N-acetyl -D-mannosaminuronic acid transferase; synthesis of enterobacterial common antigen (ECA),accession number AE000455,Smith-Waterman Score =413.
cttctgcccgcccaaatagggactttgtgttttgtccccaattttggggaagtagacgtagcttctattgtgggacacaacgtttcccgcgttgccggtgccgatctctgggaagagctgatggcgcgcgcaggcaaagaagggacgccggtatttcttgtgggcggtaaacctgaagtgctggcgcaaactgaagctaaactgcgcaaccagtggaatgtgaatatcgttggcagtcaggatggttattttaaacccgagcagcgtcaggcgctgtttgaacgcattcatgccagcggtgcgcaaatcgtcaccgttgcgatg

SEQ ID NO: 13813 - DNA, 1828 bp, Homo sapiens
  SIMILAR (854)..(1651): 771254mologous to Escherichia coli formylglycineamide ribonucleotide synthetase (EC 6.3.5.3),accession number M19501,Smith-Waterman Score=969.
  misc_feature (1)...(1828): n = a,t,c or g
atggataaagaacgcatcattcaggaatttgtgcccggccngcaggtcncnctggcgcttctcttcgcgcatcccgagaaaaaggtcgcactgttacaacgtcggggcgttgagtggaactattccgtcaccgatcatgactgggcgtttagcgatgctcacggcacgctggaaaatctgccgttgccgcttgtcccgcaaccgaatgccgcaacagcgctggcggcactgcgtgccagcgggctggaagtcagtgaaaatgccattcgcgacgggattgccagcgcaattttgccgggacgtttccagattgtgagcgagtcgccacgcgttatttttgatgtcgcgcataatccacatgcggcggaatatctcaccgggcgtatgaaagcgctaccgaaaaacgggcgcgtgctggcggttatcggtatgctacatgataaagatattgccggaactctggcctggttgaaaagcgtggttgatgactggtattgtgcgccactggaagggccgcgcggtgccaccggcagaacaactgcttgagcatttgggtaacggcaaatcatttgatagcgttgcgcaggcatgggatgccgcaatggcggacgctaaagcggaagacaccgtgctgtggggcgtagaggccttccgtatcaacgccgccgtggcgaaagatgacacacaaatccacactcacatgtgttattgcgagttcaccgacatcatggattcgattgcggcgctggacgcagacgtcatcaccatcgaaacctcgcgttccgacatggagttgctggagtcgtttgaagagtttgattatccaaatgaaatcggtcctggcgtctatgacattcactcgccaaacgtaccgagcgtggaatggattgaagccttgctgaagaaagcggcaaaacgcattccggcagagcgcctgtgggtcaacccggactgtggcctgaaaacgcgcggctggccagaaacccgcgcggcactggcgaacatggtgcaggcggcgcagaacttgcgtcggggagcgcgcgccggttgcgctgctgatttcgccgcctctgcccgtctggcggtcggtgaagcgttaaccaacatcgccgcaacacaaattggcgatatcaaacgcatcaaactttccgccaactggatggcggcggcaggccaccctggtgaagatgcgggcctgtatgaagccgttaaagccgtgggcgaagagctttgtccggcgctgggcctgacgatcccggtgggtaaagactccatgtcgatgaaaacccgctggcaggaaggtaacgaagagcgcgaaatgacgtcgccgctgtcgctggtgatttctgcatttgcccgcgtggaagatgtacgtcacaccatcacgccgcagctttctaccgaagataacgcactgctgctgattgatttgggcaaaggcaataacgcgctgggcgcaacggcgctggcgcaggtttatcgtcagcttggcgacaaaccggcagatgtacgcgatgtcgcgcaactgaaaggcttctatgacgcgattcaggcgctggttgcacagcgtaagctgctggcgtatcacgaccgctctgatggcggcctgctggtaacgctggcggaaatggctgtgctgtcctccttaggacagggcggttattttggccatatgatcatcactccgggcagtatcccggtaaatccaaaaccggccaaagtacgccagacgtcgctgcacaggcccgtcagtcgtggataccgtaaaaagcgatcgcgaagccgctggctgaaatgggcgacatcgttaaaactaccgtgtttgtaa

SEQ ID NO: 13814 - DNA, 498 bp, Homo sapiens
  SIMILAR (1)..(201): 771254mologous to Escherichia coli K12 probable UDP-N-acetyl- D-mannosaminuronic acid transferase; synthesis of enterobacterial common antigen (ECA),accession number AE000455,Smith-Waterman Score =249.
tcagtacgtaaaaagtacccgcaggcgcaggtttcccgcgttgccggtgccgatctctgggaagagctgatggcgcgcgcaggcaaagaagggacgccggtatttcttgtgggcggtaaacctgaagtgctggcgcaaactgaagccgacccagtgggccagcaggccgtgcaggcgcagcccggtggcctggacccgcagttcggcggcattgatcggcgggggtgcattcatggcttctctcctgtatcccccggcgcgatccggtcgtagcggcgcgtcgcggcgcgccacgtcctcgctcaggtgcagcgccgtgggcggcggcaacccctgctcttcgacgatctcaccgctgaagttcagcgtaatcggggcagacgctattacaaagctgttgatgagcctggaatagcgctgttgcggcattcggttgcgggacaagcggcaacggcagattttccagcgtgccgtgagcatcgctaaacgcccagtcat

SEQ ID NO: 13815 - DNA, 3707 bp, Homo sapiens
  SIMILAR (990)..(1511): 951254mologous to Escherichia coli K12 putative reductase,accession number AE000288,Smith-Waterman Score=872.
gaatccaatggaaagaccaggacattgagaatctgtaccaaaacctggggattaagctaagcggcgtttatcaggataaaggcatccctgcgctggaagaatggctgacatcggcgctaaccacgccgtttgaactggaaacccgcttaatcctgcaggtcttggctcgccatcgccagacgatgcgccacttgtacagcgacctcaccgttacctgccatcagcatgtcggctttcgaatccaccagcacggaacggcgcacggtatcggaccaactagcctcaataccgccgaggatcaccggtacatctttccacgcctctttacaacgctgggtataaaccagtgtggcgcgatccgggcgcttacccgcgacgttatccggcgtgtaggcatcgtcatgaccagtaacaccgaaaaacagattcggtttacccagacgcataaagtcgtctttgctgctccagtccggctgggcgatgatcccgacgcgaaagccctgcgcttccagcatacgaccgcaaatcgccatcccgaagcttgggtgatcgacatacgcgtcgccagtaaccaaaatgatgtcgcagctatcccagccaagttgatccatctcttcacgagacatcggcaaaaacggtgccggtccaaaacaggcggcccagtactgcggccaggagaacagcgtctgactgttgaagtagaacgggaagtgcgcccaggaaggctgaccgaaataaacaagcagctccacttgtccgtcaacccaaacggtatctttccagcctctgtcttccgggaacggcatcgcgccattcacgttacggatctggaacattacgccttcaatatggaacgcttgcggctcgtccgcgcgtaccgtccagcgttcccacgttccttcgtgcgcggtgacatcaatacggttgacgtcccacagctgtccattaatacccgggtcatcacccagactcccttcatgcctgcaggtcatcaatttttaaaagaatcagatgttacggccgagtcggtattctttatgaagcgtcggcaggtgttaaaagcactgggcatcagtgcaactgcactttctttgcctcacgctgcgcatgccgatctgcttagctggtttaaagggaacgatcgcccgcccgcccccgccggaaaagcgctggagttcagcaagcctgccgcctggcaaaataacctgccactgacgccagcagataaagtttccggttataataacttctatgaattcgggctggataaagccgatcccgccgctaatgctggtagcctgaaaaccgatccatggacactgaaaatcagcggcgaagtggcaaaaccattgaccctcgatcatgatgacttaacccgtcgcttcccgctggaagagcgtatttatcgtatgcgctgcgtggaagcgtggtcgatggtggtgccgtggattggttttccgctgcacaaattgctggcgcttgcgaacctaacagcaatgcgaaatgccagggcagcaggaccgctttatcgggcgtgggctgaaatatccttatgtcgaaggattgcgtctcgacgaagcaatggatccgctcacactgatgaccgtagtgtttcctgcaggtctaaatatgtccatcgcgtgacattttcaaacggcaaattagagagcgtggaaaacctgaacgtaccggtaacgcaacccatggcagtgctgaaaggcgatctggcgtcgattaccgcacagctggaacagtggcgcgatgtatcgcaggagccacctgtctggctggatatcgaaatcactactgatgagtatctgcatgatattcagcgcaaaatccaggcattaaccgaatcattgcctgtcgaagtattgctggtacgtcggagtcgtgaacagcgcgagattgatttcacccgcgagccgttcgccagcaacgggctgtttgctattaccggcccaacaggtgcggggaaaaccaccctgctggacgccatttgtctggcgctgtatcacgaaactccgcgtctctctaacgtttcacaatcgcaaaatgatctcatgacccgcgataccgccgaatgtctggcggaggtggagtttgaagtgaaaggtgaagcgtaccgtgcattctggagccagaatcgggcgcgtaaccaacccgacggtaatttgcaggggcaatttgctgccttcctgaatgccaaacccaaagaacgcgcggaattgctcgaggagttaaccggcactgaaatctacgggcaaatctcggcgatggtttttgagcagcacaaatcggcccgcacagagctggagaagctgcaagcgcagccagcggcgtcacgctttcacgccggaacaagtgcaatcgctgacagcgagtttgcaggtgcaaactttgcttcgagcatgggcaatatcagtttcttctttccaaaagccaaacaagggagcgctcttgggattaatggcggattaggaaacttaggtgtaagtgtaatgcagctggttgcaccgctggtcatttttgtacctgtatttgcctttctcggcgtcaatggcgtaccgcaggccgacggttcggtgatgtcgctggcgaatgccgcatggatttgggtaccgctactggcgattgccacgatcgccgcatggtcagggatgaatgatatcgccagttcacgcgcctcaattgccgaccagctccctgtcttacaacgcctgcatctctggctgctgagcctgctttaccttgtcacttcgttcccggatgtgaatattctgcgcctggcgttctttggcccatttatcggtgccatcgcgcggtcggttggtggtgctatttccgataagttcggcggcgtgcgggtgacgttgatcaactttatttttatggcgattttcagtgccctgctgttccttaccttaccgggcacaggctccggtaatttcatcgccttttacgccgtatttatggggctgtttctgactgcgggtctgggaagtggttctactttccagatgatcgccgtcatctttcgccagataaccatttatcgggtaaagatgaaaggcgtttcccggtcatattcaatgacgcgatgcccggcaccctttgcagcaacccctgcacattatcggctgaaattacctgcgcttgctgatgctgtttctctatcaaacccgtcagggttcttacagcgttatcaccaagaaacagaccgctatgttcaacgatttgttttatctcgtcaccgggatattgcggccactcatcgaactctggtggagagactctgtggacgtaaagaagggaatgaacacagagaaactttcagccagattcctgattgtcacctgaacaagaaaagtcaaactggagtgaaaccatgcaaatgcagcgtgtgtgggaaagtcttcctccgtcattcattcctggacaggcacatgagagctcatgctggacacaaacgatctgagtgtggtggggaatggagagagacgccccgtaaacagaaacaacatgggaaagcctccatttcccccagtagtggtgcacggcgcacagtaacaccaactcgaaagagaccttatgaatgcaagtcgcccctatttccggcgcgggacccccaccccggtacctgcacacctcatgcgcccgcagtttcgagcctgcggctaagtggggagaaaaatggcatcaagtaa

SEQ ID NO: 13816 - DNA, 1467 bp, Homo sapiens
  SIMILAR (871)..(1464): 1001254mologous to Escherichia coli phoB protein (aa 1- 229),accession number X04026,Smith-Waterman Score=1038.
atgtctaagatttttgatttcgtaaaacctggcgtaatcactggtgatgacgtacagaaagttttccaggtagcaaaagaaaacaacttcgcactgccagcagtaaactgcgtcggtactgactccatcaacgccgtactggaaaccgctgctaaagttaaagcgccgcactatttttattacattcactcaaaacatattacgtcttgtttcatctttgttgatgatgttttatcatgcctgcaaagattaaataatcagcatttacccgccgtatcctggagttgttccgtgtcagatcagattatcgcccgcgtctcgcaatcccttgccaaagaacagtcactggaaagtctggtccgacagcttctggagatgctggaaatggtcactgatatggaatcaacctacctgaccaagtggatgtcgaagcgcgcctgcagcatattatgtttgcccgtaacagccagaaaatgtacatcccggagatttgccgtctcgtggtaccgagtacttcctgcgccagataattttgccgcgccacatcgatatcgcgttctgaaaacgggtttactttcgcctggctgccaccatgttgtcctggatgacgggagccgcagctggagcggcatcctgtgcgacccggtggaacgggccgccagctgccaccgcagcaagacaccacgcgcaccaccaaaagcacaacgagaccagcagcaccacacaacacatgacatccacaccaccagaacccacacagaccacgaccgcacccagcgaccaagccgagaccagatcgctcgacccacccacggcggcacccacccaccgccagctacgaaccccacaacaccacaccccacccacacagcggaagattatgacagtgctgtgaatcaactgaatgaaccctggccggatttaattctcctcgactggatgttacctggcggctccggtatccagttcatcaaacacctcaagcgcgagtcgatgacccgggatattccagtggtgatgttgaccgccagaggggaagaagaagatcgcgtgcgcggccttgaaaccggcgcggatgactatatcaccaagccgttttcgccgaaggagctggtggcgcgaatcaaagcggtaatgcgccgtatttcgccaatggcggtggaagaggtgattgagatgcagggattaagtctcgacccgacatctcaccgagtgatggcgggcgaagagccgctggagatggggccgacagaatttaaactgctgcacttttttatgacgcatcctgagcgcgtgtacagccgcgagcagctgttaaaccacgtctggggaactaacgtgtatgtggaagaccgcacggtcgatgtccacattcgtcgcctgcgtaaagcactggagcccggcgggcatgaccgcatggtgcagaccgtgcgcggtacaggatatcgtttttcaacccgcttttaa

SEQ ID NO: 13817 - DNA, 3125 bp, Homo sapiens
  SIMILAR (1013)..(675): 971254mologous to Escherichia coli ATP synthase gamma subunit (atp-7),accession number J01594,Smith-Waterman Score=571.
cttcaatcggggtgttcaaggttcttttacatccaagaccgcgaacgcagacgttcggaggaaccccattgcgaggtacggtacgataccgccgccgaagctgctgctgaacttccagccccagacggctcattaccattttgcacctcaagagcatcgtacacgcgcggtacggcatcctgagggaattcggacgtcaactacggcggccgattacctggacaatctttccaggtagccatctttaaatcctctacgaaataacctgtttaaaccgcggcggccccccgagacgatctcggtgagttcctgagtaatgctggcctgacgagctttgttgtataccaactgcagctctttaatcaggctgccgccattgtcggtcgcggctttcatcgccaccatacgggcggcctgctcgctggccaggttttcaaccacgccctgataaacctgagattcgacataacgacgcagcagggtatccagcaacgccttcggatcgggttcgtacaggtaatcccaggatttatgtttcagatcatcatcatctgatgccggtaacggcagcagctggctgatggtcggaacctgagacatgggggtaataaaattggtggttgcaaatgtaaagcttgtccagacggacttcgtcgtaggcctgcaacatcacttttacccgacccgatcagttcggacagggaagggttatcccccatgccggtgacctgggcaacaacattgccgcccacggagttgaagaacgacacgcctttcgagccgatcattgcgaggtcgcattgaacgcctttgtcggtccaggtcttcatttccgccagcagttttttgaacaggttaatgttcaaaccaccgcacaaaccacggtcggtcgacaccaccaggtagcccacgcgtttaacgtcgcggtcttccaggtaagggtgcttatattccagattaccgtgtgcaaggtgaccaatcactttgcgcatggtttctgcataagggtacgactcctggctcagacccttgtgtggtgaatctgaacgcaacaatcctcggccaggccatcgcgtttgtcctgttcgttctgttctgcatgaagtacgtatggccgccattaatggcagccatcgaaaaacgtcaaaaagaaattgctgacggccttgcttccgcagaacgagcacataaggaccttgaccttgcaaaggccagcgcgaccgaccagtaaaatcgtggcccaggcgcaggcggaaattgaagccgagcgtaaacgtgcccgtgaagagctgcgtaagcaagttgctatcctggctgttgctggcgccgagaagatcatcgaacgttccgtggatgaagctgctaacagcgacatcgtggataaacttgtcgctgaagccaaagcagcttttgactttgccgtcgaacaccaaagtgtagaacgctggcaggacatgctggcgtttgccgccgaggtaaccaaaaacgaacaaatggcagagcttctctctggcgcgcttgcgccagaaacgctcgccgagtcgtttatcgcagtttgtggtgagcaactggacgaaaacggtcagaacctgattcgggttatggctgaaaatggtcgtcttaacgcgctcccggatgttctgcagcagtttattcacctgcgtgccgtgagtgaggctaccgcttgagtagacgtcattttcgctgccgcactgagtgaacatgcagtgtcgacttgtatttttaaaaaggtttttttgggttgagggaaagcttcgagctcggtacccaagctctgtggaaagcaatttggcaagattcatcaaaattagtaacatacatgccagtgggtccagcaccgcggtattgcaccagtggtagacagctgtggactgctggccctcaggtgcggcgaccacaccaaattcaatcagcaggataagttcatcgttggccagctcacgggtccagtatgttttggggccgtccccttcaagaagagtttgcgtgcagcggatcttgttctcattctcccaagtggctaaactgatatcgaggacagaggccaggcactgaatgaaaacgaagctaaccccagtatgggttctaatggaaagcacagggtaaaagcgctcattaagaagcggaagaattcttgccagttcgtaccccagtgccttgagcagataggagaaattttcagctcgctgagcattattcaagtgccgacgaaattgggcatgggggcagaggctgttgcgtgagggaccgacagcgtaggtgcagcgggcacactctgagctcgcaaggcggagactggcgctatgcgcccagcgctgcgcgccttgaggcacctgcaaggaaggcgcgccacaggctgcaaagggagacacaggttcctccagcagcagtgggccatgggcaccgagcggggacacggggacgctgtagtggctctggggcctcaccctgcacttgcgtccgtccacggtctcctcctcaaagccttctccgaccttgaagttgatctcagtggtgcgcaccgtggtggatgtcttgatgtagaactgatccccgtcctggcggatctccacgtgcggcttggacgcagccgctacggccactttcctcagcatggcgttcacacctgccgccgccgccaccgccaccatgcccaacttcgccggcacctggaagatgcgcagcagcgagaatttcgacgagctgctcaaggcactgggtaagctggtgcagagggcgcgccccgacggggagatgcggcccggaggtgccactgttgatggcttggaagatgataccgatggcggtggcgggtcgtcaggagcagccactgccatcatgccagccactagttttttgagagtttttagcatgaagggctgttgaattttgtcaaaggccttttctgcatctattgagataatcatgtagtttttgtctttggttctgtttatatgctggattactttcattgatttgtgtatgttgaaccagccttgcatcccagggatgaagctaacttgattgtggtggataagctttttgatgtgctgctggattcggtttgccagtattttattgaggatttttgcatcgatgttcat

SEQ ID NO: 13818 - DNA, 1773 bp, Homo sapiens
  SIMILAR (1)..(393): 991254mologous to Shigella dysenteriae phosphate regulatory protein phoB,accession number M31793,Smith-Waterman Score=669.
atggcgagacgtattctggtcgtagaagatgaagctccaattcgcgaaatggtctgcttcgtgctcgaacaaaatggctttcagccggtcgaagcggaagattatgacagtgctgtgaatcaactgaatgaaccctggccggatttaattctcctcgactggatgttacctggcggctccggtatccagttcatcaaacacctcaagcgcgagtcgatgacccgggatattccagtggtgatgttgaccgccagaggggaagaagaagatcgcgtgcgcggccttgaaaccggcgcggatgactatatcaccaagccgttttcgccgaaggagctggtggcgcgaatcaaagcggtaatgcgccgtatttcgccaatggcggtggaagagttgccaaccaactaccgcttaaaacaagtgaaacagctggccttgaaatgccattctgtaacccagaaaatcaccgatctctccgggggtaatcagcagaaagtcttgatctccaaatggctgtgctgttgcccgcaagtaatcattttcgatgaacctacccgcggcatcaacgttggcgcaaaagccgaaatttacaaagtgatgcgccaactggcggacgacggaaaagtcatcctgatggtgtcatcggaactacctgaaattatcaccgtctgcgaccgcatcgccgtgttctgcgaaggacgactgacgcaaatcctgacgaatcgcgatgacatgagcgaagaggagattatggcatgggctttaccacaagaccatatggctaacgatagctggagcgggcaggataaagctcaacactttatcgcctcggcgatgctttccgccgccggaaatgaattgctgaagttgtggctcatcttctggcaaaatcgggcggaacaagcagcgttcaccgtttttcaattctacccattcttccagctgatgcggataagggcgcactgccagccgactctcgttatcgccttcaaacggcgagatatccaatcgtcctgcgacttacgaatgcaggagccacctgtctggctggatatcgaaatcactactgatgagtatctgcatgatattcagcgcaaaatccaggcattaaccgaatcattgcctgtcgaagtattgctggtacgtcggagtcgtgaacagcgcgagcgtgtgttagccagccaacagcgtgaaaccctcagcgaactcagcgtcgaagaggtgttcaatcgccgtctggcactggaagaactggatgaatcgcagcagcaacgtctgcagcatcttttcaccacgacgttgcataccctcgccggagaacacgaagcatgaaaattctcagcctgcgcctgaaaaacctgagctcattaaaaggcgaatggaagattgatttcacccgcgagccgttcgccagcaacgggctgtttgctattaccggcccaacaggtgcggggaaaaccaccctgctggacgccatttgtctggcgctgtatcacgaaactagggttctgatctaacgtttcacaatcgcaaaatgatctcatgacccgcgataccgccgaatgtctggcggaggtggagtttgaagtgaaagtaaatcagggcgtggttgaaaacctggccagcgagcaggccgcccgtatggtggcgatgaaagccgcgaccgacaatggcggcagcctgattaaagagctgcagttggtatacaacaaagctcgtcaggccagcattactcaggaactcaccgagatcgtctcgggggccgccgcggtttaa

SEQ ID NO: 13819 - DNA, 1155 bp, Homo sapiens
  SIMILAR (31)..(624): 991254mologous to Escherichia coli 6-phospho-beta- glucosidase,accession number U29579,Smith-Waterman Score=1043.
atgcctgatgcgctacgcttatcagttcatcactctgcccgcgtattccgcgaaaaaggggtaaccatcaacaaagcaccgggcgatgatgaaatcctgaaaaacaccgtcgattttgtctctttcagctattacgcctcgcgctgcgcctcggcggagatgaacgccaacaacagcagtgcggcgaacgtggtgaaatcgctgcgtaatccgtatctacaggtgagcgactggggctggggaattgatccactcggtctgcgtatcaccatgaatatgatgtacgatcgttatcagaagccgctgtttctggtggaaaacggcctgggcgcaaaagatgaatttgctgccaatggcgagattaacgacgactatcgcatcagctacttacgcgaacatatccgcgcaatgggcgaagcgattgcagacggcattccgctgatgggctacaccacatggggctgtattgatttagtttccgcctctacgggtgaaatgagcaaacgctacggctttgtctttgttgaccgtgacgacgcaggcaacggtacgctgacgcgcacgcgtaagaaatcattctggtggtataaaaaagtgattgccagtaatggggaagatttagagaactgcaaggagagccagtacagcccgccggaaagcagtaccgcagccggaagggtaaacacccaggccatcagaatgctggtcacggttttacgctgtaagccgccaccatctaccaccatcgtccccgcgacagaagaggagagtttctcgggctgggtcccctgtggagggtttggacccttccggaggtttagtgaggagtcgctgtcgccatggccgtcgaggctccagttgcccggtagattctcggggagacggtttcaaagcggtcagtggcgggagaagtttcaactctgtgagatgaatgcacacatcacaaagagattcctcagaatgcttctgtgtagtttttatgtgaagatatttcctgtaaaactattggcctcaaagcgctccaaatatccacttgtagattctagaaaaagattgtttcataactgctcaattgaaagaaaggttcaactctatgagacgaatgcacacatcaaaaagaagtttcacagaattcttctgtggagttttatgtga

SEQ ID NO: 13820 - DNA, 2626 bp, Homo sapiens
  SIMILAR (1309)..(1872): 981254mologous to Escherichia coli K12 putative transport,accession number AE000163,Smith-Waterman Score=962.
atgcgggaagaatttgctcatcgctggctggcccgcgcgggcgaaaaaacgccgccggatgcgctggaaaaacttaccgaccctctgatgttcgccgcagcaatggtcagcgccggtaaagcggatgtctgtatcgcgggcaacctctcttccacggcaaatgtgctgcgtgccggattacgcattatcggcttgcagccaggctgtaaaacgctctcttccattttcctgatgttgccacagtacagcggcccggcgttgggctttgccgattgcagcgtggtgccacagccgacggcggcgcagctggcggatatcgcgcttgccagtgccgaaacctggcgcgccatcaccggagaagagccgcgcgtggcgatgctgtcgttttccagcaatggtagcgcccgtcacccctgtgttgctaacgtccagcaggcgacagaaatcgtccgtgagcgcgcaccaaagctggtggtggatggcgagttacagtttgacgccgccttcgtgccggaagtggcggcgcaaaaagcgcctgccagcccgctacagggcaaggccaatgtgatggtttttccgtcgctggaagccggaaatattggttacaaaatcgcacaacgactcggcggatatcgtgccgtcgggccactgatacaaggacttgccgcgccgatgcacgatctctctccctgtatagccgcgaccgatgcaggttccgcagcggcacagcgtatcggcgatctggtatctgtacacgttatccctcgtccgcacgtcgacctggaacaagtcttccctatcggcctgaaagcgtatacagcaacctgtaatcaccctgtgtcactacgattcacgattaaaagcagttccgacaggatcaagttgagcaatcagacgttgcaaagcaagaacctattcatcatgcgcttttactgcttctcgctctgcctaagcctctccgcattttaccactgcaggggagttatcgtcaatattcaggcggtattctggctgcaaaaaggcaccgaagcggcagatattctgactacctgcgcgcagttgtggatcatgatgtatgcgctgctttcagtcttctcgttgctggatgttattttgaatctggcgcagaaattcccggcagcatctcagttaccgctgaaagggatatttcaggggattaaactgatcggcgcgattctggtcggcattttgatgatctcgctgctgattggtcagtcgccagcgattctgatcagcggtcttggtgcaatggctgccgtgctgatgttggtatttaaagatccgattcttggtctggtggcagtgcgtaactgggacaataccattaccactattcccacctggtctctggtttctgactcctttaaaaactggagcgggatgtcagcatctggcgggcgacgtattaagcgcagtatcagtattgatgtcaccagtattcgttttcttgatgaagacgaaatgcaacgtctgaataaagcgcatttgttaaagccttatttaaccagccgccatcaggaaattaatgagtggaatcgccagcaaggttctacggagtcggtattaaatctgcgccgaatgaccaatattggaacctttcgtgcctatctgaacgaatatctgcgtaaccatccgcggattcgtaaagatatgaccttaatggtacgccaactggctccaggtgataacggtttaccgctcgagatctacgcgtttactaacaccgtggtgtggctggaatatgaaagcattcaggctgatatattcgatcacatatttgcgattgtcgaagagtttggtctgcgacttcatcagtcgccaaccggcaatgatattcgctctctggcgggggtaaccatcaacaaagcaccgggcgatgatgaaatcctgaaaaacaccgtcgattttgtctctttcagctattacgcctcgcgctgcgcctcggcggagatgaacgccaacaacagcagtgcggcgaacgtggtgaaatcgctgcgtaatccgtatctacaggtgagcgactggggctggggaattgatccactcggtctgcgtatcaccatgaatatgatgtacgatcgttatcagaagccgctgtttctgctacttacgcgaacatatccgcgcaatgggcgaacgattgcagacggcattccgctgatgggctacaccacatggggctgtattgatttagtttccgcctctacgggtgaaatgagcaaacgctacggctttgtctttgttgaccgtgacgacgcaggcaacggtacgctgacgcgcacgcccttccagtcgttgataaacggtttctaccgcatctttaatcggctgggtcatcgggtagtaaaagccgacgatatccggctgaatgccgaggaaaatcacttcgccaatatcttctttcaactggtcgataaggtaattcaacggcatgttatgggtagtcatcataaacatctcggcgatatcatccgggtcgatgatgcggatctcgccggggtttagccccatatccgtggcgtcgacaatcagcagtcgtgtcgggcgcagttcacggatagcgacgatgtcgttacaaaacggcaaccaagctcatcattcataa

SEQ ID NO: 13821 - DNA, 2373 bp, Homo sapiens; identical to SEQ ID NO: 13138
  SIMILAR (868)..(1269): 991254mologous to Escherichia coli 6-phospho-beta- glucosidase,accession number U29579,Smith-Waterman Score=721.

SEQ ID NO: 13822 - DNA, 801 bp, Homo sapiens
  SIMILAR (1)..(231): 1001254mologous to Escherichia coli morphology control protein (put.); putative,accession number M34102,Smith-Waterman Score=407.
ttactggcgcaactggacagcggcaaactcgattgcgtgatcctcgcgctggtgaaagagagcgaagcattcattgaagtgccgttgtttgatgagccaatgttgctggctatctatgaagatcacccgtgggcgaaccgcgaatgcgtaccgatggccgatctggcaggggaaaaactgctgatgctggaagatggtcactgtttgcgcgatcaggcaatgggtttctgtaatgcgaattcgatctcggtaccgattggtgctacgtgggagcacacactgtagtcggctgtggccgtagatgagtacagctgccctgtcagggagcagtctgagttcttgcaggggcgccgcatggctcctatgaactggtgagcgatacgcatcatggagacggggtcctcttggcggggtacttctgagtgtccggtcctcctggcagctctgctttctaatgagatctactctctgagactcttcgctggtcgtcctctggcatgcgtcttcgtttgctcgccgtccgtctccgctggctgatggttgctgctcgtcggcaacggctgtctgtcgggcgccgtggtcgtcagtcgtctctgtgtgcggtgttgtgctagttgtcgtctctgctaggcccctgatactgcatgtgacagcggccgtgtcgctgcgtcgtcgtgtgactgcgctctggccctgcgcggcgcgagcgcgataacgcggcgtcttggctcggtcgtctcttgtcgacgcgcttcgttctgtcgggcagcgagccagtgtcgcctcgcgttgtgtcgtcat

SEQ ID NO: 13823 - DNA, 717 bp, Homo sapiens
  SIMILAR (499)..(714): 1001254mologous to Plasmid F Protein D,accession number M12987,Smith-Waterman Score=364.
atggcaggcactggacctgctctgctactgggacaacatgatttacaatgtgaaaagggaaaacctaaatcaccaagtaatgaaaacattaaagttaatgcatcacaagtgtggcactatgcaaaattcaaacagcaagttcagaagcaacagctaagtggagtggacaggaagctggaggatcccctgagcttctcagcagaactagatggcaatgatgccacaggacagccatcgattcttaacaatgaagaatttgtattgatcttctacccggaaagacaacaatttgtatccagttttcaaaatctgaaaagcaaatacaactcttactatgccattaaacccgagagaagttctatagcatctactccagcaataaagcagcagagacctccagggaagctgatgcaattaggaaaacttgacttaagtacagtatataaatcaaagttcctccctcatattggctgtggttttgactctagaggatcccctgttccggtcacaccacatacgttccgccattcctatgcgatgcacatgctgtatgccggtataccgctgaaagttctgcaaagcctgatgggacataagtccatcagttcaacggaagtctacacgaaggtttttgcgctggatgtggctgcccggcaccgggtgcagtttgcgatgccggagtctgatgcggttgcgatgctgaaacaattatcctga

SEQ ID NO: 13824 - DNA, 711 bp, Homo sapiens
  SIMILAR (3)..(503): 1001254mologous to Bacteriophage phi-80 alternate start at bp 59; ORF,accession number L40418,Smith-Waterman Score=868.
cagttattccggccttcgacttccgcgaaatggtcacgaccctcgacaacaagataatcaccacatcactcaaggtggcggattactttggcaagcgacacaaagacgttttgcgtgccatacgtaacctgaaatgctccgatgacttcacccagcgcaattttgcgcccattgatttcattgataaaaatggcgatgttcagcctatgtataacatcacccgcgacggatgcatgatgctagtgatgggattcactggcaaaacagctgccgcagtgaaggagtgttacatcaatgccttcaactggatggccgagcagctaaaccggcgcatggcgatgggtgaagaattgcagcatcgctacgccatcaaagaaacgcgctcaaagctgaaaggcacgatcggaagccgtttgatgaacgagcggaagaaagagaagcgcgtcctggagctcgaacatgagcacatcatgcaggtaacgcagccagaattgttgattggctgatcgcggcattacagcaggcattcactgagtgcctgtgataatgcaacagcccgtacaaaacgggcttggattttatctttttgtggggtcagggccccaggggaaacgaattggcttaattgggtatcccaccgccccttatgaataacctgcaactaattggcttaacggccgggtttaattgtgtggacaagaaagaattaaa

SEQ ID NO: 13825 - DNA, 813 bp, Homo sapiens
  SIMILAR (579)..(1): 991254mologous to Escherichia coli K12 putative transport system permease protein,accession number AE000305,Smith-Waterman Score=954.
ctgcgaagattccgttgccgggcttaacaggcgggcaaacaagatcccgccagggatcgccattaatgatgccgccagcagatattccacaggcacgcccagtgcggcgtaaccaatcattgtcgaaccagcaatcgaggccatgccactacaaatcgctgtaaataattcattgcgattcagacgatcgataaagggtttgacgattgccggaatttcgttttgcccgaggaaaatggtggtgaccgcgacgaatgactcgatcttgctgatatttaatgctttctggaagataccgccgagaattcgaattaaaatccccatcacaccgatgtagtagagaatactcaccagcgcggtgacgaagataattgccggtaacaccctgaaaccaaagataaatcctgcaccatcaaataaggtatccattttcggtccgaccagagaaccgaagataaatgcgctacccgcgtcgctgtacgccatcactttatgcacgccaaaagcgactttttcagcgacccaacgccctggcggtaaccaaagcataatgccgccaatcacgacctggtacaccagtaccaggtaggtggccaggcataaacttgtgcggccataagcatcctgcatgttaatattggctcccatcttcaacagcagcttcactgtgtccgcttgacgtccagaaaccgcatgcatcaagggcgtgcatccaaggtttactatgttggcaggctggttctgaactcctgaactcatgatccacccgccttggcctcccagagtgctgggattataggcgtgagcgaccat

SEQ ID NO: 13826 - DNA, 794 bp, Homo sapiens
  SIMILAR (47)..(1399): 991254mologous to Homo sapiens voltage gated potassium channel,accession number Y15065,Smith-Waterman Score=2336.
gccattaatgatcccgccagcagatattccacaggcacgcccagtgcggcgtaaccaatcattgtcgaaccagcaatcgaggccatgccactacaaatcgctgtaaataattcattgcgattcagacgatcgataaagggtttgacgattgccggaatttcgttttgcccgaggaaaatggtggtgaccgcgacgaatgactcgatcttgctgatatttaatgctttctggaagataccgccgagaattcgaattaaaatccccatcacaccgatgtagtagagaatactcaccagcgcggtgacgaagataattgccggtaacaccctgaaaccaaagataaatcctgcaccatcaaataaggtatccattttcggtccgaccagagaaccgaagataaatgcgctacccgcgtcgctgtacgccatcactttatgcacgccaaaagcgactttttcagcgacccaacgccctggcggtaaccaaagcataatgccgccaatcacgacctgtaacactaacgccgcgccaacggtacgcaggctgatcttcttcttgtttacggtagaaagccaacggtttaccgttacgccctgctcgttcttttcaataaagttagcgtcacggtcagctttcatcagcttcgcaatacgggagaatgcttcttcccagctaatgcgctgccatttgtcagaacctggcgcacgatattccgggtagcgcagacggttttcacggatgatccgggtcaccttcaatgtgataaatcgcttctctggcgttttttgcgccat

SEQ ID NO: 13827 - DNA, 1261 bp, Homo sapiens
  SIMILAR (481)..(2): 991254mologous to Escherichia coli RhsC protein precursor,accession number D90709,Smith-Waterman Score=857.
cggcggcgttgtattcataccgcgtttcatggccctgcgtgtctttcacggcaattaactgtccacggctgtcgtatgcgcggtactgactcagcccttcctcgcggtgcaccgccgtcacctgaccaaaacggtcatggtcatagcgggttacataaccggaacagtcagtgaagctcagcaactgaccgtaacggctccacgtcatggttttccggctgccggtggcatcttccgttgcgcagggtaagtcactgtgtggattatcataacggtagcgggtgatatcgccgtcaggggcagtttcctgaatcagacggccccattcatcatattcccggcgtatttccagcccgtcaggcccggtggctgacgttaactggctgtggtggttattgtaaaacgccgatgccctgccatccggcgtggtgatgcgcgtgatgaggcccgtcaccacatccggactgtattctgttgtcctgctttcgactatgggcgtaactacggtggcgcatatgacgtagaagcatggaccgatatgctgccagaatttggtggctgatacctatgctggcgctgacaacttcatgaacgggtcgtgctataggcgttgcaacctacggtaacactggcttatttggcctaggaccagggcttaaactctgctttgcaatatcagggtaataatgaaagtggtggaccattcgggcaggaaggttccggtagtggtgatggccgtagcgtgctgattgttaacgataaaagtcaggttgaagcgcgccctgtcgttgccagtcaggcgattggcgataaatggttgattagtgaaggactgaaatctggcgatcaagtcattgtcagcggccggatcgctgtgttgcttgagggcttcgcgccacagttcaatcagtcgtttacgaatgagcgggtatttcaggcggttagcgctgtaaagataccaggagtaacttgcgccacgcgggcagccgcgaggttcatgattgggcaggtcagggcgagtgcgcgggtagtcggtctgttggatttcccaggtcaccagaccatttttaacgtagattttccagctacaggagcctgtacagttaacaccgtgggtggaacgcacgattttgtcgaactgccaacgctggcgatagctgtcctcccagtcgcggttgctatgcatcacctgtccgtgaccatcggcaaaggtttcgcccttttgtttgaagtagcgaaagcgttccaaaagtttactcat

SEQ ID NO: 13828 - DNA, 1658 bp, Homo sapiens
  SIMILAR (1264)..(2118): 991254mologous to Homo sapiens potassium channel; KvEBN1,accession number AF033348,Smith-Waterman Score=1534.
tcaggtctgctgggaaaatcggagcgtcatgtgcagaccctccgggatctctacctggtaagcggcattataggcctctgagtacttttggggtatcaggcaacaccaagaaactgtgaacgactcaaaggaccgtctgcgacgagctgggcgttcttggcaagcccgccaataccaaagtcggcatcactattgatacagactggttctggggattagtcgaagagtgcgtgcgcggctacatcaaaacccattaagtgttgatacaagccgggccggtatcgcaagatgcaggcctggctatttctgatgggagaaagccgtcgcccaatatgacatgaagagataatcactatggatgtctgagaagtgttcgccagggcgtgggtcgctgaaaaagtcgcttttggcgtgcataaagtgatggcgtacaggacgcgggtagcgcatttatcttcggttctctggtcggaccgaaaatggtaccagcactgcgatacatgcgccgtggttgacgtctgcccgaccggtgcgtctatttcgccgatacatgaccagagggattgatcgatattaatccggatctcagcatcgcttgtcaagtcaacagcatcagccgccatgtccgtaccgcagtgcgctcttatccatccggtccgaagacggcggacaaatgcagatttctgccgtaagaccaatttagcagccggtaaattgcccgcgtgcgtctgaagcttgccacgaccaaggcgctgcgtttggcaatctggacagatcccatacagtgagatttcagcaactgtcgcagccagaagcccacttacccgatacaagctggcgcttgggaaccaaacgaagccagcagttcgagataatccggttaagcaggtagcgcaaaatccgttggcgacgtttagtctgacgttgacactggcagttatgcgaatgtaaggcgtttcctcaatcaaggctgttacctccgccagacgcaaattctgcagcatatcggtccatgcttctacgtcatatacgacaccgtagttacgccatagtcgaaagtaccattctgaccaaagcctaaacctgcaaatgccaacgcgttgcggtattacccttgtcgctttcaggaccgtttgcgccaatgtaaattcccactgaccataaccagtgaattgatcagcgatctgagtttccctttgaaaccgatacgggcatatgacatgtcgccatcgtgttgactgcttgttctggtagcacatctgcgtgggtgccttaaaagtgggcactctctcagcagaaaattcccatgtgggacccagttcaagcccctcctcactttcatcactttcttctcgttttgcttcccttcctctgtagccttcacgtcctccaacacccttaatccgccatatttcgcctatgatagctctagggttaaatgctcctcgaatgtgtttgtgttttccgttactgctgaccaaccaagtcctatcaagacccagcacagtcttctcaggtatacactggccacaagattccgtgtgatattcacctgtatggattctggcccttccctcaatgagtagatcgggtgttctcctcgctctggcacaacactgctgctcggacctgccttggaggcgagtgtgtaccaccat

SEQ ID NO: 13829 - DNA, 1250 bp, Homo sapiens
  SIMILAR (187)..(276): 601254mologous to Homo sapiens Extended human secreted protein sequence, SEQ ID NO. 504,accession number Y36119,Smith- Waterman Score=99.
tgcaccagcgcatagtcgaaatctggtgcaatagagattgcgcggttggcaggcagagtccacggcgtggtggtccagattaccagcgagattgggccgttaacgttgcttacggcaaattttgctttcagtgcatcctgatcgactgcctggaaagcaacgtcgatggacggagaagttttgtcgtaatactcaacttccgcttccgccagcgcagaacggcagtcaacgcaccagtgaactggcttcgcgcctttgtgcaggtgaccgttgccgatgattttgcccagcgcgcggatgatgttggcttcagttttgaagtccatggtcaggtacgggtgcgaccagtcgcccagcacgcccagacggataaagtctttgcgttgaccgtcaacctgggtcgccgcgtattcgcggcacttggcgcggaactcggcggcgctcgatcggcagttcggcccgttcccgaatgctatgccgtacgtgaaacactggcgttactgcaaaagattttccccattcgccagtgcgaaaatagtgtttatcgcaatcgctcgcgtccgtgtctgcaataccagatagggcgctgtctgggaccgtgcgttgaaggactggtgagtgaagaagaatacgctcagcaggtcgagtatgtgcgcctgtttttgtctggcaaagatgatcaggtgcttacgcaactcattagtcgtatggaaactgccagccagaatctggagtttgaagaagctgcacgtattcgcgaccaaattcaggcggtgcgacgcgtcaccgaaaaacaattcgtttccaataccggcgacgacctcgacgttattggtgtggcgttcgatgcgggcatggcttgtgtccacgtattgttcattcgtcagggcaaagtgctcggcagccgcagctatttcccgaaagtgcctggcggtacggaactgagcgaggtggtagaaaccttcgtaggccagttctatttacaaggcagccagatgcgcaccttaccgggtgagatcctgctcgattttaatcttagcgataaaacgctgctcgccgattccctttcagaactggcgggacgccagattaatgttcaaaccaaacctcgcggcgatagggcgcgttatctgaaactcgcgcgcacctatgcggcgacggccttaaccagcaactttcgcagcatctaccgttcaccagcgactgaccgcgcttgccagcgtgttgaaactgccggaaatgaacgatag

SEQ ID NO: 13830 - DNA, 831 bp, Homo sapiens
  SIMILAR (127)..(438): 991254mologous to Escherichia coli K12 control of stringent response; involved in penicillin tolerance,accession number AE000113,Smith-Waterman Score=509.
aatcacggcctgaccgtcgatctgacgcgtagtcgatctggcatagagattgccgtgcatcctgatcgactgcctggaaagcaacgtcgatggacggagaagttttgtcgtaatactcaacttccgcaggcggaagttgtgttggtgctcggttcgaaaaactcctccaactccaaccgtctggcggagctggcccagcgtatgggcaaacgcgcgtttttgattgacgatgcgaaagacatccaggaagagtgggtgaaagaggttaaatgcgtcggcgtgactgcgggcgcatcggctccggatattctggtgcagaatgtggtggcacgtttgcagcagctgggcggtggtgaagccattccgctggaaggccgtgaagaaaacattgttttcgaagtgccgaaagagctgcgtgtcgatattcgtgaagtcgattaagtcattagcagccccggcattgacgatgccgtcgccattgccgccgcgatttttgcacccgaactcgacctgcaactgatgaccaccgtcgcgggtaatgtctcggttgagaaaactacccgcaatgccctgcaactgctgcatttctggaatgcggagattccgctcgcccaaggggccgctgtgccactggtacgcgcaccgcgtgatgcgggatctgtgcacggcgaatcgggaatggcgaaggggctgtggacggccgagcaagtggccacgtactgcgaccatctgacccaggccagctgagttcatgttcgaggagggctcctttcggcgggggccgcgcggcttccgaaggaaatgccaggcgctcaagcccatgtacagcat

SEQ ID NO: 13831 - DNA, 1203 bp, Homo sapiens
  SIMILAR (1)..(645): 991254mologous to Escherichia coli K12 putative aldose reductase (EC 1.1.1.21),accession number AE000129,Smith-Waterman Score=1069.
atggctatccctgcatttggtttaggtactttccgtctgaaagacgacgttgttatttcatctgtgataacggcgcttgaacttggttatcgcgcaattgataccgcacaaatctatgataacgaagccgcagtaggtcaggcgattgcagaaagtggcgtgccacgtcatgaactctacatcaccactaaaatctggattgaaaatctcagcaaagacaaattgatcccaagtctgaaagagagcctgcaaaaattgcgtaccgattatgttgatctgacgctaatccactggccgtcaccaaacgatgaagtctctgttgaagagtttatgcaggcgctgctggaagccaaaaaacaagggctgacgcgtgagatcggtatttccaacttcacgatcccgttgatggaaaaagcgattgctgctgttggtgctgaaaacatcgctactaaccagattgaactctctccttatctgcaaaaccgtaaagtggttgcctgggctaaacagcacggcatccatattacttcctatatgacgctggcgtatggtaaggccctgaaagatgagggtattgctcgtatcgcagctaaacacaatgcgactccggcacaagtgattctggcgtgggctatggggggaggcccggttgaaatggcgaaggtagcagatatggcggggattttcgtcagcaagctgaagacattcaacgctggcgtaaaaggctccacgctgggcgcaagtggcccgcagtacgtgatggtgccaaagaagcatgcagatcaactgcgtgaatctctggcttcaggcgaaattgctgctgtacagtcgacgctggttgccgacaatacgccgcttaacagccgtgtttacaccgtacgctctggcgacacgctttcaagtatcgcttcacgtctcggcgtaagcaccaaagatttgcagcagtggaacaaactgcgcggatctaagctgaagccaggccaaagtttgacgattggtgcaggcagtagcgcacagcgactggcaaacaacagcgatagcattacgtatcgtgtgcgcaaaggcgattcgctttcaagcattgctaaacgccacggcgtgaacatcaaagatgtgatgcgctggaacagcgacactgcgaatctgcaaccaggcgataagctgacgttgtttgtgaaaaacaacaacatgccagattcctga

SEQ ID NO: 13832 - DNA, 303 bp, Homo sapiens
  SIMILAR (3)..(173): 1001254mologous to Homo sapiens dJ663D7.1 (glucocorticoid modulary element binding protein 2 (KIAA1269)),accession number AL121907,Smith-Waterman Score=288.
atgagcgtgaaggtggtcgcagtgcagaatgggaggggagctatagagcagacacagcaactgatacttcagggacagatacacaaacccattaccatcgtgttacagctgcctacagcattcagtacagtaacagccttcacaggcgagctgctggttcgtgaagcgggcggcatcgtcagcgacttcaccggtggtcataactacatgctgaccggtaacatcgttgctggtaacccgcgcgttgttaaagccatgctggcgaacatgcgtgacgagttaagcgacgctctgaagcgttaa

SEQ ID NO: 13833 - DNA, 572 bp, Homo sapiens
  SIMILAR (55)..(291): 911254mologous to Escherichia coli putative outer membrane lipoprotein,accession number U38473,Smith-Waterman Score=361.
atgttctcactaactgatgaattgcttcttagcttaaattctactggagccaacaatggaaggcttctgagagcttttgtgctttaccccggcgatattctctacgtgccacgtaatgatgatctgaaagtatttgtgatgggtgaagtgaagaaacagagcaccctgaaaatggactttagcggcatgaccctgactgaagccctgggcaatgctgaaggcatcgacatgaccacctccaacgccagcggcatctttgtcattcgtccgctgaaaggcgagggcgggcaattccgcctgcaaccttatgacgtggtgtatgtcaccaccgccccggtttcccgctggaaccgtctgatcaatcagttgctgccaactattagcggtgtccgttacatgacggatacagccagcgacattcataactggtaatcgtcatgtttaacaacatcttaattgtctgtgtcggcaatatttgccgttccccgacggcggaacgcttactgcaacgttatcacccggagctgaaagtggagtccgctggactcggcgcgctggtcggtaagggcgct

SEQ ID NO: 13834 - DNA, 1674 bp, Homo sapiens
  SIMILAR (317)..(171): 341254mologous to Drosophila melanogaster Mst84Db,accession number X67703,Smith-Waterman Score=75.
ctactgtgaggggatgaaggtgctccctgcatctggccttgctgtcttcctcatcatggctttgaagttttccactgcagccccctccctagttgcagcctcccccaggacctggaggaacaactaccgcctcgcacaggcgtatcttgacaaatattacacaaataaagaaggacaccagattggtgagatggttgcaagaggaagcaattccatgataaggaagattaaggagctacaagcgttctttggcctccaagtcaccgggaagttagaccagaccacaatgaacgtgatcaagaagcctcgctgtggagttcctgatgtggccaattatcgcctcttccctggtgaacccaaatggaaaaaaaatactttgacatacagaatatctaaatacacaccttccatgagttctgtcgaggtggacaaagcagtggagatggccttgcaggcctggagtagcgccgtccctctgagctttgtcagaataaactcaggagaagcggatattatgatatcttttgaaaatggagatcacggggattcctatccattcgatgggcctcgggggactctagcccatgcatttgctcctggagaaggcctgggaggagatacacatttcgacaatcctgagaagtggactatgggaacgaatggttttaatttgtttaccgttgctgctcatgaatttggccatgccctgggcctggcccattccacagacccatcagcactgatgtacccaacttataagtacaagaatccctatggattccacctccccaaagatgatgtgaaagggatccaggcattatacggacctcggaaagtattcctggggaagcccactctgccccatgccccccatcacaagccatccatccctgacctctgtgactccagctcatcctttgacgctgtgacaatgctggggaaggagctcctgctcttcaaggaccggattttctggagacggcaggttcacttgcggacaggaattcggcccagcactattaccagctccttcccccagctcatgtccaatgtggatgcagcttacgaagtggctgagaggggcactgcttacttcttcaaaggtccccactactggataacaagaggattccaaatgcaaggtcctcctcggactatttatgactttggatttccaaggcacgtgcagcaaatagatgctgctgtctacctcagggagccacagaagacccttttctttgtgggagatgaatactacagctacgacgaaaggaaaaggaaaatggaaaaagactatccaaagaatactgaagaagaattttcaggagtaaatggccaaatcgatgctgctgtagaattaaatggctacatttacttcttttcaggaccaaaaacatacaagtatgacacagagaaggaagatgtggttagtgtggtgaaatctagttcctggattggttgctaaatagaaaagcctagtcttctcaagcaatgaggatgactacaagcagcctctaactggatcttaaggactaaagcagaatgtaggagagggattcttccaaaggccttcaaatcaaattagaattcactgagaataataatacttccaatttttttcatagttgtataatcagaatttcaatccacattagaaaagtttttatatgggca

SEQ ID NO: 13835 - DNA, 516 bp, Homo sapiens
  SIMILAR (204)..(485): 1001254mologous to Homo sapiens Protein sequence encoded by clone p199-7 (PL mutet.rsT4),accession number P93369,Smith-Waterman Score=542.
atgaaaccaattgacaaagatgaaaacttctggatgatcagaggatatgctgtcttgccagattatcccaaatccatccatacattaagttttccaggacgtgtgaagaaaatagatgcagccgtctgtgataagaccacaagaaaaacctacttctttgtgggcatttggtgctggagtcaggcaccgtgtatgaaatctcccaatgcgctcatcgtcatcctcggcaccgtcaccctggatgctgtaggcataggcttggttatgccggtactgccgggcctcttgcgggatatcgtccattccgacagcatcgccagtcactatggcgtgctgctagcgctatatgcgttgatgcaatttctatgcgcacccgttctcggagcactgtccgaccgctttggccgccgcccagtcctgctcgcttcgctacttggagccactatcgactacgcgatcatggcgaccacacccgtcctgtggatctacccactagtcaattcaccatcttgttga

SEQ ID NO: 13836 - DNA, 817 bp, Homo sapiens
  SIMILAR (217)..(534): 1001254mologous to Homo sapiens matrix metalloprotease MMP- 27,accession number AF195192,Smith-Waterman Score=563.
ccagagataagattctggtttttaaagatgaaaacttctggatgatcagaggatatgctgtcttgccagattatcccaaatccatccatacattaggttttccaggacgtgtgaagaaaatagatgcagccgtctgtgataagaccacaagaaaaacctacttctttgtgggcatttggtgctggaggtttgatgaaatgacccaaaccatggacaaaggggttcccgcagagagtggtaaaacactttcctggaatcagtatccgtgttgatgctgctttccagtacaaaggattcttctttttcagccgtggatcaaagcaatttgaatacgacattaagacaaagaatattacccgaatcatgagaactaatacttggtttcaatgcaaagaaccaaagaactcctcatttggttttgatatcaacaaggaaaaagcacattcaggaggcataaagatattgtatcataagagtttaagcttgtttatttttggtattgttcatttgctgaaaaacacttctatttatcaataaattcatagacctaaaataaacctcaacaggtcttttaatataaattctgcttcaaaatagaataaaaccattctttaacaacaagttgctggtcctagttctaaatatccaaattcaatggccattttgagctgcctgattcttttaataggaagttattatgtagaaacaaaaatctctgactgtactttaagcctatttcatgctttgtggacttggagaagacatgtcttataactgaatactgaaacatttattaaaccaatctttagcattctaa

SEQ ID NO: 13837 - DNA, 1176 bp, Homo sapiens
  SIMILAR (1)..(597): 1001254mologous to Homo sapiens matrix metalloprotease MMP- 27,accession number AF195192,Smith-Waterman Score=1094.
  misc_feature (1)...(1176): n = a,t,c or g
atgttcccaaattatgtctccctggatcccagaaaatacccactttctcaggatgatatcaatggaatccagtccatctatggaggtctgcctaaggaacctgctaagccaaaggaacccactataccccatgcctgtgaccctgacttgacttttgacgctatcacaactttccgcagagaagtaatgttctttaaaggcaggcacctatggaggatctattatgatatcacggatgttgagtttgaattaattgcttcattctggccatctctgccagctgatctgcaagctgcatacgagaaccccagagataagattctggtttttaaagatgaaaacttctggatgatcagaggatatgctgtcttgccagattatcccaaatccatccatacattaggttttccaggacgtgtgaagaaaatagatgcagccgtctgtgataagaccacaagaaaaacctacttctttgtgggcatttggtgctggaggtttgatgaaatgacccaaaccatggacaaagggttcccgcagagagtggtaaaacactttcctggaatcagtatccgtgttgatgctgctttccagtacaaagacaatacacaagccccaaacatcacagccttatctaaagcgtatgttttaactgatgaaaaactgagatccagaagggctgctggcccaaaggtcactggtggtgaggggcagagacggcccagctcaggctctagctgccttgagggtatttcacaaggctgcagtcagccagggctgtggtcacctcaaggcctgtttgggggaaaatccacttccaagcttaccaatgaagttgttgtcaggattcagctcttcatgtgttgttggaatgatgacctnagctacgacgaaaggaaaaggaaaatggaaaaagactatccaaagaatactgaagaagaattttcaggagtaaatggccaaatcgatgctgctgtagaattaaatgggaaagccagagagcaatttctagcacaagctgcagatccaaagggcaggactgacatgaggctccagggtgcagagctggaatatggttggcaaaacagagaaggcagaagatgggcagaatggcatggaacaaatccggagcagccacagtgcagcaaaggcttggagggcttgtggggttttatttaa

SEQ ID NO: 13838 - DNA, 443 bp, Homo sapiens
  SIMILAR (1300)..(1034): 651254mologous to Homo sapiens PRO2822,accession number AF119900,Smith-Waterman Score=273.
cttgacacattcttgttgatgaccactccagcttggcacgagggtccccgtgggacaaaaggggacactgcagtgtgaagcctcagcagtcccctcagcagaattccagtggtacaaggatgacaaaagactgattgaaggaaagaaaggggggaaagtggaaaacagacctttcctctcaaaactcatcttcttcaatggctctgaacatgactatgggaactacacttgcgtggcctccaacaagctgggccacaccaatgccagcatcatgctatttgaagtgaaaactacagccctgaccccttggaaaggtccaggcgccgtcagcgaggtgagcaacggcacgtcgaggagggcaggctgcgtctggctgctgcctcttctggtcttgcacctgcttctcaaattttgatatatttaggtacaatggagttttcttt

SEQ ID NO: 13839 - DNA, 484 bp, Homo sapiens
  SIMILAR (23)..(424): 861254mologous to Homo sapiens neurotrimin,accession number AF126426,Smith-Waterman Score=600.
ccaagaaagggggccgcatcaagtgatccagagaaaagagtgcctccgagagtattcgcctgtcgtttcataagccaagggtacaggtgtcgccgtgggacaaaaggggacactgcagtgtgaagcatcagcagtctcatcagcagaattccattggtacaaggatgacaaaaggctgattgaaggaaataaaggggtgaaagtggaaaacagacctttcctctcaaaactcatcttcttcaatgtctctgaacatgactatgggaactactcttgcgtggcctccaacaagctgggccacaccaatgccagcatcatgctatttggtccaggcgccgtcagcgaggtgagcaacggcacgtcgaggagggcaggctgcgtctggctgctgcctcttctggtcttgcgcctgcttctcaaattttgatgtgagtgccgcttctccacccgggaaaggctgccgcctccaccgcctgcggctgta

SEQ ID NO: 13840 - DNA, 1275 bp, Homo sapiens; identical to SEQ ID NO: 7708
  SIMILAR (331)..(774): 411254mologous to Zea mays Hydroxyproline-rich Glycoprotein (HRGP),accession number AJ131535,Smith-Waterman Score=231.

SEQ ID NO: 13841 - DNA, 767 bp, Homo sapiens
  SIMILAR (748)..(14): 341254mologous to Human herpesvirus 6 U88,accession number X83413,Smith-Waterman Score=224.
agatggtgcagagtatctcctttgggaggatgtctcatttgagagaatgcccctgcctcggggctacccctgtttccttctccttctgtccaacttggtccaggtctggtgtcctggatgtgctgctgaagagacaggttccgggggtggtgagcgcatgtacctgtggggtgggctgcgcacactggatatggtcacatagtgccagccactcaccagcctgagatggagatgatgatgatggagagcttcagaggggctgctcaggcttttcccagatatactacaagcaagagaatggctggcaggcacttggtggcctttttctgtcttccataggaagaattttctaacacaacaaacaggtgaggacacgactcgtctttacaagctctctgtggtgcttcccagcatggagcagatccacaaaagaactctgaggggcgtagcaaggagaccaaacacaggcacccagggagagcgcctggcatagccacagggccattgagatctgccacagggggtgtttgcccgctctcagtcgtctcccgagctgcagagtccccagcctggaaacaaggtttcagcattcccttacatggtccaggcgccgtcagcgaggtgagcaacggcacgtcgaggagggcaggctgcgtctggctgctgcctcttctggtcttgcacctgcttctcaaattttgatgtgagtgccacttccccaccccggaaaggctgccgccaccaccaccaccaacacaacagcaatg

SEQ ID NO: 13842 - DNA, 693 bp, Homo sapiens
  SIMILAR (297)..(187): 891254mologous to Homo sapiens Human protein SEQ ID NO:4,accession number Y57602,Smith-Waterman Score=172.
atgtttcctctaaagactgaaactcagcagactgaggctcacacagcacacttagcagaaggtgaaggtgacttggaaatgcaagtgccgtcattcctgagtgttttggctcggacccgtttctgtctctcagttcctcttatgtggctagagcctttcccgggtggggaagtggcactcacatcaaaatttgagaagcaggtgcaagaccagaagaggcagcagccagacgcagcctgccctcctcgacgtgccgttgctcacctcgctgacggcgcctggacctgtggagagaacacactcgccgtgagtggtctgggagaaaatggaaggaaagcccggtggttgcctggtctgctgtcatttggccttgcccctgaatctaactactatgtgtccacagaaaccatcaccagacgttccccctttgtagatgctcactctgtcatctacagagcacattctttggaatcaaaggagagaagcctccgccggatgccttcaagggctggtgagtggctggcactatgtgaccatatccagtctgcgcagcccaccccacaggtacatgcgctcaccacccccggaacctgtctcttcagcagcacatccaggacaccagacctggaccaagttggacagaaggagaaggaaacaggggtagccccgaggcaggggcattctctcaaatga

SEQ ID NO: 13843 - DNA, 432 bp, Homo sapiens
  SIMILAR (28)..(432): 981254mologous to Homo sapiens putative voltage-gated calcium channel gamma-4 subunit,accession number AF162692,Smith-Waterman Score=709.
agattttcccgggtcgacgatttcgtcctgaccatggacgacgggcccccgccccgccgcgcccgcggcgacctcacccactctggtctgtggcgggtgtgctgcatcgaagggatctataaagggcactgcttccggatcaatcacttcccagaggacaatgactacgaccacgacagctcggagtacctcctccgcatcgtgcgagcctccagcgtcttccccatcctcagcaccatcctgctcctgctgggtggcctgtgcatcggtgctggcaggatctacagccgcaagaacaacatcgtcctcagtgccggcatcctcttcgtggctgcaggcctcagtaacatcgtcggtatcatcgtctacatttccagcaacacaggtgacccgagtgacaagcgggacgaagacaaatagaaccattacaac

SEQ ID NO: 13844 - DNA, 1417 bp, Homo sapiens
  SIMILAR (370)..(1092): 911254mologous to Mus musculus calcium channel gamma 4 subunit,accession number AJ272045,Smith-Waterman Score=1116.
atgcatgtgtgctccctcatcctggcctggttgccagaaagcactggtgacctggcagacctggcagggcccatggaccttcaggaatcagggttgtcactgaacactccagctccttggaggcagcagctgaaggggcccaatggaggaaagagcttggggacggcagctgggatctataaagggcactgcttccggatcaatcacttcccagaggacaatgactacgaccacgacagctcggagtacctcctccggcttcctgcccaccttgccctgggcctggtgcccctctccaagtctgcatttccagttaggtggataacttctgtgccaggccgcagggggctggtgtcagggctgctgggagtccacagtgtgcccgggggggctgatgatgatgatgatgatcaaggcatcgtgcgagcctccagcgtcttccccatcctcagcaccatcctgctcctgctgggtggcctgtgcatcggtgctggcaggatctacagccgcaagaacaacatcgtcctcagtgccggcatcctcttcgtggctgcaggcctcagtaacatcatcggtatcatcgtctacatttccagcaacacaggtgacccgagtgacaagcgggacgaagacaaaaagaaccattacaactacggctggtctttttactttggagctctgtctttcattgtggctgagaccgtgggcgtcctggctgtaaacatttacattgagaaaaataaagagttgaggtttaagaccaaacgggaattccttaaggcgtcttcctcttctccttatgccaggatgccgagctacaggtaccggcgacggcgctcgaggtccagctcaaggtccaccgaggcctcgccctccagggacgtgtcgcccatgggcctgaagatcacaggggccatccccatgggggagctgtccatgtacacgctgtccagggagcccctcaaggtgaccaccgcagccagctacagccccgaccaggaggccagcttcctgcaggtgcatgactttttccagcaggacctgaaggaaggtttccacgtcagcatgctgaaccgacggacgacccctgtgtgagccgcctgccctttctctccgctccagcctctccccagaacggctctttttgtcacacaggatggcatgtgatcctcaagacgacgaacaatgaactaaagccaaatgcagccctccctggcctccagaggtggcgtggactggctttgcacgaaggttgtgcccaccttctctccctcctcccgacccgccccctcgcccccacccctgtgtgtttcgccagttaagcacctgtgactccagtacctactactggttttgggttggttgttctgtcttttttttaattaaataaaaacatttttaaaaaaaaaaaaaaaaa

SEQ ID NO: 13845 - DNA, 1206 bp, Homo sapiens
  SIMILAR (94)..(213): 401254mologous to Mus musculus Doublesex and Mab3 related transcription factor one,accession number AF192561,Smith-Waterman Score=79.
atgttcgtgtcttccctcattcaccagcaagcattaaatggcactcatctagattctgaggactcagcagcaaataaaacaagtgccattgtttcaccctgtctccatgtcgtgaactcttcccacactgacccacctgtgtcctctgtccccatccccccaatcatcagcctgtcttccattatcaagtcacttcctgccaaaactggtagactgcaaactccctgcagtgtagaaccgatgatcattgagattaaagagctggggaaatttcattccactcaggttcacaagtcccctgagagagaggcaacagcattaatgctgccacacgcacatcaaaatgggtaccaagggacagggcattattttccagccacagtgagacacccagtgacttcagagaccacagccatatatccacatgaccagacgaggagaattaaaatcggcattccggggatggcatcaccaacactgagtttcagggggttatttatttattatgtgataatggcccaaaggttaggaccacctctcaaaggcaagaacctgataatttttgcccagagtccacactggagcccacccaccttggaaaccaacagtggacgtgaactcagttggatgggaaatatgaaggaccagaagtatgaatctgtgcttgatgattatagagatgtgtgtaacatcgagtctgcaggaccagacccagccataacagaaaatggccctacatctctgaaagaagaggcagagagctgcctgagcaagggcctagaagccacggctgcttctcctctcatctccagcacagttcagctctggcccaattctgcatctctccctcaacgaagccctgtagctgccctaacctctccccataaaagtggatgtgtctctgaggacagcaggctccccacagtctttgcagcagcccaacacggggagctggggaatgagcacacttcctcccttcgtgtgttcagttgcacctgcccacctcctgttgagagatggacagccccacttgagtcccagcctgtaggggaatggaaacaaccctctccaccaccaggacccataagtgaaggcatttgggagctcacaccttcagaagctgccacaccaaactgccctgtcatccgcacagggactcccacccactgtgcatctgcttctggactccttcctggtttctcataa

SEQ ID NO: 13846 - DNA, 1356 bp, Homo sapiens
  SIMILAR (94)..(213): 401254mologous to Mus musculus Doublesex and Mab3 related transcription factor one,accession number AF192561,Smith-Waterman Score=79.
atgttcgtgtcttccctcattcaccagcaagcattaaatggcactcatctagattctgaggactcagcagcaaataaaacaagtgccattgtttcaccctgtctccatgtcgtgaactcttcccacactgacccacctgtgtcctctgtccccatccccccaatcatcagcctgtcttccattatcaagtcacttcctgccaaaactggtagactgcaaactccctgcagtgtagaaccgatgatcattgagattaaagagctggggaaatttcattccactcaggttcacaagtcccctgagagagaggcaacagcattaatgctgccacacgcacatcaaaatgggtaccaagggacagggcattattttccagccacagtgagacacccagtgacttcagagaccacagccatatatccacatgaccagacgaggagaattaaaatcggcattccggggatggcatcaccaacactgagtttcagggggttatttatttattatgtgataatggcccaaaggttaggaccacctctcaaaggcaagaacctgataatttttgcccagagtccacactggagcccacccaccttggaaaccaacagtggacgtgaactcagttggatgggaaatatgaaggaccagaagtatgaatctgtgcttgatgattatagagatgtgtgtaacatcgagtctgcaggaccagacccagccataacagaaaatggccctacacctctgaaagaagaggcagagagctgcctgagcaagggcctagaagccacggctgcttctcctctcatctccagcacagttcagctctggcccaattctgcatctctccctcaacgaagccctgtagctgccctaacctctccccataaaagatgtctcatcaaagtgcctctggcccccacactgaggttcccccgagacaaacatcctggtaaatatagctttgtgtgctttcattatttattcccagggatgcctaatgcccctgaattgcctggcatcttggctctgctgcctgtcagtggatgtgtctctgaggacagcaggctccccacagtctttgcagcagcccaacacggggagctggggaatgagcacacttcctcccttcgtgtgttcagttgcacctgcccacctcctgttgagagatggacagccccacttgagtcccagcctgtaggggaatggaaacaaccctctccaccaccaggacccataagtgaaggcatttgggagctcacaccttcagaagctgccacaccaaactgccctgtcatccgcacagggactcccacccactgtgcatctgcttctggactccttcctggtttctcataa

SEQ ID NO: 13847 - DNA, 445 bp, Homo sapiens
  SIMILAR (5)..(439): 1001254mologous to Homo sapiens RNA polymerase II 23kD subunit,accession number J04965,Smith-Waterman Score=738.
agagcggccgcggcgcacggacctcaccgtgctggtggcccacaacgatgaccccaccgaccagatgtttgtgttctttccagaggagcccaaggtgggcatcaagaccatcaaggtgtactgccagcgcatgcaggaggagaacatcacacgggctctcatcgtggtgcagcagggcatgacaccctccgccaagcagtccctggtcgacatggcccccaagtacatcctggagcagtttctgcagcaggagctgctcatcaacatcacggagcacgagctagtccctgagcacgtcgtcatgaccaaggaggaggtgacagagctgctggcccgatataagctccgagagaaccagctgcccaggatccaggcgggggaccctgtggcgcgctactttgggataaagcgtgggcaggtggtgaagatcatccggcctcgtgcc

SEQ ID NO: 13848 - DNA, 404 bp, Homo sapiens
  SIMILAR (404)..(207): 1001254mologous to Homo sapiens alpha-tubulin,accession number X01703,Smith-Waterman Score=361.
ttcccgggtcgacgatttcgtgcggcggcggaggctgccatggacgacgaggaggagacgtaccggctctggaaaatccgcaagaccatcatgcagctgtgccacgaccgtggctatctggtgacccaggacgagcttgaccagaccctggaggagttcaaagcccaatttggggacaagccgagtgaggggcggccgcaatacattgggtggaagagctggcggtaggtgccagtgcgaacttcatcaatgactgtgggttccaagtctacaaacacagcccggggcacgtgcttgccagcgcccgtctcactgaagaaggtgttgaaggagtcatctcctcccccaatggtcttgtcacttggcatctggccatcgggctggatgccgtgttccaggcagta

SEQ ID NO: 13849 - DNA, 843 bp, Homo sapiens
  SIMILAR (619)..(1365): 961254mologous to Homo sapiens HRIHFB2003,accession number AB015329,Smith-Waterman Score=1203.
atggacgacaaggaggagatgtaccagctctggaaaatccgcaagaccatcatgcagctgtgccatgaccgtggctacctagacgagcttaaccagacactgaaggagttcaaagtccagtttggggacaagccaagtgaggggcagcggcggcgcacggacctcaccgcgctggtggcccacaatgatgaccccaccgacaagatgtttgtgttctttccagaggagcccaagtgcctggtccacatggctcccaagtacatcctggagcagtttctgcagcagaaattgctcatcgacatcacagagtacgagctagtccctgagtacgttgtcatgaccaaggaggaggtgacagtgctgttggccctatataagctccgagagaaccagctgcccaggatccaggcgggggacgccgtggcgcgctactttgggataaagcatgggcaggtagtgaagatcatccggcccaccgagatggcaggcaggatggatgcccctgccctgccggagtctagccccccagctctctcccggctgctcctcctctgggctccccaaggcaggcagcctccactcaagagctcccatcctgggatgagtcttcccatggcccagcccgtcccattcacctgtgtatttatgcgagatccagcctcaggaggctcaccccatcttttggaaatatttgaggacttggctgaaggtgaagaccataaattcatcaaggatcgtttcagagccaaaagcaggtatgttatcataggagatgacagctccatgcatgttattgcccctgaagacctttcagtgggacaagacgtgaaggtggaagactga

SEQ ID NO: 13850 - DNA, 612 bp, Homo sapiens
  SIMILAR (276)..(560): 381254mologous to Homo sapiens DNA binding protein RFX3,accession number X76092,Smith-Waterman Score=169.
  misc_feature (1)...(612): n = a,t,c or g
aacagacagtggcatattcaccccggtccaaactcggaacactgctgccagaatttcccaatgtcaaagatctaaatctgccagccagcctgcctgaggagaaggtttctacctttattatgatgtacagaacacactgtcagagaatactggacactgtaataagagccaactttgatgaggttcaaagtttccttctgcacttttggcaaggaatgccgccccacatgctgcctgtgctgggctcctccacggtggtgaacattgtcggcgtgtgtgactccatcctctacaaagctatctccggggtgctgatgcccactgtgctgcaggcattacctgacagcttaacttaagtgattcgaaagtttgccaagcaactggatgagtggctaaaagtggctcttcacgacctcccagaaaacttgcgaaacatcaaggtcgaaatgtccgagaagggtcttccaaatctgagacggcaaacatcacttaatcatctctggcaggcatcttcgaaaagtgattcacagtgcagacatcacgtttcaaatgctggaagantgggagaacgtggacctggacagcatcaccaagccaaccctttacacccat

SEQ ID NO: 13851 - DNA, 459 bp, Homo sapiens
  SIMILAR (179)..(211): 631254mologous to Sus scrofa metallothionein isoform,accession number AB000791,Smith-Waterman Score=42.
caacccatgagctaacgagttgattggattggattataggcatctcgaacagtgatccacagtgcagacatcacgttccaaatgctggaagactggaggaacgtggacctgaacagcatcaccaagcaaaccctttacaccatggaagactctcgcgatgagcaccggaaactcatcacccaatgtaagctgtcccaccagggattgttgtcttctgtgaatatatgttcatgtcccggtgaacaagggcttccaacatgcagactgcaggtatactgctccaaatatcaaccccatgtaggcaggatgtttgatcttggtactcttgtgcggcccagttcctaacaggccacggtccggtactggccctggggttggggacccctgggttaaaggattcagtccaagatctgagcaagtcatttaacctcttgggcctcaattttctcacctggaggc

SEQ ID NO: 13852 - DNA, 495 bp, Homo sapiens
  SIMILAR (468)..(259): 321254mologous to Homo sapiens Human LYST interacting protein LIP10,accession number Y32130,Smith-Waterman Score=100.
tccttgcactttctcaggaggttacagagctttgcagcaagattaagttccaggctgagctgctgtgcccatctgactgttgaacactatattacaccagacattttaaatgactcccacaaataactgggaaccctgatactttctcccaaagaatcatctaactcatttagcttggctagtcgcagcagtatctgcatattttccttagttgtcacaggaactaaaacctttttgtctctggagagaatgcggagtacttcccaggcaggacacttgacatgttgttgggatgtcctttataaggactttaaatatgccttcacagagtttctttcttttatcttcatctgttgattcaaatttgaaagtagccctatgcttgtcgctgtaatccctcaggacccgctcgatagcccctgcttcgccggcccggacgatgtagagggcgcgctcctcatccatggccgcaggtgcgggggagccgcggccgct

SEQ ID NO: 13853 - DNA, 2457 bp, Homo sapiens
  SIMILAR (1726)..(2112): 1001254mologous to Homo sapiens unnamed protein product,accession number AK001482,Smith-Waterman Score=646.
acggaaggcacagaaggcagacttcgctcagcacaaaagaatttctgataaccatactgggcaaaatgaactgggctgccttcggaggggtctgaattcttcatcccagaaggcattcagatagattcgagatgcccactaagcagaaatatcacggaatggtaccattactatggcattgcagtgaaagaaagctcccaatattatgatgtgatgtattccaagaaaggagctgcctgggtgagtgagacgggcaagaaagaagtgagcaaacagacagtggcatattcaccccggtccaaactcggaacactgctgccagaatttcccaatgtcaaagatctaaatctgccagccagcctgcctgaggagaaggttcaaagtttccttctgcacttttggcaaggaatgccgccccacatgctgcctgtgctgggctcctccacggtggtgaacattgtcggcgtgtgtgactccatcctctacaaagctatctccggggtgctgatgcccactgtgctgcaggcattacctgacagggagaaaggtcttggtggaacttcatgctttttccacagcaacagctgttcccttcctccaaacatgtacctctcagaaaggcttcttctgtcctcctgtcctgtccccagtcttcctcatgaacacctggtaactgctgttatcaccgttgttgcagttgtaacagcatcactgctgatgggcattcagggagctacgagtgtggagttaagatgtaggagaagggctgaagctggagctgtagacttggcagccagccgcacaagagggaggaaaagtgtgtccctagaagtggaggacagaccctggcatcccagcctagggaaggaaagaggtggagggaaagcggaggaaggaggtcgagctgcaggtatacacccacagaggacagtatgtcaagaaggcatagatgctgcaggagatggagtcagttggggcttagggaggcatctcttagagcaggtgatcaggagcttaactcaggtgattcgaaagtttgccaagcaactggatgagtggctaaaagtggctctccacgacctcccagaaaacttgcgaaacatcaagttcgaattgtcgagaaggttctcccaaattctgagacggcaaacatcactaaatcatctctgccaggcatctcgaacagtgatccacagtgcagacatcacgttccaaatgctggaagactggaggaacgtggacctgaacagcatcaccaagcaaaccctttacaccatggaagactctcgcgatgagcaccggaaactcatcacccaatacgtagctcttgttaaatacaactgcagtgatgcgtgtggggttctcctttgtttgacagtatatcaggagtttgaccatctcttggaggagcagtctcccatcgagtcctacattgagtggctggataccatggttgaccgctgtgttgtgaaggtggctgccaagagacaagggtccttgaagaaagtggcccagcagttcctcttgatgtggtcctgtttcggcacaagggtgatccgggacatgaccttgcacagcgcccccagcttcgtaaatgaggtccagagacaagtaacttgccaaggccacaattgttcagaagaagagccaagatttgcatacaaacaatttaaattcagaacttctactcttaattaccacactgatttggttttagagtctatgaaactctgtgaaggcatatttaaagtccttataaaggacatcccaacaacatgtcaagtgtcctgcctggaagtactccgcattctctccagagacaaaaaggttttagttcctgtgacaactaaggaaaatatgcagatactgctgcgactagccaagctaaatgagttagatgattctttggagaaagtatcagagttcccagttattgtggagtcattaaaatgtctgtgtaatatagtgttcaacagtcagatggcacagcagctcagcctggaacttaatcttgctgcaaagctctgtaacctcctgagaaagtgcaaggaccggaaatttatcaatgacattaagtgctttgacttgcgcttgctcttccttctgtcactttttgcacacccgacatcaggtcacaattgcgctatgagctccagggactaccgctgctaacgcagatcttggaaagtgcctttagcatcaagtggaccgatgagtatgaatcggccatagaccataatggacctcctctctcacctcaggagacagactgtgccattgaggccctcaaagctctcttcaatgtgacggtagacagttgggaaggtgcataaagagagtgattctcatcagttccgtgttaatgggcagctgtccttcgtcattgtttactaatcgtaggtccaacttgaaggacaaaacaggaggagcttacacaggtgggctgctgagccctaa

SEQ ID NO: 13854 - DNA, 1908 bp, Homo sapiens
  SIMILAR (1)..(579): 961254mologous to Escherichia coli K12 aerotaxis sensor receptor, flavoprotein,accession number AE000389,Smith-Waterman Score=973.
atggtgcgtcacccggatatgccaaaagcgacgtttgcggatatgtggttcaccctgaaaaaaggggagccctggagcggcatcgtgaaaaatcgccgcaaaaatggtgaccattattgggtgcgggccaatgcggtaccgatggtgcgcgagggaaaaatcagtggctatatgtcgattcgtacccggacaacggatgaagagatcgcggcggtggaacagctgtacaaagcgttgaacgccggacgtaccagtaagcgtattcataaaggcctggtggtgcgtaaaggctggctgggtaaactgccttcattacccgttcgctggcgggcgcgtggagtgatgaccctgatgtttatcttgctggcggccatgctttggtttgttgctgccccggtggtgacgtatatcctctgtgcattagtggtattgttggcaagcgcctgttttgaatggcagattgtgcgcccgatagaaaatgttgcccatcaggcaaagaaggtggcgaccggagaacgtaatagtgttgagcatatgaatcgcagcgatgagctggggctgacattacgtgcgcacgggaacagtacctcgtccgctgtagtgtggatcggcgtggagataaagctgatacagaaattcattttgatagagcgtgtctccggttgctcccggaaaactgtcatcaaaggtccaaccgttttccagcatcagcgggttcactacggaaacggaaataaacggttccagtcctttgagtttgcgcatgatcagcgtgcgcaaaaacgaggagcttcctcctcgttttttatcgttaagtatagcgcgtgcttaccactttttattcagcaggcggtcgatgctatacgcgcccggaccggtaattgccagcagcaggaatccgccagaaattgtcaggtttttcatgaacatcagcgagttgacgccttcagcaaaggaaaagaaccgcctaaatgcacagtagagaagcacagtcacattgaaccaaagaaccacgcgcttcaagaactccaaacctccttgcgcaagaaccaacacgagtcccagaccgccaggtgtaacacgagagcaaacgtcaatgcgaacatgaaattcaagcccaacacaagcgaagtgcccccaaccagtaaaacgcgtactgtccgagttcccaccaagaaactaaacaccacccgcaacggagaacagcccgaacaatctaaaccgccacgatttaggcccggagaaaaccggccattagcacaattaacccgcaccacctgcatgcagcatagtacgaatgcgcagaaagctgccgtcgacaaacgctgtaattaccagcgccgaaacagtgccaggcaagtcgcaggctgggatcaaacaagacggtgcaaagccttaaaactgctggtgctgtggcgtagtgatgaagatgcgcagcaacgtctggatatggtgaaagagttcaacgaactgtgccactcacacggtctggtaagcatcattgagccagtcgtccgcccaccgcgtcgtggcgataaattcgatcgcgaacaagcgatcatcgatgccgccaaagagctgggcgacagtggcgctgacctctacaaagttgaaatgccgctttatggcaaaggtccgcaacaagagcttctctgtgcttcacaacgtctgaatgaccatatcaatatgccatgggtgatcctctcttccggtgtcgacgaaaaactgttcccgcgtgccgtacgcgtggcaatgacggcgggcgcatcgggattcctggcaggccgtgcagtctgggcatcggtcgtcggtttaccagacaacgagctgatgctgcgtgacgtttgcgcaccgaaattacaacaacttggcgatatcgtcgacgaaatgatggctaaacgccgctaa

SEQ ID NO: 13855 - DNA, 800 bp, Homo sapiens
  SIMILAR (138)..(779): 1001254mologous to Escherichia coli K12 putative aldolase,accession number AE000464,Smith-Waterman Score=1105.
atgctggcggtcgatcagcgcgaagccatgcgcatgatgtttgccgcggctggggcacccgctccggtagccgatagcgttttaactgatttcaaagttaacgctgcaaaggccctctcgccttatgcctccggcgaattctggtagatcaacaattctgctaccgccaggtggttgagcaaaacgcgattgccaaaagttgcgccatgattgtcgccgccgatgagttcattcctggcaacggtattccggtcgatagcgtggttattgaccgcaaaatcaatccgctacagatcaaacaagacggtggcaaagccttaaaactgctggtgctgtggcgtagtgatgaagatgcgcagcaacgtctggatatggtgaaagagttcaacgaactgtgccactcacacggtctggtaagcatcattgagccagtcgtccgcccaccgcgtcgtggcgataaattcgatcgcgaacaagcgatcatcgatgccgccaaagagctgggcgacagtggcgctgacctctacaaagttgaaatgccgctttatggcaaaggtccgcaacaagagcttctctgtgcttcacaacgtctgaatgaccatatcaatatgccatgggtgatcctctcttccggtgtcgacgaaaaactgttcccgcgtgccgtacgcgtggcaatgacggcgggcgcatcgggattcctggcaggccgtgcagtctgggcatcggtcgtcggtttaccagacaacgagctgatgctgcgtgacgtttgcgcaccgaaatcgggagaaccaatcctatag

SEQ ID NO: 13856 - DNA, 2061 bp, Homo sapiens; identical to SEQ ID NO: 8840
  SIMILAR (890)..(3511): 461254mologous to Homo sapiens mucin,accession number J05582,Smith-Waterman Score=1171.

SEQ ID NO: 13857 - DNA, 1779 bp, Homo sapiens
  SIMILAR (400)..(1821): 951254mologous to Homo sapiens putative p150,accession number U93572,Smith-Waterman Score=2319.
ttaaacgggaacataagttctgcgaatgcccacggggcggagtatcggtacgaacgcagacccgcttttgaaaatgcgcacacggttctgctgacggttctggttgtacaccacggttgccagcaggccagtccacagagaaagacgcattgctgacatttcaacagagatcgggcttggcagcagtaaggcttcaacgcctggatggatcatctgctgcactttcggatcaacgaagctgtaggtgatcacttcctgatagcctttgtcgttgagcagcgttttcacgcgcttgagcgacaggtcagcttcacggtgagtacccataatcaggcttgcctgtaccggctcatccgggatgttgttgtagccgtaaacacgcgcgacttcttcaaccagatcttcttcaatctccatatcgaaacgccagctcggcgcaactgcctgccattcgtctttgccttcggtcacttcgcagccgagacgacgcagaatgtcagttacctgctcatccgcaatatgatggccgatcaggcgatccagtttgctacgacgtagagtgatggttgcacgcttcggcagcgttgcttcgttggtgatatcaattaccgggccagcctcaccaccgcagatgtcgatcagcagacgggtcgcacgttccatcgctttgtgctgcagtgccggatcaacgccacgctcataacggtgagacgcatcggtatgcaggccatgacgacgagcacgaccggtgatagacagagatcctggcagattgcgatggatggtagccagaaattgccacagcggatgttggattctgttcgctggcatctggcgcatgacagcaagttcgatctgctggcgctgggcgtcgcgggttggatgcgttatgtcggtggtgttgatgaacagggaaatccgatagaaatcagtgacccactgctcaatcgcatggctgcgaatcgcttcgttcacatcacgcagttgcccgttatctaccgcgccttccggaatagctttacccaggtcgcccggttgcagctctgccataaacggtttcagcaacggcacacaagcgtaagagaacagatagttaccgtactcagcggtatcagagataaccacgttcatttcgtacagacgcttacgggcgatggtgttggcaatcagcggcagctcgtgcagtgattcataatatgcagactcttcaatgatgccggaatcgaccatggtttcgaacgccagttcaacgcccgctttcaccatcgcaatcatcagtacgcctttatcgaagtactcctgctcgccgattttgccttcatactgcggcgcggtttcaaacgcggttttgccggtctcttcacgccaggtcagcagtttcttatcatcgttggcccagtccgccatcataccggaagagaattcgccggagatgatgtcgtccatatgtttctggaacaggggtgccatgatctctttcagctgttcagaaagcgcataagcacgcagtttcgccgggttagaaggatcctctagatcactcgcgcactggcctctctttgtctctctccttgtcttgtgcgcgtttcgtttgtccccggtccgttgggttgcaggatcttcctttgggacccgtaaaattcggatctcatagttttgggcccattcgtatcgactggtaattcggctgccaccgaacaacctttgcggcaaaaccaggtaattggtgtcgatatcaaccaacagccgcttgataccatcaatcgtggcgaaatccat

SEQ ID NO: 13858 - DNA, 933 bp, Homo sapiens
  SIMILAR (550)..(2007): 941254mologous to Homo sapiens putative p150,accession number U93572,Smith-Waterman Score=2397.
ctactgcgcaaaagtgtcagcgttattattaaaggcacgattaaaaccataattggtttcatgttgttgcaggcagggtccggcatcctcaccagcaccttcaaaccggtggtggcgaaaatgtccgaagtctacggcattaacggcgcaatttccgatacctacgtgatgcaggacgggtgagccccagaattggggcttagcccaggcaggttcttgcgacatgacaccgattttgtcctgcagctcggcatagtcatggtcaggcttgcgggagatggcagtctcaatatcaatgcccaggcgaataattaattccgggcgatattgcgccatttgttggtataaacgccgttcgcgctgcgccagaaacatgctgattttcccggtcgcacgttcgacgccaatccccggtccatcataataaaagcccgaaatttcagcctgcgggaagcgatcgctgaccaccagaacgccactttgcgccagtcgctgaaccttgcgtagattcgccattcttcgcagcgagaagcagtacataatcaccgccgcccatagcgccggagatttggttttcatgctttgggttttcgaggatttggccgccagtcgccgttccagccagacgccaaccaacggcaatcgtttgattttgtcgccgtcttcgccggagagcagccccagatagcgccgctcggtttgccagtgttgttgcagcgatttcaccaggtcggtggtcagtgtggatttaccggtgccatcacacccgaccaccgcaatcagccccggaatgtagttgggtttagggttgactcctagaggatccccgctgcaactatgccggccgctcatctcgaacgggtacagcttcagcacgcgcgcggcgttttccagccccaccgcttctagtggcagcggtaagcgtagcgtcat

SEQ ID NO: 13859 - DNA, 4258 bp, Homo sapiens
  SIMILAR (193)..(1866): 951254mologous to Homo sapiens putative p150,accession number U93563,Smith-Waterman Score=2780.
ccgttccggatttcccgggtcgaccatttcgttgcaaggcccaagaagcccatcctgggtaggaaattgcattggggaaccctgtgcggattcttgcggctttggccctatcttttctatgtccaagctgtgcccatccaaatagtccaagatgacaccaaaaccctcatcaagacaattgtcaccaggatcaatgacatttcacacacgcagtcagtctcctccaaacagaaagtcaccggtttggacttcattcctgggctccaccccatcctgaccttatccaagatggaccatacactggcagtctaccaacagatcctcaccagtatgccttccagaaacgtgatccaaatattcaacgacctgggagaacctccgggatcttcttcacgtgctgggccttcttttaagagctgccacttgccctgggccagtggctggggagaccttgggacagctgggggggtattctgggaagtttcaggttattccacagaggtggtggccctgagcaggctgcaggggtctctgcaggacatgctgtggcagctggacctcagccctgggtgctgaggccttgaaggtcactcttcctgcaaggactacgttaagggaaggaactctggcttccaggtatctccaggattgaagagcattgcatggacaccccttatccaggactctgtcaatttccctgactcctctaagccactcttccaaaggcataagaccctaagcctccttttgcttgaaaccaaagatatatacacaggatcctattctcaccaggaagggggtccacccagcaaagagtgggctgcatctgggattcccaccaaggtcttcagccatcaacaagagttgtcttgtcccctcttgacccatctccccctcactgaatgcctcaatgtgaccaggggtgatttcagagagggcagaggggtaggcagagcctttggatgaccagaacaaggttccctctgagaattccaaggagttccatgaagaccacatccacacacgcaggaactcccagcaacacaagctggaagcacatgtttatttattctgcattttattctggatggatttgaagcaaagcaccagcttctccaggctctttggggtcagccagggccaggggtctccctggagtgcagtttccaatcccatagatgggtctggctgagctgaacccattttgagtgactcgagggttgggttcatctgagcaagagctggcaaaggtggctctccagttagttctctcgtaactggtttcatttctactgtgactgatgttacatcacagtgtttgcaatggtgttgccctgagtggatctccaaggaccaggttattttaaaaagatttgttttgtcaagtgtcatatgtaggtgtctgcacccaggggtggggaatgtttgggcagaagggagaaggatctagaatgtgttttctgaataacatttgtgtggtgggttctttggaaggagtgagatcattttcttatcttctgcaattgcttaggatgtttttcatgaaaatagctctttcaggggggttgtgaggcctggccaggcaccccctggagagaagtttctggccctggctgaccccaaagagcctggagaagctgatgctttgcttcaaatccatccagaataaaacgcaaagggctgaaagccatttgttggggcagtggtaagctctggctttctccgactgctagggagtggtctttcctatcatggagtgacggtcccacactggtgactgccatcttcagagcaggggtccttggtgtgaccctctgaatgggtccagggttgatcacactctgggtttattacatggcagtgttcctatttggggcttgcatgccaaattgtagttcttgtctgattggctcacccaagcaaggccaaaattaccaaaaatcttggggggtttttactccagtggtgaagaaaactcctttagcaggtggtcctgagacctgacaagcactgctaggcgagtgccaggactccccaggccaggccaccaggatggcccttcccactggaggtcacattcaggaagatgaaagaggaggtttggggtctgccaccatcctgctgctgtgtttttgctatcacacagtgggtggtggatctgtccaaggaaacttgaatcaaagcagttaactttaagactgagcacctgcttcatgctcagccctgactggtgctataggctggagaagctcacccaataaacattaagattgaggcctgccctcagggatcttgcgttcccagtggtcaaaccgcactcacccatgtgccaaggtggggtatttaccacagcagctgaacagccaaatgcatggtgcagttgacagcaggtgggaaatggtatgagctgaggggggccgtgcccaggggcccacagggaaccctgcttgcactttgtaacatgtttacttttcagggcatcttagcttctattatagccacatccctttgaaacaagataactgagaatttaaaaataagaaaatacataagaccataacagccaacaggtggcaggaccaggactatagcccaggtcctctgatacccagagcattacgtgagccaggtaatgagggactggaaccagggagaccgagcgctttctggaaaagaggagtttcgaggtagagtttgaaggaggtgagggatgtgaattgcctgcagagagaagcctgttttgttggaaggtttggtgtgtggagatgcagaggtaaaagtgtgagcagtgagttacagcgagaggcagagaaagaagagacaggagggcaagggccatgctgaagggaccttgaagggtaaagaagtttgatattaaaggagttaagagtagcaagttctagagaagaggctggtgctgtggccagggtgagagctgctctggaaaatgtgacccagatcctcacaaccacctaatcaggctgaggtgtcttaagccttttgctcacaaaacctggcacaatggctaattcccagagtgtgaaacttcctaagtataaatggttgtctgtttttgtaacttaaaaaaaaaaaaaaaagtttggccgggtgcggtggctcacgcctgtaatcccagcactttgggaggccaaggtggggggatcacaaggtcactagatggcgagcatcctggccaacatggtgaaaccccgtctctactaaaaacacaaaagttagctgagcgtggtggcgggcgcctgtagtcccagccactcgggaggctgagacaggagaatcgcttaaacctgggaggcggagagtacagtgagccaagatcgcgccactgcactccggcctgatgacagagcgagattccgtcttaaaaaaaaaaaaaaaaaaaaagtttgtttttaaaaaaatctaaataaaataactttgccccctgctctttgtttcctgtcgccgttcctggaggggcttcgggagagctgtttgtgtgtgacagggcaaggcctggctggcccccatccatcactggggtcacgctccgccccaggcttggccacagccagccgccagttattcaggcaaaaggattaccctgtaaagaaaacagagctgggtttggacgctgagaggactgggaaacaggttgcagggaggcacaggaagcacacaccaagagccagagagaggcctctgtgccatcccaaggaatgaggacaaagagaggggtcctcgggaagaagggatccactttggagaggccccttaacacgggacagagcaaggacagaaagaggcatccactgggatggaagaaggacaggatccacaggggaaagagggatgaggggaatgaagagagaagaaataaagagttcagcatcacctcatgatgcaactaatttggcacaatgcccagcacaatgtacccctccattctgatttggtggccagaagaattgagattcttgggccaggcacgatggctcatgcctataatcccagcactttggaaggtcaaggtgggtggatcacttgagaccaagagttcgagacaagcctggccaacatagcaaaaccccatctctactgaaaatacaaaaagtagccaggcatggtggcacgtgcgtgtaatcccagctacttggcaggctgaggcaggagaatcgcttgaactcgggaggcagaggtggcagtgaaccgagatcatgccactgcactccagcctgggtggcaggtgagactctgtctc

SEQ ID NO: 13860 - DNA, 2810 bp, Homo sapiens
  SIMILAR (1846)..(3249): 961254mologous to Escherichia coli arginine decarboxylase,accession number M93362,Smith-Waterman Score=2439.
tgcgggcgttgcctgtgaacctttccgccagtgggtaatagaagataactttgttgccggacgtccggaatgggaaaaagcgggagccgaactggttagcgatgtgctgccttatgaagagatgaagttgcgcatgctcaacggcagtcattcattcctggcgtatctggggtatcttgcaggatatcagcacattaatgactgtatggaagatgaacattatcgttatgcggcgtatggcttgatgttgcaggaacaagcgccgacgttgaaagtgcagggcgttgatttgcaagattacgctaaccgattaattgcacgctatagcaacccggcgttacgtcatcgaacctggcagattgcgatggatggtagccagaaattgccacagcggatgttggattctgttcgctggcatctggcgcatgacagcaagttcgatctgctggcgctgggcgtcgcgggttggatgcgttatgtcggtggtgttgatgaacagggaaatccgatagaaatcagtgacccactgttccctgttattcagaaggctgtacaaagtagtgccgaagggaaagcgcgcgtccagtcattgctggcgattaaggcgatctttggtgatgatttgccagacaatagtttgtttactgcaagagtgacggaaacttcatgccgagacgaatcacgtccagtggtgccactttctcttcacaaccttcaacaactacggtttttccgcggcggatttgctcagcggtcagaccttcagtatcaatcgacaggatcttgcagtgtgaccggtgccgctaaccataacacggctgcacatgttgatttccgtaacggtacgatccagtcagtctcctccaaacagaaagtcaccggtttggacttcattcctgggctccaccccatcctgaccttatccaagatggaccagacactggcagtctaccaacaggtcctcaccagtatgccttccagaaacgtgatccaaatatccaacgacctggagaacctccgggatcttcttcactcatacggcggctgccagttcagggtatacatcgcatctccttattcatccgctttcagcataaacgttattcagacgctgcgcttaactttcatattccggttgtcgcgacggcaacatttcgctaaagtcacgccccttcttcaccggcatggggattatttcgtgtttattggttttgattacggtacagcaaactgttcagtggcggtcatgcgtgacggtaaaccgcatttgctaaaaatggaaaacgacagcacgctgctgccttcaatgctttgcgcgccaacgcgtgaagcggtaagcgaatggctgtaccgccatcatgatgttccggcagacgacgatgaaacgcaggcgctgttacgtcgggcgattcgttataaccgcgaagaagatatcgatgttacggcgaaaagcgtgcagttcggtctttcctcactggcacagtacattgatgatccagaagaagtgtggtttgtgaaatcaccaaaatcgttcctcggtgccagcggcttaaaaccgcagcaggtagcgctgtttgaggatctggtctgcgcaatgatgttgcacattcgccagcaggcgcaggcacagctgccagaagcgattacatcagcgcccaactacattccggggctgattgcggtggtcgggtgtgatggcaccggtaaatccacactgaccaccgacctggtgaaatcgctgcaacaacactggcaaaccgagcggcgctatctggggctgctctccggcgaagacggcgacaaaatcaaacgattgccgttggttggcgtctggctggaacggctcatgcctgtaatatcatctctatccgaggctatggcagtgatgaagatgcgcaaacgtctggatatggtgaaagagttcaacgaactgtgccactcacacggtcttgtaagcatcattgagccagtcgtccgcccaccgcgtcgtggcgataaattcgatcgcgaacaagcgatcatcgatgccgccaaagagctgggcgacagtggcgctgacctctacaaagttgaaatgccgctttatggcaaaggtccgcaacaagagcttctctgtgcttcacaacgtctgaatgaccatatcaatatgccatgggtgatcctctcttccggtgtcgacgaaaaactgttcccgcgtgccgtacgcgtggcaatgacggcgggcgcatcgggattcctggcaggccgtgcagtctgggcatcggtcgtcggtttaccagacaacgagctgatgctgcgtgacgtttgcgcaccgaaattacaacaacttggcgatatcgtcgacgaaatgatggctaaacgccgctaagatgaggataaaaggaatgaaatggtttaacaccctaagccacaaccgttggctggaacaggaaaccgaccgcatctttgattttggtaaaaattccgtagtgccgactggttttggctggttaggcaataaagggcaaatcaaagaagagatgggcacccatctgtggatcaccgctccagctgactacggcggcccgcgcggctcactccccgcagttcgtcccgtgcgcgaccggagcctggagtttgcaaaacagagcgatgagcacattctggacttagtgcacgacttggcgagcaatgatgaatgcaagacaatctgcgcgcgacatatgactgcgtgtcgcccctggaagcgtgttaagtataaaatggataacaattacgaccacgatcaacataacatggtggatgatgaagagctggctgaaaacatctga

SEQ ID NO: 13861 - DNA, 921 bp, Homo sapiens
  SIMILAR (291)..(920): 391254mologous to Homo sapiens phosphomannomutase,accession number D87810,Smith-Waterman Score=240.
gagctgcctgccagtcccgcgccgtgcgcccgtactcctcaacccttgggtggtcgatgggaggcagcccgcaggaaggagcgcgtcctctgcctgtttgacgtggacgggaccctcacgccggctcgccaggtaggaccctgaagattggaagctcccaccgggagtgtcacgcggacacccccgaggctgagtgtggggtctgcagcagcgtgaccgaagtgagggctaagtggaggtcccagacatgttgaaagccagaatgctatgcttcccctctccccccatagaaaattgaccctgaggtggccgccttcctgcagaagctacgaagtagttacttgcccgtggggtcacagacgtggtctcacactctttcttcctcctgtcctctatgtgaccctgaagtcattgggagagacactgtgcctgtctcagggtcaggcagcccaggccacgctcagagccctgtgttccttggccagaccatccagaaccacctggggccaggtggggctagatttgaattcagggccgttctggttctctctggctccccgccctccctcaccaccagtggaaccttcatcgagttccggaatggcaactgtgtgcccagccagggcctggcacacagcaggtcctctgagctgccatccgctccctcccctctgcagaaagaacaagcagcccttctgttagccttgtctgcccctcccagcagggaataacagtccccacccctgcccacaggaggcatgatcagctttgacgtcttccccgagggctgggacaagcaggtccgtagcagccaatgtggagagggactccacctaaatatccctcctctgcccatcctctgtgtgcagggtgggaacgactttgagatctttgccgacccccggactgttggccacagcg

SEQ ID NO: 13862 - DNA, 567 bp, Homo sapiens
  SIMILAR (58)..(123): 431254mologous to Homo sapiens EAN57,accession number Y11142,Smith-Waterman Score=45.
tcagtgattccttctggcttgtatcagtttcctggctacgacataacacctcatctgatacattttggatatttgtccctgccaaatcttatgttgaaatgtaacactcagtgttggaagtggggccctggtgggaggtgtttgggtcgtgggggcagattcttcacagcttggtgtcctcacaccatgtgagacactggcttctcccttcaccttctgccatgactgagagctccctgacgtttcagcagaagccaagcagatgccagcaccatgcttcctgtaaagcctatcactctcatcagctgctgctggtacccaccgctggaagactagaggacaggtcacatcactagatcccttgcaaacattctccagcaccagcatggagtctggcagctccagtgggtaactagatccagaaaagcagcaggattcacagtagtctggccctgagggactgccattcctcacacattcagctgtctgcgataatatcacattgtcagagatatctttagtcctaaccctttctgaagtagcatctcctccttcattatcatacat

SEQ ID NO: 13863 - DNA, 576 bp, Homo sapiens
  SIMILAR (307)..(573): 771254mologous to Homo sapiens reverse transcriptase homolog= pol {retroviral element},accession number S61070,Smith-Waterman Score=331.
atgcctcaggactggtgtggtgaagacgctgtgcttcagccgctggacgttaggaatggcagtccctcagggccagactactgtgaatcctgctgcttttctggatctagttacccactggagctgccagactccatgctggtgctggagaatgtttgcaagggatctagtgatgtgacctgtcctctagtcttccagcggtgggtaccagcagcagctgatgagagtgataggcaccagggatacagctgtgaacaaagccagcaacgtcccttcttttggagcttaaattctagtggaaggggacagcaagccaaactcattgccttaactcgagccctcactcttgcaaaggaattgcatgtcaatatttatgctgactgtaaatatgccttccatatcctgcaccagcatgatgttatatgggctgaaagaggtttcctcactgtgcaagggtcctcctccatcattaatgcctctttaataaaaactcttctcaaggccactttacttccaaaggaagctggagtcatacactacaagggccatcaaaaggcatcagctcccatcgcttag

SEQ ID NO: 13864 - DNA, 1098 bp, Homo sapiens
  SIMILAR (2674)..(3750): 911254mologous to Escherichia coli K12 putative glycosylase,accession number AE000396,Smith-Waterman Score=1645.
gctgaggctctccctgtccagttctacttccatctttcagacattcgaggtatgctgcttcatgagccagacctccagaaaggcattaaagcagtttcccaagaggatccccaatggagctatcaggcagattccccaggtatagctaggcgagattatatggtttcccgcctagttgaagggcttaaaaaggcagcttacaaagctgttaattatgacaagcttaaaaaaactacccaagttaccattgttcctggcccggacttcaatctggcctcccacattattcctgataccacacctgacccccatgactgttatctctctgatacacctggcattcactccatttcccatatttccttctttgctattcctcaccctgatcacacctggtttattgatggcagttccaccacgcctaatcgccacacaccagcaaaggcaggctatgctatagtaccttccacatctatcattgaggctgctgctctgccgccctccgctacctctcggcaagccaaactcattgccttaactcgaaccctcactcttgcaaaggaattatgtgtcaatatttatactgactctaaatatgccttccatatcctgcaccaccatgctgttatatgggctgaaagaggtttcctcactaagcaagggtggtccaacattaatgcctctttaataaaaactcttctcaaggccactttacttccaaaggaagctggagtcatacactgcaagggccaccaaaaggcatcagatcccatcgctcagggcaacacttatgctgataagatagctaaagaagcagctagcggtccaacttctgtccctcatggccagtttttctccttctcatcggtcactcccacctactcccccactgaaacttccacctatcaatctctttccaaacaaggcaaatggttcttggaccaaggaaaatatctccttccagcctcacaggcccattctattctgtcatcatttcataacgtcttccatgtaggttacaagccactagccaacctcttagaacctctcatttcctttccattgtagaaatatatcctcaaggaagtcacttctcag

SEQ ID NO: 13865 - DNA, 537 bp, Homo sapiens
  SIMILAR (410)..(366): 601254mologous to Homo sapiens platelet glycoprotein IIb,accession number M22569,Smith-Waterman Score=52.
ctactccagggacccctgtttaggttcttctggattgcgggaagggaactggacttccagaagtcgcccaatgggagctaaaggaaccaccttgagcaggtgtgcaagatgtagccacaaggagacataagtgcctactgtcttcctggatttcccagtcactggagaaagtcgccagctgctgcccttgcgaacagtttgaaaactggaaaaggctagaaaacatccttctgttctcttgagtgtctgggaagatggcatcttggaaattgactccgtgagcaagaggttataattttcatccatcctcggccgagtagaagaggccccctggccggcgtggtactgccagtgcaggtggttgtagaggccgagcgcctcggggtgcagcggcagcaccctggcgtacacgatggtctcggccagctcgcgcggcagccctcgctcaggggcctccactcggagtgcagctggcaggcgcgccgggcgctggggacccgccaggcagagcgcggcgagcagcacgtggcgcagcat

SEQ ID NO: 13866 - DNA, 1318 bp, Homo sapiens
  SIMILAR (28)..(822): 991254mologous to synthetic construct aceA,accession number A31763,Smith-Waterman Score=1381.
ggagcacctcactttgagttcagagacattagaaacaattactcagcaaacaagaagttagactaatagcaatggctgagagattgctcagtttctctcaaatttaggaaagcaatcctgatgaacccatggcaaggccgaatcaaagcagttgcccccctgtgttaaacgcgaacccataggtatcatccttcaactctttgtagctggtgttggaaatcaggtataatttatcttgtttaattacctgctgccctgctcctaattccctcccctgtgatgaagcttaatgaaaatcttcaacctgccctcaagctgggaaaggaaaaatgctggctggaatagggaggccctgcacgtgctgaattttcaaggcatcttggatgcaaaggccaccatccccttcccaaagatgtggccagtgaggtgccagcaggttccagcaccagcgtcagctcactcatcaggactaatggttgtcctggactggggagctgggaaccaccctgatttttttctgaaaataaaaggctaagcacgttgatgtcttttacactaagagattctaaaatgttctctccccagtcagggctctttctgggctgctctgcaggcgagcattcagcactcagggatcccactgcctctggactgccaggcactgcgtctggggtcaggccaggaaggggcagcgcgtggggtctgacattgaggccagcacccaaggggaaagcaagccttgcattttatccatttagactctaccaaatgcgtgattaaaaacaaaaactcttacaccccttgaaatagctgcatgtacgaaccctcactcattctcaattaccgccaggattggccctgcacacctggcagcccccaggcccgttacccccgcaggtagggggggcgcacgggcccccgggcgttgatgtgcggcagcgcgcccgccgccagcttctcaatgagtttctggttcgccagctccaggtggcggcccttcttacgcgcctgccgcaaggacctcttgaccttcttcactcgctcccggagcaaaacggttgcgcttctccagggtggccactttctgttgcagtttcttggcgtggtcctcctcctcgaacaaggccttctgcacctaggagcacatgagcctactgtcttcctggatttcccagtcactggagaaagtcgccagctgctgcccttgcgaacagtttgatagctggaaaaggctagaaaacatccttctgttctcgtgagtgtctgggaagatggcatcttggaaattccctccgtgaggcaagaggttataattttc

SEQ ID NO: 13867 - DNA, 480 bp, Homo sapiens
  SIMILAR (1113)..(502): 981254mologous to Escherichia coli O157:H7 isocitrate lyase,accession number AE005633,Smith-Waterman Score=1044.
atgacctgcctgcatgagcgggcgcgcatcgagaaggcgtatgcgcagcagctcactgagtgggcccggcgctggaggcagcttgtggagaaagggccccagtacgggaccgtggagaaggcctggatggccttcatgtccgaggcagagagggtgagcgagctgcacctcagggtgaaggcctcactgatgaacgatgacttgaggaagatcaagaactggcagaaggaagcctttcacaagcagatgatgggcggcttcaaggagaccaaggaagctgaggacggctttcggaaggcacagaagccctgggccaagaagctgaaagaggtagaagcagcaaagaaagcccaccatgcagcgtgcaaagaggagaagctggctatctcacgagaagccaacagcaaggcagacccatccctcaaccctgaacagctcaagaaattgcaagacaaaatagtaaaagtgcatgaatttaaa

SEQ ID NO: 13868 - DNA, 1263 bp, Homo sapiens
  SIMILAR (623)..(1195): 1001254mologous to Escherichia coli coproporphyrinogen oxidase,accession number X75413,Smith-Waterman Score=1075.
acttctagtgaggatcctgaactcccagtgacatggcattcaggaactcattctccctgtaggtagaagcagcaaagaaagcccaccatgcagcgtgcaaagaggagaagctggctatctcacgagaagccaacagcaaggcagacccatccctcagacctcaagcccatacatatgccctttctccactgttcctcactgctatgccgtcggtgtagcaaggggaacacgtcatctacacgagagttcgtcactcagaccaagtgtcagaatcctctgggaaacccctctcactcccattgctggagccaggaatctgggcttttgaagcagcccaggtgcctccacggtgggatcaggtgaggagcctggaaccaactactgagtgggaggcacctgggctcaagaagcgcagggtgagccaagggctaaatggaaatgaacctctgtcttgtgcctggattttcctttagaccaaagagaagtatgagaagtccctgaaggaactcgaccagggcacaccccagtacatggagaacatggagcaggtgtttgagcagtgccagcagttcgaggagaaacgccttggctgggacaaagggtagctggcccctgccttctaaaagagccacgtttctctctgatttagctacaaagccatttaccatgacctggagcagagcatcagagcagctgatgcagtggaggcagacgtggcttccagcaagtagtgaacctttggtttctctccctcggcacctgttgcctaggagtggtccgcagacctgaatcgaaccctcagccggagagagaagaagaaggccactgactgccaggaccctcacgggcccctgcagagctgggatcccctgaaagctctctctctccatagcacccttaatgtcccgagcaaccccgcccagtctgcgcagtcacagtccagctacaacccccgggggcctcacaccctctgccgccctgtgctgagggccctgtggcctcccctttcttgcagtgtgagcagctacgagaagacccagagctatcccaccgactggtcagacgatgagtctaacaaccccttctcctccacggatgccaatggggactcgaatccattcgacgacgacgccacctcggggacggaagtgctctgtagcccaccgtcggtgtcatacctctcatggagacggctccctctttgtcttgcaggggatgagctgaccaagatggaggacgaggatgagcagggctggtgcaagg

SEQ ID NO: 13869 - DNA, 485 bp, Homo sapiens
  SIMILAR (88)..(1140): 961254mologous to Escherichia coli RF-3/Tos,accession number D17724,Smith-Waterman Score=1734.
agcggccgccttcggaaccaggctgagccgccgcggcaggggctgcggggtgacagggtcaggcggcggtcggcgccgagtcccggccccgaggaggccccggtcccccctccagccccctcaccagctcctcggaggccgtcacgtcgaacaccgggttgcggaagccgaggggcgctccagccggggccgccgcctcgtgcctcctccacctgagcctccccgcgcggcgcagcagcgggcgcgccaccagcaggaccagcagcgccagcagcacggcagccgccacgccgcccgccagcccagccgcggagctgccccagacgtgtgcgcccgactcccgcatggtcgcctccaggacgccgagggcctcgccgttctcggcgacgtcgtcgtcgtggcggcagggcacgcgctcggcgtccacgaagaagaggccaggtgcctcgtccccagagcgccacaggtgcgggtcatgccaggag

SEQ ID NO: 13870 - DNA, 207 bp, Homo sapiens
  SIMILAR (205)..(2): 811254mologous to Homo sapiens Membrane-bound protein PRO1028,accession number Y66714,Smith-Waterman Score=325.
ccgcgccacagtccaggtgcgagcccacgtctgagacgccgaatccggctcctgaagccaggacgagttccccatccagcggcaggagcttgtccgccgggaactcaacggcgccgccggcgcacggggtccggttctggctccagttggctgcgacgtcgaagtccgtgttggggacccagagtttggagaccgcctgggtcagtg

SEQ ID NO: 13871 - DNA, 5754 bp, Homo sapiens
  SIMILAR (1)..(411): 951254mologous to Escherichia coli RF-3/Tos,accession number D17724,Smith-Waterman Score=665.
atgtcggccaaggtgcggctcaagaagctggagcagctgctcctggacgggccctggcgcaacgagagcgccctgagcgtggaaacgctgctcgacgtgctcgtctgcctgtacaccgagtgcagccactcggccctgcgccgcgacaagtacgtggccgagttcctcgagtgggctaaaccatttacacagctggtgaaagaaatgcagcttcatcgagaagactttgaaataattaaagtaattggaagaggtgcttttggtgaggttgctgttgtcaaaatgaagaatactgaacgaatttatgcaatgaaaatcctcaacaagtgggagatgctgaaaagagcagagaccgcgtgcttccgagaggagcgcgatgtgctggtgaacggcgactgccagtggatcaccgcgctgcactacgcctttcaggacgagaaccacctgtacttagtcatggattactatgtgggtggtgatttactgaccctgctcagcaaatttgaagacaagcttccggaagatatggcgaggttctacattggtgaaatggtgctggccattgactccatccatcagcttcattacgtgcacagagacattaaacctgacaatgtccttttggacgtgaatggtcatatccgcctggctgactttggatcatgtttgaagatgaatgatgatggcactgtgcagtcctccgtggccgtgggcacacctgactacatctcgccggagatcctgcaggcgatggaggacggcatgggcaaatacgggcctgagtgtgactggtggtctctgggtgtctgcatgtatgagatgctctatggagaaacgccgttttatgcggagtcactcgtggagacctatgggaagatcatgaaccatgaagagcgattccagttcccatcccatgtcacggatgtatctgaagaagcgaaggacctcatccagagactgatctgcagtagagaacgccggctggggcagaatggaatagaggatttcaaaaagcatgcgttttttgaaggtctaaattgggaaaatatacgaaacctagaagcaccttatattcctgatgtgagcagtccctctgacacatccaacttcgacgtggatgacgacgtgctgagaaacacggaaatattacctcctggttctcacacaggcttttctggattacatttgccattcattggttttacattcacaacggaaagctgtttttctgatcgaggctctctgaagagcataatgcagtccaacacattaaccaaagatgaggatgtgcagcgggacctggagcacagcctgcagatggaagcttacgagaggaggattcggaggctggaacaggagaagctggagctgagcaggaagctgcaagagtccacccagaccgtgcagtccctccacggctcatctcgggccctcagcaattcaaaccgagataaagaaatcaaaaagctaaatgaagaaatcgaacgcttgaagaataaaatagcagattcaaacaggctggagcgacagcttgaggacacagtggcgcttcgccaagagcgtgaggactccacgcagcggctgcgggggctggagaagcagcaccgcgtggtccggcaggagaaggaggagctgcacaagcaactggttgaagcctcagagcggttgaaatcccaggccaaggaactcaaagatgcccatcagcagcgaaagctggccctgcaggagttctcggagctgaacgagcgcatggcagagctccgtgcccagaagcagaaggtgtcccggcagctgcgagacaaggaggaggagatggaggtggccacgcagaaggtggacgccatgcggcaggaaatgcggagagctgagaagctcaggaaagagctggaagctcagcttgatgatgctgttgctgaggcctccaaggagcgcaagcttcgtgagcacagcgagaacttctgcaagcaaatggaaagcgagctggaggccctcaaggtgaagcaaggaggccggggagcgggtgccaccttagagcaccagcaagagatttccaaaatcaaatccgagctggagaagaaagtcttattttatgaagaggaattggtcagacgtgaggcctcccatgtgctagaagtgaaaaatgtgaagaaggaggtgcatgattcagaaagccaccagctggccctgcagaaagaaatcttgatgttaaaagataagttagaaaagtcaaagcgagaacggcataacgagatggaggaggcagtaggtacaataaaagataaatacgaacgagaaagagcgatgctgtttgatgaaaacaagaagctaactgctgaaaatgaaaagctctgttcctttgtggataaactcacagctcaaaatagacagctggaggatgagctgcaggatctggcagccaagaaggagtcagtggcccactgggaagctcagattgcggaaatcattcagtgggtcagtgacgagaaagatgcccggggttaccttcaagctcttgcttccaagatgaccgaagagctcgaggctttgaggagttctagtctggggtcaagaacactggacccgctgtggaaggtgcgccgcagccagaagctggacatgtccgcgcggctggagctgcagtcggccctggaggcggagatccgggccaagcagcttgtccaggaggagctcaggaaggtcaaggacgccaacctcaccttggaaagcaaactaaaggattccgaagccaaaaacagagaattattagaagaaatggaaattttgaagaaaaagatggaagaaaaattcagagcagatactgggctcaaacttccagattttcaggattccatttttgagtatttcaacactgctcctcttgcacatgacctgacatttagaaccagctcagctagtgagcaagaaacacaagctccgaagccagaagcgtccccgtcgatgtctgtggctgcatcagagcagcaggaggacatggctcggcccccgcagaggccatccgctgtgccgttgcccaccacgcaggccctggttctggctggaccgaagccaaaagctcaccagttcagcatcaagtccttctccagccctactcagtgcagccactgcacctccctgatggttgggctgatccggcagggctacgcctgcgaggtgtgttcctttgcttgccacgtgtcctgcaaagacggtgccccccaggtgtgcccaatacctcccgagcagtccaagaggcctctgggcgtggacgtgcagcgaggcatcggaacagcctacaaaggccatgtcaaggtcccaaagcccacgggggtgaagaagggatggcagcgcgcatatgcagtcgtctgtgagtgcaagctcttcctgtatgatctgcctgaaggaaaatccacccagcctggtgtcattgcgagccaagtcttggatctcagagatgacgagttttccgtgagctcagtcctggcctcagatgtcattcatgctacacgccgagatattccatgtatattcagggtgacggcctctctcttaggtgcaccttctaagaccagctcgctgctcattctgacagaaaatgagaatgaaaagaggaagtgggttgggattctagaaggactccagtccatccttcataaaaaccggctgaggaatcaggtcgtgcatgttcccttggaagcctacgacagctcgctgcctctcatcaaggccatcctgacagctgccatcgtggatgcagacaggattgcagtcggcctagaagaagggctctatgtcatagaggtcacccgagatgtgatcgtccgtgccgctgactgtaagaaggtacaccagatcgagcttgctcccagggagaagatcgtaatcctcctctgtggccggaaccaccatgtgcacctctatccgtggtcgtcccttgatggagcggaaggcagctttgacatcaagcttccggaaaccaaaggctgccagctcatggccacggccacactcaagaggaactctggcacctgcctgtttgtggccgtgaaacggctgatcctttgctatgagatccagagaacgaagccattccacagaaagttcaatgagattgtggctcccggcagcgtgcagtgcctggcggtgctcagggacaggctctgtgtgggctacccttctgggttctgcctgctgagcatccagggggacgggcagcctctaaacctggtaaatcccaatgacccctcgcttgcgttcctctcacaacagtcttttgatgccctttgtgctgtggagctcgaaagcgaggagtacctgctttgcttcagccacatgggactgtacgtggacccgcaaggccggagggcacgcgcgcaggagctcatgtggcctgcggctcctgtcgcctgtagttgcagccccacccacgtcacggtgtacagcgagtatggcgtggacgtctttgatgtgcgcaccatggagtgggtgcagaccatcggcctgcggaggataaggcccctgaactctgaaggcaccctcaacctcctcaactgcgagcctccacgcttgatctacttcaagagcaagttctcgggagcggttctcaacgtgccggacacctccgacaacagcaagaagcagatgctgcgcaccaggagcaaaaggcggttcgtcttcaaggtcccagaggaagagagactgcagcagaggcgagagatgcttagagacccagaattgagatccaaaatgatatccaacccaaccaacttcaaccacgtggcccacatgggcccaggcgacggcatgcaggtgctcatggacctgcctctgagtgctgtgcccccctcccaggaggaaaggccgggccccgctcccaccaacctggctcgccagcctccatccaggaacaagccctacatctcgtggccctcatcaggtggatcggagcctagcgtgcactgtgcctctgagaagtatgtctgatccagaccaggactttgacaaagagcctgattcggactccaccaaacactcaactccatcgaatagctccaaccccagcggcccaccgagccccaactccccccacaggagccagctccccctcgaaggcctggagcagccggcctgtgacacctgaagccgccagctcgccacaggggccagggagctggagatggcctccagcgttcagtgccaagactgagcgggccctccaatgttgtccaaggaaatgtagaatcactttgtagatatgggagatgaagaagacaaatctttattataatattgatcagttttatggccgcattgtttcgtgggcagtaggaccacatcttgtttcgtcttggcacagctgttgagggcgatgctgttccatcagctcctcggaggccgtcacgtcgaacaccgggttgcggaagccgaggggcgctccagccggggccgccgcctcgtgcctcctccacctgagcctccccgcgcggcgcagcagcggcggcgccaccagcaggaccagcagcgccagcagcacggcagccgccacgccgcccgccagcccagccgcggagctgccccagacgtgtgcgcccgactcccgcatggtcgcctccaggacgccgagggcctcgctgcggacacgcacggggctagcgccagggccgagccccacgcggaaggaggcactaggcggaaagaagacgtcgtcgtggcggcagggcacgcgctcggcgtccacgaagaagaggccaggtgcct

SEQ ID NO: 13872 - DNA, 1452 bp, Homo sapiens
  SIMILAR (574)..(3024): 861254mologous to Homo sapiens putative p150,accession number U93567,Smith-Waterman Score=3636.
caggagcttaacgttcatctcttaggaacccagggcaggaaaattgctttttgttacggagataaaagttccattctagaaacctttcattaaaaccatttattttctacttaaaaaacaaaaaaaaaaaagcatttggccggcttggaaacccagctgagccgccgcggcaggggcagtttcttggaggccgtcacgtcgaacaccgggttgcggaagtcgaggggcgctccagccggggccgccgcctcgtgcctcctccacctgagcctccccgcgcggcgcagcagcggcggcgccaccagcaggaccagcagcgccagcagcacggcagccgccacgccgcccgccagcccagccgcggagctgccccagacgtgtgcgcccgactcccgcatggtcgcctccaggacgccgagggccctccccgttctcggcgacgtccgccaggagggcccgggccagccgccccgctccgcctgtctcgggcccattctccaccagcaccacctggatctccgtatcggcctcacggagccgggacgagcgtggcaccttggacacggccacctgcagcccgtggtactgaggcagacccaggaaggtgtccagtatccgcgcccggtaccgctccaggtcaaatgcggggccgtgggtcagcaacacaacggctccacagaggtcacagcactgcccctggggccggagggcgctgtggcaggcggcctgggggcagcggccgcccagggggctggagtcttggccgcgcagatccatcggctgcgcctccgcgttgcccggagacgcgagcccgacgggtccgcgcagtcctcggggcccacgctcagcgcgcccggcccgtggaagcgtaggcgggcccgcgcgggacgccaggaaaacagccaggtcctcgtcgcgcgtgaacgtccggcccagagccgagatgctgcggacacgcacggggctagcgccagggccgagccccacgcggaaaggaggcactaggcggaaagaagaccgttcttcgtggcggcagggcacgcgctcggcgtccaccaaaaaagagggccaggtgcctcgtccccagagcgccacaggtgccgggtcatgccacagagaagcggtcagagtcgcggaagacgggcaggttcgcccgcgccacagtccaggtgcgaggccaacgtttgagacgccgaatccggctccctgaagccaggacgagtttccccatccagcggcaggagcatgtctgagacggcgtgaccttcttgcaccaggactgacaccatcttgtccgccgggaactcaacggcgccgccggcgccggggtcccggttctgggctccagttggctgcgacgtcgaagtccgtgttggggacccagagtttggagaccgcctgggtcagtgcgcagagctgcagccacagcaggacccggcccaggacgcccat

SEQ ID NO: 13873 - DNA, 369 bp, Homo sapiens; identical to SEQ ID NO: 7968
  SIMILAR (2)..(364): 911254mologous to Homo sapiens p40,accession number U93569,Smith-Waterman Score=577.

SEQ ID NO: 13874 - DNA, 2593 bp, Homo sapiens
  SIMILAR (43)..(2433): 831254mologous to Homo sapiens putative p150,accession number U93563,Smith-Waterman Score=3353.
ggtatcaaaggcctttattgatttaattttcctttcaacttatcaatgctatcacaaattctaaggaaacaggacttgggcaaaattttttattatgaagatacagatctaagaacagaaggataatcatgtgctagcttatatatagttccttgtaaaaataatgatacatgaaaattagtagaaaatgaaaatctgcagttatctgatatctgaaaatgttaagcaatttcccctgcatcttagttctaatcacttttgcagaataatcaagcatatttgggtgaagagagtatttaatgattccatttttattaatagtgtagtgtgcccttcagagcttggcgtagtctttaagaatcatctgaagtttctggctcagcatgatgttccctctggccttcagcctgccactaaagaatgccttctgagggtcaagcttgcccaggaccacctccatgaaatcttcatctgaaagtatgattgttgtatcagcagcaccttttgcagggccttggtacacttttccagaaccacttttcaggtcaatagtccacttagccccaatatttccgcctttggttatatgccactcaaatacagcatttactttcttcaccacctcaggcccaatatcctttaggcggcgtcctatttcctcaaatacaaaggtactctgaagcttcccgccctcagagggtgtcttagctgaagtaccagatgttggtgcaagatccacatatgcatttgaaatgacaatgtctccagtttcttggaccttggtttgaaaatgaattctgtttccttccttccacatctcagtttgtagagtttgtcctggatatactggttttgcaaaacgagccttaattgccttgaatcttgacacatcattatctgcaaactgctgtaacacacgcctggcagaaaatccaaatgtacataatccatgtaatatgggcttgtcaaaacctgctagactagcaaagttaggatcaatgtgtaagggattccagtctccactgaggcggtacaaagcagcctgattaagagaggtggtatctgtaagtacagcatcaggaggtctattaggtatggctacagctaccttgactttgtctgatgtccgttttccaccaaagcctccagagccaacaagaaagagagagaactgattgtggcatataagttccttctcagaataagaatagacatccataataatcactacaccggatcctttatctaggacatcagcaacaactgcttcacattttaattttcctgctctgggaagtggtttatataactctaagtactgctctccatgaagaacctttgcaaagttgattgaaagtccaggaatttctgctaatcctccacccatcatagatttctgacctatgataactccgaaggtgggcaaacaggagaaatcagaacttccttcataaataaatttcaaatcttttggatccttgattgacgctcccactccaagggcatacataatagcttccagttccgtataagcataagaaaatggagggagtttctggccaatagctccagcaaatcctgatgttgctgtagacgttgcacgactagtatgatttgctgaaactcctccttctgaatctattttactcagaacttcaattatactgccagttgattcttggatactctgaggcttgctggcattctcaaagtcacagatcttcttccagttagccttgactgcctcaggagtcattgggtgattcttttgtcttacaatagctccaagagtccgctcccagcgtaattttccaatccatcctgctccaacctcaaacaagccaccattctcctcacaactctcgtgacaaagccaaaggacaagaggtgccacatactctggcttcagggcttccacaagatcttcaggcataactgtctgagtcatccgtgatcccgcattaggagcaatggtgttacaatgaatgttgcttttcctgccttcaattgcaagagaatttgcaaggcccagaagacccaactttgcagcactataattggcctggccaaagttgccatatattcctgaagctgatgaagtcataataatccttccatacttctgtttcttcatgtgttcccatgctgcccgtgtcacttggaatgaaccccgcaaatgaactctgtggattatatcccagtcttcatcacttatcctagcaaaggaacgatccctcagaattccagcattgttgaccacaacatctattcttccaaaagcatccagggctgtcttcacaaccttctctccttcttccactgaatcatagttggccactgcttttccacctctccttcttatttcttcaacaaccttatcagcagctaaggagcctttaccaactcctttgaagtcccctcccaaatcattcacaacaactaacgctcctctttctgcaaaagccagggcataggctcggcccaatcctgcccccgcgccggtgaccagtaccacccgcccgtcgaacctcagcggtgagcccatgaataaggcctgcaacgacacacacacgaacaagcagacgcgctggcc

SEQ ID NO: 13875 - DNA, 3006 bp, Homo sapiens
  SIMILAR (1039)..(2793): 951254mologous to Homo sapiens putative p150,accession number U93574,Smith-Waterman Score=2924.
atggcgatggatgcgctggcatacacacagatgtttttgttgttgatgaatggcggggactgggttattgcgctggcaaatctcaacacgctgattaaccactcattacagctggtaagtcaggatgcaaacagccgggagatccagttacgctttaccgccaacgacacattaccggaaattcaggccgacccggacaggctgactcagtggggagtagtggagggacagataatcaagaaatacatatgtaaaaatataataggtgtaggtgctgtggagaaaaaaatgagtgaatggaacagaaaatgctttaaggagagactgcaggaagtgaaggagtgcgccttgaggagatctgctgtcgcggcatccctggcagaagaagcagctgaagccaggttactgaggctgcagcaggcatgtacctccctgagtcaatttccaaacagcattgcaggggtacgctgggagcggactcttggagctattgtaagacaaaagaatcacccaatgactcctgaggcagtcaaggctaactggaagaagatctgtgactttgagaatgccagcaagcctcagagtatccaagtctattcttattctgagaaggaacttatatgccacaatcagttctctctctttcttgttggctctggaggctttggtggaaaacggacatcagacaaagtcaaggatcacaggtcctcaccagcaatagaacaaagctggacagagaatggcttgtccagagttgacgagttgacagaagtaggcttcagaaagttggtaataacaaacatctctgagctaaaggaggatgttcaaacccattgcaaagaagctaaaaaccttgaaaaaaaggttagacaaatggatagttagaataaacagtgtagagaagaccttaaatgacctgatggagctgaaaaccatggcacgagaacttcgtgatgcatgcacaaggttcaatagctgaatcaatcaagtggaagaaagggtatcagtgactgaagatcaaatttatgaaataattgtgagaagacaagtttagagaaaaaaagagtaaaaataaatgaacaaagcctccaagaaatataggactatgtgaaaagaccaaaatctacgtctgattggtatacctgaaagtgacgaggagaatggaaccaagttggaaaacactctgcaggatattatccaggagaacttccccaacatagcaaggcaggccaaccgttcagattcaggaaatacagagaacgccacaaagatactcctcgagaagagcaactccaagacacataattagtgtgggttcaccaaagttgaatatgaaggaaaaaaatgttaagggcagccagagagaaaggtcgggttaccctcaaagggaagcccatcagactaacaagcagatctctcggcagaaactctacaagtcagaagagagggggaggccaatattcaacattcttaaagaaaagaattttcaacccagaaatttcatatccagccaaacctaagcttcataagtgaaggagaaataaaatactttacagacaagccaaatgcttgagagatttttgtcaccaccagacctgcctgccctaaaagagcaccaggcctgccctaaaagagctcctgaaggaagaagcacttaaacatggggaaagggaacaacccgggtaccagccactgcaaaaagtcatgccaaaattttaaagaccattgaggctagggaagaaactgcatcaacttaacgagcaaaataaccagctaacatcataatgacaggatccaaattcacacataacaatattaactttaaatgtaaatggggctaaatgctcccatttaaagacacagaccagcaattgcaattgcttaagagtcaagacccatctgtcgttatgtattcaggaaacccatctcacgtgcagagacacacataggctcgaaataaaaggatggaggaatatctaccaagcaaatggaaaacaaaaaaaggcaggggttgcaatcctagtctctgataaaacagattttaaaccaacaaagatcaaaagagacaaagaaggccattacataatggcaaagggatctattcaagaagaagaactaactatactaaatatatatgcacccaatacaggagcacccagattcataaaacaagtcctgagtgacctacaaagagacttagatgcccacacaataataatgggagactttaacaccccactgtcaacattagacagatcaacgagacagaaagttaacaaggatatccaggaattggactcagctctgcaccaagcagacctaatagacatctacagaactctccaccccaaatcaacagaatatacattcttttcagcaccacaccacacctattccaaaactgaccacatagttggaagtaaagctctcctcagcaaatgtaaaagaacagaaactataacaaactgtctctcagaccacagtgcaatcaaactagaactcaggattaagaaactcactcaaaaccactcagctacatggaaactgaacagcctgctcctgaatgactactgggtacataacaaaatgaaggcagaaataaagatgttctttgaaaccaatgagaacaaagacacagcataccagaatctgtgggacacatttaaagcagtgtgtagagggaaatttatagcactaaatgcccacaagagaaagcaggaaagatctaaaatcgacatcctaacatcacaattaaaagaactaaagaagcaagagcaaacaaattcaaaagctaccagaaggcaagaaataactaagatcagagcagaactgaaagagatagagacacaaaaaactcttcaaaaaaaacaaccaaacaaagacccggcaatggaaaaaaacaacaaaactgatagagtgctagcaagactaataaagaagaaaagagagaagaatgaattctcagcccacatactgtacaaattctctaaacaaaatggatcttga

SEQ ID NO: 13876 - DNA, 392 bp, Homo sapiens
  SIMILAR (264)..(476): 301254mologous to Leishmania major possible urease,accession number AL160493,Smith-Waterman Score=73.
ccaagcatgctgtgaagccaagatgcataggttgatgaaggcacagcccatggagatgtggaagtagaaggggaagagtttgctctgcactagtccgaaggtgaagatcccgaaagccccgaggaaaccctaaatctcatcctgaggacaccgatcccaccaaagccccgaggaaacgccaaatctcatcccgaggacaccgatcccaccgttaggaaccgggacctcaatccgcagcacccggattccgagaacagaggcgtcggggccaaatgggctgaatctggtacctcactcccacgcccccgggtggacagcgaccctcctcggccgcgtcccctcgtgggtttcccccaaccaataattcgtcccgcctcccagctgagcccgaa

SEQ ID NO: 13877 - DNA, 403 bp, Homo sapiens
  SIMILAR (401)..(291): 971254mologous to Homo sapiens Human prostate cancer- associated protein 12,accession number Y48226,Smith-Waterman Score= 191.
cccccagcccatgaatatgtgaaagtagaaggggaagagtttgctctgcactagtccgaaggtatgtcggggaaggcttcggaaaagcaggaagcatttgcatgccccaggcacctgacaagagcagtagatggaccatcttaatcaggcctcctaggttcccgccttcctccatcttgcagtcctgggaaggaggcaccgggtggctcagaactttacctttgcctcatgcgtggccttcagaccctgtgagcccgctcggggacagggttacggccaatccagcagagattcgttaggaaccgggacctcaatccgcagcacccggattccgagaacagaggcgtcggggccaaatgggctgaatctggtacctcactcccacgcccccgggtggacagcg

SEQ ID NO: 13878 - DNA, 528 bp, Homo sapiens
  SIMILAR (155)..(24): 971254mologous to Homo sapiens Human prostate cancer- associated protein 12,accession number Y48226,Smith-Waterman Score= 237.
ttcgtgtggcactcaaacccacgtacctggctggcctcccagaatgtgagctgagcccaagcatgctgtgaagccaagatgcagaggttgatgaaggcacagcccatggagatgtggaagtagaaggggaagagtttgctctgcactagtccgaagggatccagttctgacagccaagaccactcctctcataaaataataccggatattaggtgaagatcccgaaagccccgaggaaaccctaaatctcatcctgaggacaccgatcccaccaaagccccgaggaaacgccaaatctcatcccgaggacaccaatcccaccgttaggaaccgggacctcaatccgcagcacccggattccgagaacagaggcgtcggggccaaatgggctgaatctgaaccccttgcagaccagctcttccaaagtcaaagccaagaccattgtgatgagtcccgactcccagaagctcctgcgatgtgaacttgaggcactcaagagccagatacaggctcagacccaagctttcg

SEQ ID NO: 13879 - DNA, 916 bp, Homo sapiens
  SIMILAR (1)..(1272): 981254mologous to Escherichia coli NADH DEHYDROGENASE I CHAIN G (EC 1.6.5.3) (NADH-UBIQUINONE OXIDOREDUCTASE CHAIN 7) (NUO7) (FRAGMENT),accession number D90859,Smith-Waterman Score=2196.
cttggtctgggcctgtaactggctcttgagtgactcaagttcacatcgcaggagcttctgggagtcgggaatcatcacaatggtcttggcagattcagcccatttggccccgacgcctctgttctcggaatccgggtgctgcggattgaggtcccggttcctaacggtgggatcggtgtcctcgggatgagatttggcgtttcctcggggctttggtgggatcggtgtcctcaggatgagatttagggtttcctcggggctttcgggatcttcacctaatatccgaatctctgctggattggccgtaaccctgtccccgagcgagctcacagggtctgaaggccacgcatgaggcaaaggtaaagttctgagccacccggtgcctccttcccaggactgcaagatggaggaaggcgggaacctaggaggcctgattaagatggtccatctactggtcttgtcaggtgcctggggcatgccaatgtgggggacccttgtcttaaggtttttgtgtttttcaagaacctttccccgacataccttcgggctagtgcagagcaaactcttccccttctacttccacatctccatgggctgtgccttcatcaacctctgcatcttggcttcacagctgcttgggctcagcttacattctgggaggccagccagtaactgtgtgtctgtccacctcacctgcctgccagagggtgaccggaaggctttttttgagagctctcagtggaacatcaagaagaaccaggagaccatcagtcagctccgcaaggagactaaggcactggaactaaagctgctggacctgctcaagggagatgagaaagtggtccaggcagtgattcgcgaatggaagtgggagaagccatacctgaagaacaggacaggacagcttcccgagtag

SEQ ID NO: 13880 - DNA, 1131 bp, Homo sapiens
  SIMILAR (175)..(705): 331254mologous to Rattus rattus potential ligand-binding protein,accession number X60660,Smith-Waterman Score=294.
  misc_feature (1)...(1131): n = a,t,c or g
cgtagaatggacctgtgctctgaactccaacaagctgtcttncagtttnaggccaatgcacttgtcggnttcaacaacggcttacattgccactnagctnggaccacagtaaactgctgcnttccaaattttnactgagccaagcatctnttaagccaaatgcagagttatgagcacagccatggaatgtgaagtagaagggaaagagtttntcttcactagtccgaagtatgtcgggaaagcttcggaaaagcaggaagcctgcagggtatggggaccacaggggtgttagggcacttcccggttcccctcttatttccatccccaccccaggtacccatgacatccaagctgagggtccctacctgagacgaaggtcacccacatttgcatgccccaggcacctgacaagaccagtagatggaccatcttaatcaggcctcctaggttcccgccttcctccatcttgcagtcctgggaaggaggcaccgggtggctcagaactttacctttgcctcatgcgtggccttcagaccctgtgagcccgctcggggacagggttacggccaatccagcagagattctggcaaagcatcccgggaatgagagtgagaaaggcccaaagcagtcaaggcccaaagacaaccctcgaccccatctctccaaatgtcagccctcaagatctcaggctctctggacctcaatctccatgccacttcagaggccccaaattttcagccacagcagctccagatcatagccctaggtcttcagagatcactccactaattcccaaatatcaaccccagggatccagttctgacagccaagaccactcctctcataaaataataccggatattaggtgaagatccccaaagccccaaggaaaccctaaatctcatcctgaggacaccgatcccaccaaagccccgaggaaaccccaaatttcatctcgaggacaccagtcccaccgttaggaaccgggacctcaacccacagcacccggattccgagaacagaggcttcggggccaaatgggctgaatccagtacctcactcccacgcccccgggtggacagcaaccctcctccaccgcgtcccctcgtgggttttaggtcctatatttga

SEQ ID NO: 13881 - DNA, 915 bp, Homo sapiens
  SIMILAR (139)..(411): 1001254mologous to Homo sapiens ES/130,accession number AF006751,Smith-Waterman Score=458.
ttttctgaagaagcatttattagcatgcagggcgccatgctagaggctccttatttccaggggcaaggccaagcgaaacaagagcccattgcgtcaggacagcacgcccaaattgcaaagaagaggacacgcccatggtacgcggaaaaaattctggcggagagcactgtacttggggtccttctctcgcagctggcgggtaagggatcggggaccctggtggcttgcctggtacctccccacccaggcctgcagctccttctccacgggtttgcagggccccacatggcaagcttgtgttgcggggtttccagcccagcgggcgttagacagtggccagcgtaaggctcaggaaaccaccaggttaaaagctggcttggcctccccaagaatgtgagctgagccccaagcatgctgtgaaacccaaagatgcagaggttgatgaaagcacagccccatggaagatgtgaagttagaaggggaagagtttgctctgcactaggtccgaaggtatgtcgggcaaggcttcggaaaagcaggaagcctgagacgaaggtcacccacatttgcatgccccaggcacctgacaagaccaagtagatggaccatcttaatcaggcctcctaggttcccgccttcctccatcttgcagtcctgggaaggaggcaccgggtggctcagaactttacctttgcctcatgcgtggccttcagaccctgtgagcccgctcggggacagggttacgggccaatccagcagagattcgttaggaaccgggacctcaatccgcagcacccggattccgagaacagaggcgtcggggccaaatgggctgaatctggtacctcactcccacgcccccgggtggacagcgaccctcctcggccgcgtcccctcgtgggtttcccctcgtgc

SEQ ID NO: 13882 - DNA, 1075 bp, Homo sapiens
tcagttgtctacttcttcctcttcgttctgttcttcttccagcctttcttcatcttcatcattgttctcatctctgctcttgtcttgctcttccgagtctgtttttttgtctttgtccttcttcttttgctctgaggcccccttcttgcctttctgctcctgccatcctggatcttctatgtcagtgatagcagcccaggcctcagagaaacagatgttgcttaagaatactagctcatcatgcgtgggtagggcattccgtggttcattcttttgttcatcaattcgttctttgccctctccagcccgcgagttggctgtttctccctccgtccgtcgggctgcaggcttccgcctcagtcctgccagcgtggggcatgtggtgtcggtaaatagaggccacaacaccacaccttttgctgtgatggccgcgtcatgatggcccggcaaaagggcattttctacctgacccttttcctcatcctggggacatgtacactcttcttcgcctttgagtgagtttcggttgagtagagttacctgattatggttactttgggtccaggggaagaacctgctttctggggagtttggggctggtccttggatgactttaacgtcctcttgagcgatgtctgtagagatgccagctgaattcattgcttcgtggtcatcacagagtatgtacttcctaaaaagaccaatacctttgataccaattttgtagtactgatttggggctgtccttgatagattgagtaccagctgtctgtgtgaaagactaaatatttttgaagatagggccattctactcatgaatctcttctgagtgttttcatgtgaattgaagtctgtgtcattatcatcatccctccagtgaactagcatgtagagacgactggctgccaatagcctcatctctggaggagaacaatacaataggcctgttgtgtacttgttgacatacagagtggattgttttagcaggtgcagaagatgctctgtgtggagattacagagacctttatccttgatggcatagcgtaattcaaatctaagttgtcctttgtctggc

SEQ ID NO: 13883 - DNA, 1300 bp, Homo sapiens
  SIMILAR (294)..(605): 351254mologous to Homo sapiens type III procollagen (aa 892- 1023),accession number X01655,Smith-Waterman Score=112.
tcccccttcctggtctcccttctcccgctgggccggtttatcgggaggagattgtcttccagggctagcaattggactttttgattatgtttgacccagcggcaggaatagcagggcaacgtgatttcaaagctgggctcagcctctgtttcttctctcgtgtaatcgcaaaacccattttggaacaagaattcccattcatgtctgtgatggtggtgagaaagaaggtgacacggaaatgggagaaactcccaggcaggaacaccttttgctgtgatggccggggcatgatggcccggcaaaagggcattttctaacctgacccttttcctcatcctggggacatgtacactcttcttcgcctttgagttggccgctacctggctgttcagctgtctcctgccatccctgtatttgctgccatgctcttccttttctccatgggctacactggttgaggaccagcttcagtgaccctggagtgattcctcgggcgctaccagatgaagcagctttcatagaaatggagatagaagctaccaatggtgcggtgccccagggccagcgaccaccgcctcgtatcaagaatttccagataaacaaccagattgtgaaactgaaatactggtacacatgcaagatctttcgggcttcccgggcctcccattgcagcatctgtgacaactgtgtggagcgcttcgaccatcactgcccctgggtggggaattgtgttggaaagaggaactaccgctacttctacctcttcatcctttctctctccctcctcacaatctatgtcttcgccttcaacatcgtctatgtggccctcaaatctttgaaaattggcttcttggagacattgaaagaaactcctggaactgttctagaagtcctcatttgcttctttacactctggtccgtcgtgggactgactggatttcatactttcctcgtggctctcaaccagacaaccaatgaagacatcaaaggatcatggacagggaagaatcgcgtccagaatccctacagccatggcaatattgtgaagaactgctgtgaagtgctgtgtggccccttgccccccagtgtgctggatcgaaggggtattttgccactggaggaaagtggaagtcgacctcccagtactcaagagaccagtagcagcctcttgccacagagcccagcccccacagaacacctgaactcaaatgagatgccggaggacagcagcactcccgaagagatgccacctccagagcccccagagccaccacaggaggcagctgaagctgagaagtag

SEQ ID NO: 13884 - DNA, 670 bp, Homo sapiens
  SIMILAR (474)..(142): 1001254mologous to Homo sapiens CHRAC17,accession number AF226077,Smith-Waterman Score=557.
ctagtcagtttttattctgatcttttcaggcacttttgcctgagactactctgcccagcatggaaaagcttcacagaaacacgtagcacgtctcatttcaagtggtaccttccaaggtgccacagtctcccgcccttttcagttgtctacttcttcctcttcattctgttcttcttcttccagcctttcttcgtcttcatcattgtcctcatccctgctcttgtcttgctcttccgagtctgtttttttgtctttgtccttcttcttttgctctgaggcctccttcttgcctttctgctcccgcctatatgcttccagagcttctttcaatggggtaacgaaccgctggaactccatctcttccatggctgagagcacatcactggcattcagcgtcttccgctttcctttcattgcaaagttgttagcacaggatgtggcgtacagcacgaagacgctggcggcgcgggagattggcgctccgggcctccttggagatgttgacaccgtccgggagctgcgaggagaccgggggtgagcaaagctgccgttccagcacctgcttccctcctgcccgttcgtccgccccccccgagctgctcaccgcctccttgatgatcctggtgatcacggcattgggcaggtttaggtcctcgggcctctccgccat

SEQ ID NO: 13885 - DNA, 1075 bp, Homo sapiens
  SIMILAR (815)..(1072): 631254mologous to Homo sapiens CHRAC17,accession number AF226077,Smith-Waterman Score=250.
gccagacaaaggacaacttagatttgaattacgctatgccatcaaggataaaggtctctgtaatctccacacagagcatcttctgcacctgctaaaacaatccactctgtatgtcaacaagtacacaacaggcctattgtattgttctcctccagagatgaggctattggcagccagtcgtctctacatgctagttcactggagggatgatgataatgacacagacttcaattcacatgaaaacactcagaagagattcatgagtagaatggccctatcttcaaaaatatttagtctttcacacagacagctggtactcaatctatcaaggacagccccaaatcagtactacaaaattggtatcaaaggtattggtctttttaggaagtacatactctgtgatgaccacgaagcaatgaattcagctggcatctctacagacatcgctcaagaggacgttaaagtcatccaaggaccagccccaaactccccagaaagcaggttcttcccctggacccaaagtaaccataatcaggtaactctactcaaccgaaactcactcaaaggcgaagaagagtgtacatgtccccaggatgaggaaaagggtcaggtagaaaatgcccttttgccgggccatcatgacgcggccatcacagcaaaaggtgtggtgttgtggcctctatttaccgacaccacatgccccacgctggcaggactgaggcggaagcctgcagcccgacggacggagggagaaacagccaactcgcgggctggagagggcaaagaacgaattgatgaacaaaagaatgaaccacggaatgccctacccacgcatgatgagctagtattcttaagcaacatctgtttctctgaggcctgggctgctatcactgacatagaagatccaggatggcaggagcagaaaggcaagaagggggcctcagagcaaaagaagaaggacaaagacaaaaaaacagactcggaagagcaagacaagagcagagatgagaacaatgatgaagatgaagaaaggctggaagaagaacagaacgaagaggaagaagtagacaactga

SEQ ID NO: 13886 - DNA, 1297 bp, Homo sapiens
  SIMILAR (392)..(1297): 931254mologous to Homo sapiens CGI-89 protein,accession number AF151847,Smith-Waterman Score=1480.
tcccccttcctggtctcccttctcccgctgggccggtttatcgggaggagattgtcttccagggctagcaattggactttttgattatgtttgacccagcggcaggaatagcagggcaacgtgatttcaaagctgggctcagcctctgtttcttctctcgtgtaatcgcaaaacccattttggaacaagaattcccattcatgtctgtgatggtggtgagaaagaaggtgacacggaaatgggagaaactcccaggcaggaacaccttttgctgtgatggccggggcatgatggcccggcaaaagggcattttctaacctgacccttttcctcatcctggggacatgtacactcttcttcgcctttgagttggccgctacctggctgttcagctgtctcctgccatccctgtatttgctgccatgctcttccttttctccatgggctacactggttgaggaccagcttcagtgaccctggagtgattcctcgggcgctaccagatgaagcagctttcatagaaatggagatagaagctaccaatggtgcggtgccccagggccagcgaccaccgcctcgtatcaagaatttccagataaacaaccagattgtgaaactgaaatactggtacacatgcaagatctttcgggcttcccgggcctcccattgcagcatctgtgacaactgtgtggagcgcttcgaccatcactgcccctgggtggggaattgtgttggaaagaggaactaccgctacttctacctcttcatcctttctctctccctcctcacaatctatgtcttcgccttcaacatcgtctatgtggccctcaaatctttgaaaattggcttcttggagacattgaaagaaactcctggaactgttctagaagtcctcatttgcttctttacactctggtccgtcgtgggactgactggatttcatactttcctcgtggctctcaaccagacaaccaatgaagacatcaaaggatcatggacagggaagaatcgcgtccagaatccctacagccatggcaatattgtgaagaactgctgtgaagtgctgtgtggccccttgccccccagtgtgctggatcgaaggggtattttgccactggaggaaagtggaagtcgacctcccagtactcaagagaccagtagcagcctcttgccacagagcccagcccccacagaacacctgaactcaaatgagatgccggaggacagcagcactcccgaagagatgccacctccagagcccccagagccaccacaggaggcagctgaagctgagaag

SEQ ID NO: 13887 - DNA, 871 bp, Homo sapiens
  SIMILAR (160)..(636): 851254mologous to Mus musculus retinoid X receptor interacting protein No.6,accession number U09416,Smith-Waterman Score=711.
aatacaattgggggactagggaagactgcagatcaaaaaccatctaaccatacatttaagtaaacaaaagcgagcatactgactaatttagtcgttcagaatccctcttgtcaaaaggccataaccttcagattgatgaagcaaaacaggattctgctactcagatgctctgagtttggtaagtgctggttttgacggtatttctagtcagtttttattctgatcttttcaggcacttttgcctgagactactctgcccagcatggaaaagcttcacagaaacacgtagcacgtctcatttcaagtggtaccttccaaggtgccacagtctcccgcccttttcagttgtctacttcttcctcttcattctgttcttcttcttccagcctttcttcgtcttcatcattgtcctcatccctgctcttgtcttgctcttccgagtctgtttttttgtctttgtccttcttcttttgctctgaggcctccttcttgcctttctgctcccgcctatatgcttccagagcttctttcaatggggtaacgaaccgctggaactccatctcttccatggctgagagcacatcactggcattcagcgtcttccgctttcctttcattgcaaagttgttagcacaggatgtggcgtacagcacgaagacgctggcggcgcgggagattggcgctccgggcctccttggagatgttgacaccgtccgggagctgcgaggagaccgggggtgagcaaagctgccgttccagcacctgcttccctcctgcccgttcgtccgccccccccgagctgctcaccgcctccttgatgatcctggtgatcacggcattgggcaggtttaggtcctcgggcctctccgcc

SEQ ID NO: 13888 - DNA, 399 bp, Homo sapiens; identical to SEQ ID NO: 55
  SIMILAR (351)..(103): 441254mologous to Mycobacterium avium Gsa protein,accession number AJ251811,Smith-Waterman Score=118.

SEQ ID NO: 13889 - DNA, 252 bp, Homo sapiens
  SIMILAR (24)..(164): 401254mologous to Pseudorabies virus glycoprotein gX,accession number U27488,Smith-Waterman Score=62.
ctaggttttgcttttcagttttaactcttcctcctcctgagaggtgacagcgtgctggcagtcctcacagccctcgctcgctctcggcgcctcctctgcctgagctcccactttggcggcacttgaggagcccttcagcccaccgctgcactgtgggagcccctttctgggatggccaaggccagagccggctccctcagcggccttagctgccttcccacggagcagggctcgggacctgcagctcgccat

SEQ ID NO: 13890 - DNA, 447 bp, Homo sapiens; identical to SEQ ID NO: 58
  SIMILAR (131)..(340): 411254mologous to Streptomyces coelicolor A3(2) putative acyltransferase,accession number AL391515,Smith-Waterman Score=123.

SEQ ID NO: 13891 - DNA, 816 bp, Homo sapiens; identical to SEQ ID NO: 61
  SIMILAR (427)..(543): 351254mologous to Homo sapiens Human secreted protein encoded by gene 94 clone HMKDD07,accession number Y02743,Smith-Waterman Score=68.

SEQ ID NO: 13892 - DNA, 648 bp, Homo sapiens; identical to SEQ ID NO: 65
  SIMILAR (1514)..(924): 311254mologous to Homo sapiens subunit of RNA polymerase II transcription factor TFIID,accession number Y11354,Smith-Waterman Score=97.

SEQ ID NO: 13893 - DNA, 511 bp, Homo sapiens
  SIMILAR (10)..(180): 561254mologous to Mus musculus T-box 1,accession number AF326960,Smith-Waterman Score=122.
cgcgggaaggcagctaaggctcggtgagaaatcgagcgcagcgctggtgggctggcactgctgggggacccagtacaccctccgcagctgctggcccgggtgctaagtccctcattgccaggggccagcagggctggccggctgctccgagtgcggggcccgccaagcccacgcccacccggaactccagctggccggcaagcgcggcacacagccccggttcccgctcgcgcctctccctccacacctccccgcaagctgaaggagagggctccggccttggccagcccagaaaggggctcccacagtgcagcggagggctgaagggctcctcaagtgccgccaaagtaggagcccaggcagaggaggcggggagagcaagcgagggctgtgaggactgccagcacgctgtcacctctcggttttactttattttaggataaaatatctattgtgaattttaaaaacatgtaaaataaaattttaattaaaaagcctaaaaaaaaaaaaa

SEQ ID NO: 13894 - DNA, 5403 bp, Homo sapiens
  SIMILAR (926)..(1480): 331254mologous to Mytilus edulis precollagen P,accession number AF015539,Smith-Waterman Score=152.
gccattctgtgacagttgcctttagtattcagtacagtaacatacagtacaggtttgtagcctaggagtcctaagccataccgtgtaccctaggtatggtggctacaccacctaggtttgtgtaagtatacgctatgatattagcacaatggtgaaataacctagtgacccatttctcaagctcctcacgtggcaagcaatgcatgactgcatatgaaagctcttaaatagggattgtttctaaattaatctcaaaacagtcattatttactatttatggaattttttttaaaaaaaggagcaaaagtatcatttcagtgggaacttaacttggggctacagtgttttatttaacttttaccccaaagttgcaaagtgttttgaaatttttccctgtaaaataattattttaattcaatttaaataaaacccaccaaggagacttcaagctttaagaagtctagcttcctgtgaaatgtgagaggaagtcagcactcatttcagaaatctgattataataatagctccatccctaaatgaggtgaatcttggaatctcttccattttattttattttatttttttgagatggagtttctctcttgttgcccaggctgaagtgcagtgttgtgatctcggctcactgcaacctctgcctcccgggttcaagcgattctcctgctttggcctcctgagtagctggggttgcaggtgtgcaccaccgcgcctggctaattttgtatttttagtagaggcggagtttcgccatgttggtcaggctggtctcgaacttctgacctcagtgatccccccgcctcggcctcccaaagttctgggattatgggtgtgagccaccacacccggccccccttcaattttaaagccatcactatgcaccctatgtctatgccaggcactaaaataagatgaagcaccttcttggagtttacatgctggtaattatgccagacagtaataaaataggtaagaacggctgtgggggaagtcagctgggttctagttacagtcgcatttcaggaaatgatttaacatgctgactttaacaacctaagcctcttctccatgtgtgcacacagggtagatctctgaacacaggtgaccctagaagtgctgtaacttctaggggaatggctgtgttgagtcaaggcaggatgacagttcagcctcctcccaggctagtgcaaagggctcttcactcggattaaaaccttctctcccagaccgaattgccaactcccaacacccctcctacagaaaatttggagtcctcgcttattccctggcagcccctacctaatagggtggtgaattaattatcaaacatgcgacagtttagcgaaaatggcaacactttggaataaatgactgtaatgtacatcctggcgcccattttgcaggtcagttgctctccctggaaggaagagtgttctcggatttcaccttaaaggaggaaggctgccagaactgaactagcacttctgaatatcctgaggcgaggtccggtgacttccttgggaagctctgccgcgcccccatcccaccctaccccaccctaccccaccacagcaggcgctggagtcctgggaccaccaggatctgaggcccaaatccttcctcactaaggggaggagaggggtgctccggcagggcaggatgggaaggcgtgcttgggcgggattgtgacatgagtgccctggtgacatggagcagttctgtggcataaataaaggtgtcataaagacagggcgggactcatgcttacaaggggcacgagcgtctcggagctgccagaatgacttccgctcagtgcccggcactagcgtgtgtcatgtccccgctgcgtttctggggcccatggcccctccttatgtggcaactattgtggctactagtcaaggaggctcagcctctggagtgggtcaaggacccgctccagctgacctctaaccccctggggccgcctgagccctggtcttcccactcctcccatttcccacgggaatctccccatgcgcctactctcccagcagacccgtgggactttgatcacctggggccctctgcttcctcagagatgccagccccaccccaggaatcgactgaaaatttggttccattcctggacacctgggattcagctggagagctgcccctggagccagagcagttcttggcttcacagcaggatttaaaggacaagctgagtccacaggaaaggctccctgtttcgcccaagaagctgaagaaagatccagctcagcgttggagccttgctgagattattggaattatacgccaattatccacacctcagagtcagaaacagactttgcagaatgaatattccagtacagatacaccgtatcccggtagcctgcctccagaactccgggtgaagtcagatgagcctccagggccctctgagcaagttggaccttctcaattccatctagagcccgaaactcaaaatccagagacccttgaagacatccagtcctcttcactccagcaagaagccccagcacagcttccacagctccttgaggaagaaccttcttcaatgcagcaggaggccccagctctgcctccagagtcctctatggagagtctaactctaccgaatcatgaggtgtcagttcaacctccaggtgaggatcaagcttattatcacttgcccaacattacagttaaacctgcagatgtggaggttaccataacttcagaggctaccaatgagacagaatcttcccaagctcagcaggagaccccaattcagtttccagaggaggtggaaccttctgcaacccaacaggaggccccaattgagcctccagttcctcctatggagcatgaactttccatcagtgagcagcagcagccagttcagccttctgagacttctagggaggtcgaatcttctccgacccagcaggagaccccaggtcagcctccagaacatcatgaagtcacagtttcacctccaggtcaccatcaaactcatcatttagattcacccagtgtctctgtgaagcctccagacgtgcagctcaccatagcagcagagcctagtgcagaggtgggaacttctctagtccagcaggaggctacaactcggctctcagggtcaggtaatgatatagaacctcccgccatccagcacgggggcccacctctgctttcagagtcatcagaagaagctggacctttagcagttcaacaggagacttcatttcaatctccggaacctattaataatgagaacccctctccaacccagcaggaggctgcagctgagcatccacagaccgctgaggagggtgagtcttccctaacccatcaggaggccccagctcagactccagagttccctaatgtagttgtagctcaacctccagagcattcacacctgactcaagccacagttcaacctttggatctggggtttaccatcactccagaatccatgacagaggttgaactttctccaaccatgaaggagaccccaactcagcctcctaagaaagttgtaccccaacttcgagtatatcaaggggtaacaaatccaacaccaggtcaggatcaagctcagcatccagtgtcacccagcgttacagttcaacttttggacctgggacttaccatcactccagaacccactacggaggttggacattctacagccccgaagaggactatagtttctccaaagcatcctgaggtgacacttccacatccagaccaggttcagactcagcattcacacctgactcgagccacagttcaacctttggacctggggtttaccatcactccaaaatccatgacagaggttgaaccttctacagccctgatgactacagctcctcctccaggacaccctgaggtgacacttccaccttcagacaagggtcaggctcagcattcacacctgactcaagccaccgttcaacctctggacctggagcttaccataactacaaaacctactacagaggttaaaccgtctccaaccacggaggagacctcaactcagcctccagacctgggacttgccatcattccagaacccactacagagactggacattctacagccctggagaagactacagctcctcgtccagaccgggttcagactctgcatcgaagcctgactgaagtcacaggtccacctactgaactagaacctgctcaggattcactggtgcagtctgaaagttacacccaaaataaggctttaactgcaccagaggaacacaaggcctccacaagcaccaacatatgtgagctctgtacctgcggagatgagatgttgtcatgtattgatctcaacccagagcagaggctccgccaagtgcctgtgccagagcccaacacccacaatggcaccttcaccatcttgtaagaatcacttttcctcaattgtcctctgtgtcctgcctgacatggcagccttttcctggaggccttcctgggccttctttatctccccaagccatatggacaactgactttctgctttcacctttgcttgtcaactctcccttctcctcattctcttttaatgttaggccccttctccagtcttttccttttactctggtcttttactcgtttttgtatccatttttatttagccccatcacatcattgcttaaccgctgctctcctcccattttcgcttcaccctctttacagcagcctgtccctctcccgatctcagtgatgatgctctaagtggttaagagttgattccggagccaggctgcctgggtttgaacccagatctatttattagcttggtgacccagagcaagttattctgcctgtgactcaatttcctcacctttaaactggggatcatgctagttagcatttcataggattgttgtgaaatttaggtgagtgaatatatgaaacacttcatcagtgcttagcatatgtaggagagttggctgttcacatgattattcagtcctttagttttgtccagaactcatttttgtccctagctttctatatgtagaactagttttatgtcaaacccagggccaagtatgctactgtctccagaacacgaaaatgataggagggaagaggctgggtgtggtggctcacgcctgtaatcccagcactttgggaggccgaggcgggcggatcatgaggtcaggagatcaagaccatcctggctaacatggtgaaaccccatctctactaaaaatacagaaaaaaattagccaggcatggtggtgggtgcctggagtcccagctactcgggaggctgaggcaggagaatggcatgaacctgggaggcagagcttgcagtgagccgagattgcaccactgcactccagcctgggcgacagagcaagactccatctc

SEQ ID NO: 13895 - DNA, 3414 bp, Homo sapiens
  SIMILAR (478)..(221): 561254mologous to Human endogenous retrovirus K pol protein,accession number Y17832,Smith-Waterman Score=300.
ttactctgcaaaccacagttctttcagcctgagcatcatggggttcaccgtgtgcagatgctcctcgttccacttcttggcgctcctgtagacactgtgccagggcacaggggcccggatcactctttgaggaaacaagcgggggatgctctcaataaagagccgttttctctccattgggtccatgaggatgtaatcaacgatgcttttcatgaggctacagtaatagtcattctccttctcctgcacgaggaccaccatcaggggctccaggaagggactcgtcagcagcgtgttagaaatcagctttgaaatccgaaccatcacttcaccctcctcaggggcaatcatgtctttgcgaattccattggtcagatagtaatagtatctctccaggtccgattcagatggcttcttttctttactttccatttccatctcctgctgtaacatgacatcgagctgctgttctggactcattggtctgcttcctgggaacgtcaaagatgtctttacctccttcttcatgggtgagaagattgacgtcttgaaggccaacttgatcctagtggaatcctctttgtttctggaggaaaacttcgtttttttcctcatgggctctgatgagcttctatttcctgatgatggcagcccctgaccggtcctgtccctagggacactgatggtggccggttggtagaccttcagcagatctttcagcttcaggtcctgggccatcaaggagtagttgttggcgatggaatcactgggtccacggtggtgatgctgttctttgaagggtgcagccaaggtccatgacgtgcgttgcatcaagggcgggtaaaagctgtgtgacatgacagtctgatagagtccagacggttcctcattagcagaagcaggcagaggaggcagctctggctgcccctgggagtggctcatgtgatgtatggagtcacttttggcgatctgtccagaacacaaacattcccgagttcctatgaaaagcattgcatagtgagaggtgacagcgtgcttgctggcagtcctcacagccctcgcttgctctcggcgcctcctctgcctgggctcccactttggcggcacttgaggagtccttcggcccaccactgcactgtaggaggcccctttctgtgctggccaaggccacagccggctccctcagcttgcagggatgtgtggagggagaggcgcgagcgggaaccggggctgtgcgcggcgcttgcgggccagctggaagttcctggtgggtgtgggcttggcgggccccgcactcggagcagccggctggccctgctggctccaggcaatgagggacttagcacccgggccagcggctgtggagggtgtactgggtcccccagcagtgccagcccaccagcgctgtgctcgatttctcgccgggccttagctgccttcctgcagggcagggctggggacctgcagcccgccatgcctgagccttcccccgcctccgtaagttcctgtgcagctggagcctccccgaggagcgccgccccctgctccacggcgcccagtcccatctaccgcccgagggctgagcaatgcgagcgcatggcgcaggactggcaggcagctccacctgcaaccccggtgcaggatccactagctcctgatgccaagaactgccgaattactactttgatttcagtagatgtcaaaaaggatcatcaggaaagtggtaaaatagctgtggagtacagacccagtgaagagattgtagatgtcagatgggaagaagaactacacggcttaattcaagtatgtggagataaaaactcaaggacccagcaggagagcccagctcagcctctagaagagatggaaccttctgcaatccaagatgaggctccaactgagcctccaggtcctcctatagagcctgaactttcccccagtgagcagaagcagccagctcagccttctgagtcttctggggaggttgaatcttctccagcccagcaggacaaccctcctattcccactgagcaggctgacttttctctagcccagcctgatctcccttccccacctctgtgttctccggaaaagactgaatctccagtccagcaagaggccacagctcagactccagatccccctagggaggcagaaccttctccagtccagcaagagttcccagctgagccaccagagccccctaaggaggctgaaccatctgcaacccagcaggaagcctcaagtcatcctctgaagtccactgaagagcaagaggttccagctcagattccagagccctctatggaggcagaaccttctccgacccagcaggaggccacagttcaggctccagagccccctaaggaggtagaatcttcaagccagcagatggtcccagctcagcttccagagccacctaaggaggttgcagctcaacctccagctcattatgaggtgacagttccaacaccaggtcaggatcaagctcagcattggacattgcccagtgtcacagttcaacctttggacctgggacttaccattactccagaacccactaaggaggttgaacattctacagccctgaagaaggctatagttcctccaaagcaccctaaggtgacacttccacatccagaccaggttcagattcagcatttacacctgactcaagccacagttcaacctgtggacctggggcttaccatcactccagaatccactacggaggttgaactttctccaaccacgcaggagaccccaactcagcctcctaagaaagttgtaccccaacttccagtatatcaagaggtaacaattccaacaccaggtcaggatcaagctcagcatcaaatatcacccagtgtcatagttcaacctgtggacctgggacttaccatcactccagaacccactatggaggttgaacattctacacccctgaagaagactatagttctgccaaagcaccctaaggtgacacttccacatccagaccaggttcaggctcagcattcacacctgactcaagccacagttcaacctttggacctgggacttaccatcactccagaatccacgacagagtttgaaccttctacagccctgactacaactcctcctccaaaacactctgaggtgacacttccaccttcagacaagggtcaggttcagcattcaaacctgactcaagtcacagtccaacctctggacctggagcttaccataactacacaacttactacaggggttaaaccatcttcaaccatggaggagacatcaactcagcctccagacctggggcttccatcactccagaacccactacagagactggacatctaccgccctggagaagactacagctcctcatccagaccaggttcagactctgcatcgaagcctgactga

SEQ ID NO: 13896 - DNA, 382 bp, Homo sapiens
  SIMILAR (3)..(62): 1001254mologous to Homo sapiens high-mobility-group protein isoform I,accession number M23619,Smith-Waterman Score=106.
aaaacaagggtgctgccaagacccggaaaaccaccacaactccaggaaggaaaccaaggggctaggctctggacacagaatgttcagcttaacaaagaaatgacacttgccagcaaccggagcctggcagaaggaaaccttttgtaccagccccagctggacacgttgaaagcacgcttgacccagaaataccaggaactccaggttctctttgaagcctatcagataaagaagaccaaattaggtaactttttaagggtgatcattcgagaataaagagttgagagaaggacacattttcaagctattgccctaccaggaaagaaatattacggaaaaatttcaggttaagatagcgactctactgcaatgaacaaatagc

SEQ ID NO: 13897 - DNA, 1150 bp, Homo sapiens
  SIMILAR (302)..(607): 881254mologous to Homo sapiens Human breast tumour-associated protein 24,accession number Y48563,Smith-Waterman Score=523.
atggaagatagggaagtgagcaactcaaatgtcataaaccagagtgctgggggcggcgcagcagcctttattgacttcttcattctctgggtagtggtgaacagccggttctttcaggccttccagcgccggagcctcgggcgtgggcaaaaagcgtccatacgcagcctgagccacttgggagcccccagtttccgaggcagaagaacagtgcccaccagcgcagcggggctgcggcccggaaacctggcggggagccccgagccccggcgggcgcacgccgcgtgggcaccaggcaggcggttggagtacggggcgggggtcggccgagggcgcggggcccccggggctccggctcgcccccgccgctcggggcaggcagccgatggcgtttctgaggtgacgccgcccacaccgggcttctccgggggcggaggaaacacctatgaacctcggcagccttccttgccgggcgccaggggtgagcaggaattcaacagccctcgagatacaccaaaacagaaccctgattctgatggcatgaagaatctcaggcccgggagcagtgctcctgcctgtaatgccagcactttggaggctaagacacagaatgttcagcttaacaaagaaatgacacttgccagcacaccggagcctggcagaaggataccttttgtaccagccccagctggacacgttgaaagcacgcttgacccagaaataccaggaactccaggttctctttgaagcctatcagataaagaagaccaaattagacagacagtctagcagtgcttccttggagaccctgttagcacttcttcaggcagaaggggccaagattgaggaagacactgagaacatggcagagaagtttctggatggagaacttcctctggattccttcattgatgtctatcagagcaaacggaaactggcccacatgcgacgggtgaaaatcgagaagctccaggagatggtcctaaaggggcagagactcccaccaggccctggccccgctgccccccaggctgcccgaactggcacctaccgccccccttccctaccctgccccagagccagtgggcctcctgccgttgcacctcggcgcatcccccccccaccacccccggtgctgcgggacgcttag

SEQ ID NO: 13898 - DNA, 738 bp, Homo sapiens
  SIMILAR (525)..(361): 941254mologous to Homo sapiens Sequence encoded by the breakpoint cluster region (bcr) ofchromosome 22 on pVI-3,accession number P60303,Smith-Waterman Score=257.
gaggtgtggggacaggagctgggtgtgctggggactggccgcggacccctaacctgtgtctccggtctacctccggaagcggctaaacccagcacatcgttctggtccccttctggccctgcaggatggtggttgggacgttgaaataagcgcgcgagttgtacgtcctctctccgcgctcacgcccccctcctcaccgtgtttcccgccaggaccatcagcacgtgcccatcgacatccagaccagcaagctgctcgattggctggtggacagaaggcactgcagcctgaaatggcagagtctggtgctgacgatccgcgagaagatcaatgctgccatccaggacatgccagagagcgaagagatcgcccagctgctgtctgggtcctgtgagtgcttaggggctgtcactggagtcccctctttgctgaggtaacattcactactttcactgcctaagaatcctgggccttctcaaaggcacagaggcctccacgaagaatatttttggccgatactcttcacagcggatgaaggcaagtgtgggccaagggccggtagattggcaggagattatagctctgtatgagaaggacaacacctactgtaggtaaagtggcccggcctgggagccctggtatccatggggaagcccactctcagagttctgagataccaggcttataggaggcacagtctgtgagtgagaagagactggagtgtagatgttgcccatt

SEQ ID NO: 13899 - DNA, 639 bp, Homo sapiens
  SIMILAR (43)..(567): 651254mologous to Homo sapiens TAR RNA binding protein 2,accession number U08998,Smith-Waterman Score=533.
atggaggcagtcacagtggtgcctgtggggacagaggagggaatgggtgaagaggagcaagactctggcactaccacgggctgcgggctgcctagtgtagagaaaatgctggccaccaacccgggcaagaccccaatcagccttctgcagaagtatggtaccagaatagggaagaacacctgtgtactaccttctcaaagccgagggcccaccagcctaatttcaccttctgggtctgttggcaacaccagctgcactgctcagggccccaggaagaaggtagtcaagcacaaggcagctgaggtggccctcagacacctcaaagtggagagcatgttggagccggccccggaggacagcagttctttttctcccctagactcttcactgcctgaggactttccagtttttactgctgcagcagctgctaccccagtttcatctgttttcctaaccaggagcacccccatggaaaagcagcccccgctcctcccttcagcagtcggagtgcatccctgttggtgctcttcagaaactggtggtgcagaaaggctggtggttgccagagcacacagtgacctaggagtccaggccagatcaacacgaagaattgacctgacgagtggagcgtttcactga

SEQ ID NO: 13900 - DNA, 894 bp, Homo sapiens
  SIMILAR (758)..(288): 341254mologous to Homo sapiens Synthetic human type III collagen SYN-C3,accession number W54966,Smith-Waterman Score=126.
ttattccagtttaagttcagtggccagagcctgtcccggcagctcagggctcgaggcagtaacagccctggacaggacgccatcacatcgcagagcagactcacccacaccacaatcgttcacactgggactacatagacacagcagtttgcctaacatgatatcttcgggatgtgggaggaaactgaccggggtacactggtcctctaaaccaatcctcacaacaggactgggagacaggtttacctttcccactttacagagaatgaaacagagtggcaaagcctccgaggaccctacacttcggacatcgcaaagcaggatctgagtcccggctccttgtccaaacctacttgctaggctttctttcccatgtctactgcgggagtgtgtggcaacgtggaaggggagcccgagacgccctggtctctccctctctcgcaggttcctttctccccgaacgcagcccgcaggggacgctggggaggagctgagctggagttgccggggccccgggaccgggcgttccggggcggtccccagcagccgcgcattccagagccagcagcgcgtcctggccgtcctgcgctctcccgcctcccggggctcggaggagccggggcacgttccggagctgcctagggctgaggttccaggcctgggggtcgcttccagctgcagatcccgtgcagtcctggggaccctgagaagcaccgagccatccctgaccaggaactttccgcagactcgccgccatctggggtgagtggggccaccggggattgtttgtggggctctggcagagcggagctcttcggattcgcgactacctctagtgcggcccctttccccgggctcccaacgttcttctttattccggtctctcctccccat

SEQ ID NO: 13901 - DNA, 3927 bp, Homo sapiens; identical to SEQ ID NO: 334
  SIMILAR (1345)..(1479): 951254mologous to Homo sapiens breakpoint cluster region protein,accession number U07000,Smith-Waterman Score=225.

SEQ ID NO: 13902 - DNA, 518 bp, Homo sapiens
  SIMILAR (228)..(359): 651254mologous to Homo sapiens putative small membrane protein NID67,accession number AF313413,Smith-Waterman Score=113.
cggacgcgtgggcagcagcgcgtcctggccgctcctgcgctctcccgcctcccggggctcggaggagccggggcacgttccaggagctgcctagggctgaggttccaggcctgggggtcgcttccagctgccagatcccgtgcagtcctggggaccctgagaagcaccgagccatccctgacccaggaactttccgcagactcgccgccatctgggagtgaagcaacatggatgcagtcagccaagtccccatggaagtcgtgcttcccaagcacatcctgggatatctgggttatttgtcctcatcatcctgggccaccattgttcattcatggacctcgttgttgctgtgcccaagccactgcaagtaatcatctattcgcatgcggaacttcatccgatccttagtgggggctgttttgagagcctcccaagagggcccgggtgagggaatgaggacaaggcatcctatccccaagcctcttcctgtcttcagaaaagcagcaggagggactttg

SEQ ID NO: 13903 - DNA, 297 bp, Homo sapiens
  SIMILAR (379)..(152): 421254mologous to Homo sapiens Human secreted protein, SEQ ID NO: 5597,accession number G01516,Smith-Waterman Score=139.
ctcagttctctgagctgcttctgcaaaggcccccatgtccctccccacaccggccctggggctgattgtgggcggtggagcgccagacagaaaaggattccaatgagaacttcaggttaaagtcagatgccacctaccagggtctacagtcaaaatgttggctttttcttattttttaatgtatgggagaaaaatgtaaaattccagttcttttctaattgtgtttctgaaattaggagtcagctgccagcgtttttgtgtggctgcagtgtgcctggggcccagctcacgggcagt

SEQ ID NO: 13904 - DNA, 3394 bp, Homo sapiens
  SIMILAR (123)..(305): 471254mologous to Homo sapiens Human secreted protein, SEQ ID NO: 5597,accession number G01516,Smith-Waterman Score=123.
gtcccgagcgccggcctgcggagcgtagcagcccgggccagacgccggaggagggcgcgcaggccttggccgagttcgcggcgctgcacggcccggcgctgcgcgcttcgggggtccccgaacgttactggggccgcctcctgcacaagctggagcacgaggttttcgacgctggggaagtgtttgggatcatgcaagtggaggaggtagaagaggaggaggacgaggcagcccgggaggtgcggaagcagcagcccaacccggggaacgagctgtgctacaaggtcatcgtgaccagggagagcgggctccaggcagcccaccccaacagcatcttcctcatcgaccacgcctggacgtgccgtgtggagcacgcgcgccagcagctgcagcaggtgcccgggctgctgcaccgcatggccaacctgatgggcattgagttccacggtgagctgcccagtacagaggctgtggccctggtgctggaggagatgtggaagttcaaccagacctaccagctggcccatgggacagctgaggagaagatgccggtgtggtatatcatggacgagttcggttcgcggatccagcacgcggacgtgcccagcttcgccacggcacccttcttctacatgccgcagcaggtggcctacacgctgctgtggcccctgagggacctggacactggcgaggaggtgacccgagactttgcctacggagagacggaccccctgatccggaagtgcatgctgctgccctgggcccccaccgacatgctggacctcagctcttgcacacccgagccgcccgccgagcactaccaggccattctggaggaaaacaaggagaagctgccacttgacatcaaccccgtggtgcacccccacggccacatcttcaaggtctacacggacgtgcagcaggtggccagcagcctcacccacccgcgcttcaccctcacccagagtgaggcggacgccgacatcctcttcaacttctcacacttcaaggactacaggaaactcagccaggagaggccaggcgtgctgctgaaccagttcccctgcgagaacctgctgactgtcaaggactgcctggcctccatcgcgcgccgggcaggtggccccgagggcccaccctggctgccccgaaccttcaacctgcgcactgagctgccccagtttgtcagctacttccagcagcgggaaaggtggggcgaggacaaccactggatctgcaagccctggaacctggcgcgcagcctggacacccacgtcaccaagagcctgcacagcatcatccggcaccgagagagcacccccaaggttgtgtccaagtacatcgaaagtcccgtgttgttccttcgagaagacgtgggaaaggtcaagttcgacatccgctacatcgtgctgctgcggtcagtgaggcccctacggttgttcgtgtatgatgtgttctggctgcggttctccaaccgggcctttgcactcaacgacctggatgactacgagaagcacttcacggtcatgaactatgacccggatgtggtgctgaagcaggtgcactgtgaagagttcatccccgagtttgagaagcaatacccagaatttccctggacggacgtccaggctgagatcttccgggccttcacggagctgttccaggtggcctgtgccaagccaccacccctgggcctctgcgactacccctcatcccgggccatgtatgccgtcgacctcatgctgaagtgggacaacggcccagatggaaggcgggtgatgcagccgcagatcctggaggtgaacttcaaccccgactgtgagcgagcctgcaggtaccaccccaccttcttcaacgacgtcttcagcaccttgtttctggaccagcccggtggctgccacgttacctgccttgtctaggcactcgctgtccccaaaacctgtgcttggggcaggattccaacctcagttctctgagctgcttctgcaaaggcccccatgtccctccccacaccggccctgggcatagcctcagccccaggcctctgtcctgccgagccatcctcccggcgccacactccgggagcacagcatcctcctctcacctgtgggtcagagcaggacagtgatggtgtccccagggctgagcaccaccccacgccctgccctcacccctcaccaccatctgtgcactgatgagtctccagtttagccaagggcttcgttcctggcatggagaatttgttcctggctgctgtgtttccagggggtgctgggggaagggttccgtggagcgagacaaggtgtcctcgggagcagggttccaccgggaagcgtttgggagccctgtatcacacggggcaggcgggtttctcttccggggtctctgctcttatgcatcaggacgaccccgggacggctgtggggccccacactgcacccacagggctctatgcgacaggggcccaggaacagcctgaggccaccacccagcaagcccgccttatcacccattccagctcacccagaaccttcaccagcaaacctcctgctgaggtcctggcaggaggccaccgtcttgttaccgtttccttttcgtttgctgagggtcacagaccccaacagggaaatcagtatctgtcttcccagtggttgccctgctcgccgggcactccacggggtcccgcccttgtgtgagatgggccaggatccttcggcaaggggcgcctggggctggggctgattgtgggcggtggagcgccagacagaaaaggattccaatgagccccagccccaggcgccccttgccgaaggatcctggggctggggctgattgtgggcggtggagcgccagacagaaaaggattccaatgagaacttcaggttaaagtcagatgccacctaccagggtctacagtcaaaatgttggctttttcttattttttaatgtatgggagaaaaatgtaaaattccagttcttttctaattgtgtttctgaaattaggagtcagctgccagcgtttttgtgtggctgcagtgtgcctgggcccagctcacgggcagtgggtggacctaactgcccaggcaggcgagagctacttccagagccttccagtgcatgggagggcagggctaggtgtagcggtgtctcctctttgaaattaagaactatctttcttgtagcaaagctgcacctgatgatgctgcctctcctctctgtgttgtctgggcccttgtttacaagcacgcgttacccttcctgaggggagccatgctctagcccctggagggcctgttgcaggggcagggcgggcccgtcgcctttggcagctcctggagagctgtggacatgcagtccccctcagttcgtgctgcaataaaggccatcttctctt

SEQ ID NO: 13905 - DNA, 2271 bp, Homo sapiens
  SIMILAR (913)..(1065): 471254mologous to Homo sapiens Human secreted protein sequence encoded by gene 33 SEQ ID NO:86,accession number B25697,Smith-Waterman Score=115.
gagggcagggccgacggacggcgggcggcggcggcggtggcggcgctggagtcggcgcgggtgctggcgccatggaggccgagcggggtcccgagcgccggcctgcggagcgtagcagcccgggccagacgccggaggagggcgcgcaggccttggccgagttcgcggcgctgcacgtctggagtggtgaaggcattggggtggggtctcctgcccacacccctgctgacgggaactctggcccccaggttttcgacgctggggaagtgtttgggatcatgcaagtggaggaggtagaagaggaggaggacgaggcagcccgggaggtgcggaagcagcagcccaaccctcttgctcccccgacttccctttgccccatgcccacccggcagcctcacattgtggcctgtgcccgcagcatcttcctcatcgaccacgcctggacgtgccgtgtggagcacgcgcgccagcagctgcagcaggtgcccgggctgctgcaccgcatggccaacctgatgggcattgagttccacggtgagctgcccatctgggttccggaagggagttccggtgggtggatgggtgagcgagaggtgccatatgtgctctgtctgcagacagctgaggagaagatgccggtgtggtatatcatggacgagttcggttcgcggatccagcacgcggacgtgcccagcttcgccacggcccgccctggaggaggggcctcagcccagtgtcccgtcaccccctctgatgggcactcatgtcttggcacagaggaggtgacccgagactttgcctacggagagacggaccccctgatccggaagtgcatgctgcccctgtcctcatctcaccgaggcatggaaacaccctgtgttcacacatcgcgtgcctccctccctctgcaggcctgcgagttaccatcatggtcactgttattgataaatgagccaccacggccggcctttccctcccttccttgacctcatctctacttccggtgtgtttccttttaggccattccagggctagtgctggagtcccgcttggacacttgggagccgggatcacccagctcgggctctccccacagggtctacacggacgtgcagcaggtggccagcagcctcacccacccggccctcccagtcagggcttctaggcactgccggcctccccttgagctggcgcacctgcctccgccctgcaggaaactcagccaggagaggccaggcgtgctgctgaaccagttcccctgcgagaacctgctgactgtcaaggactgcctggcctccatcgcgcgccgggcaggtggccccgagggcccaccctggtgggtcctggggtggcaccatctgggaacacaggccccaggcgccccccagacagcccttctgctccccaggggcgaggacaaccactggatctgcaagccctggaacctggggctttgtgtgctcgggagccccagggggctctgtcctggccaccagcgagcttgcacctgtgtcctccaggttgtgtccaagtacatcgaaagtcccgtgttgttccttcgagaagacgtgggaaaggtcaagttcgacatccgctacatcgtgggtggcacctccctcgcagggacaaggccgctcaagaacccatatgtgtctgcacacttgtcttccagggcctttgcacagggcaggcgggggcggggaggccccacctggtccggctggctgctggcccgtgaccctgcccgggtctaggacctcctgtcctccctggtgcacagtgttgagcggtgccccatgcagtgggcactcagtgaatggcagctgcaccatctgagcacctggagctcaggcctctgtggcctggctggttaatgagtgtttcagatgcacagaacacctaccccaccctagtagcaggctgcctgctcccggcccagcggaggcctgtacagagcgtgatgggccctgtgtctgttgccaggggcagcagaccccctcttgagaggctgttctgagcaggcctcgtaactcaggctccccggtccccaggctgagatcttccgggccttcacggagctgttccaggtggcctgtgccaagccaccacccctgggccttccccaggccactgtccctgcagagtggaggccaacgagccttcacactctgctgcgctctttgccatcaggaaggcgggtgatgcagccgcagatcctggaggtgaacttcaaccccgactgtgagcgagcctgcaggtaccaccccacct

SEQ ID NO: 13906 - DNA, 600 bp, Homo sapiens
  SIMILAR (670)..(1299): 871254mologous to Homo sapiens putative p150,accession number U93563,Smith-Waterman Score=957.
atggaagagcagagagttcagttcactctttggctccacttttcccctcatggcatttgccaatttgaaagtggaagacaagaggctaagaagctgaagggctctggacagcctctcaagactggggaaataaaaactggaattcagaaatatcgaagagaagccctgctccagcactaccttgggccagcatctctggcgggcagaagtaaggcactgacaggcacagcagagaggtcctgtagctctggctcagacagcagcatcttcactctctgtgtcaattataatgacagcagagccatcatgaagactcttgctgccatcgggacaggatttgactgtgctagcaaggctgaaatacaattggtgcagattctggggatgcccccagagaggtttatgtatgcaaattcttgtaaacaaatgtctcaaattaagtacactgccaataatggagtccagatgatgattttcggtaatgaggtcaagttgatgtcagttgccagaacacactcaaagcagcccgtcacatcagtgttaaatctggtgccatgctcaaagccagcaggcttcttttggaatgagcaaaagaactaa

SEQ ID NO: 13907 - DNA, 2153 bp, Homo sapiens
  SIMILAR (161)..(505): 691254mologous to Homo sapiens MAD2,accession number AJ000186,Smith-Waterman Score=358.
atgagttctgaaaacggcttttcacgccgggaccactttgaggaacacacagcaaaacggggccaattacaacagccagaccgctccgtttgttttaagaacaaccactttctaaaccttcctgcgggactctcaaaggcagcccttcctttgccgccagaaccgtatcccatcgcccagcacttgccacaggccggacaagatctcccaacttccgcctctgttcccaacaccctacgtgtttctcttcctcctcatttacgtatttacaataaaacagcgaagctgcacagtctgtctctaaatcaaactcggttaccatcaaagcctcagactctatgtctcaaccgcaaaatgtctgacaggaaatcaactcgggaatttgtcaattctttagactcaaagctctcacccaccactcgaggctccggaaagaaccgcgggccagagggcaaccaggcccagcctcttgacgcactctcggcacaagcccaagtcaccccaaccctgagccaccaagagccacggagacgccatgagcctcaggatcacctcacgtctccgggacatcttgagcccctgagacgacctgaaccctgggccatctcggtccaccacgccaaatttcccaccggcgcgctgagcaatcggcggcagatggccaatacccagaggccgccccccgacacgccccggagagggcagatttccagtactttaaagagggcatatttgcagcaagttcgtgaagttgcaaggttgggtttccagcaaattccagagaacagatttacagcaaagtccaccagtgcagccattcagatcaccaggggaactgtcaagacccctgatgcccagcctgagcccacagatgcccatgtgcctggtgggggcagccaactcggggttcagaagctgcaggcgcctctcatggtggccaggccggatcacctacttgcagctccacgcactgtcagcaacaggatcaggacgttgaagcctcacaccgaccaacgaggcagttcaacagagtctgcagcctcgaatccagatcacagagggccaggctacagtgacctttctggattctgtaccttgacgttttcatgccgagaaagcaaacaggaaagacgccttttgaacgctgtagtcaaagtttccgctaagaccactgcagaaagctcagcttctcagacctcaggcaagcttgaaagtactttcctctaccattttaaagagaaagggagttgtgcttcactcgcggtcattaacccaacaacttgggctagtctcagagggacacttgctcttctgagcacagcccaggaaaaggcagaaagaaattattcgagtggaccccaaggaaaatacgctgttgggatgcacatcctaggtagtgcgcggagcagatgctcctgggatcccattcaaagccgacccaaggtccttcctgctccaggccctgctcagctgtccagaacccaagctcaaaagaatttggagaaggaatttaaagtcttccttaatagctctgaggttcttggacggaggaggggccctgaaaggagaggcaaggaaagcgccatggaggggcctccgtggacagggccaagccagcgggagccagccctgagaacaggcggcgcccatgggccctccgcaggcccccagcaggaactgtcttgggagccttgtaccggagggaataggtggctgaggtggcagccccatgagaatggaggccttctgccaaaagccacagtggagtcaagggctccagtcaacgtcttggcggaaacaatgctttctccacaagccctgtacaatcttctcagccaggtagaggctgcctggtggatctctcatggctacgccacctgccgcattttgcacactcatgagttactttcagtgcttgactggctgtatgtaaaacacagaagtgaaaccaatcagaaaataatccgaaggccaaatggcaccttatgtcagtcattcactgacacttgtggaatggctctgacagatacgctgaagaaggtagacaagtccaggtctggtcagggacatatgagccattctgaatcttcagaatggaagtggtttaatacagaatcagaagcttatatggctcctggaaggcaggggctaag

SEQ ID NO: 13908 - DNA, 438 bp, Homo sapiens
  SIMILAR (658)..(1536): 951254mologous to Homo sapiens putative p150,accession number U93568,Smith-Waterman Score=1457.
  misc_feature (1)...(438): n = a,t,c or g
cgggggnaaaagaaaggtggganaggaatcccttggacttacagaaccataaaacatttccccaaataacatttttaaaaggaatgtaataataattaacactgaagtgattgattatatattacccttctatttgggacacttgggtggttttcaatgcctagagttttaaaatgcatataaattacagcctttgagagatgattgtattttcttgaaacaggagtcttctgtgtccaggtccccgcccaacagtgttgatgtagtgttcctgggtcctgcaggcgtccactggaggaagccggatggcgcgggcttggtctttcaggaaggctggctggcaccgggcttccttctggctccagggggaaccgtacagaacggggagaaagggggaagctggtgagaggcagaaggggcgtcacaaggtggctctcc

SEQ ID NO: 13909 - DNA, 632 bp, Homo sapiens
  SIMILAR (632)..(414): 391254mologous to Homo sapiens Human secreted protein encoded by Gene No. 5,accession number W73401,Smith-Waterman Score=80.
  misc_feature (1)...(632): n = a,t,c or g
ccccaatgggaaacaaanaaaatgtgggtaaggggggaaaccaacggggggaaaanaaatggtgggaaaangaatcccctgggacctnaacangatccataaaaacattcccccaaataacattttaaaaggatggtaataaatattaacactgaagtgattgattaatatattaccccttcctatttggggaacacttgggtggtttttcaaaagccctaaaatttttaaaaatgccataataaaattacaacctttgaaaagatgattgtattttccttgaaaaacaggagtcttctgtgtcccaggtccccgcccaacagtgttgatgtagtgttcctttgttggggggaaaaaaaatcagtactgcctaactggagatgctggatgccttcaagaaaaacattccctgggtcctgcaggcgtccactggaggaagccggatggcgcgggcttggtctttcaggaaggctggctggcaccgggcttccttctggctccagggggaaccgtacagaacggggagaaagggggaagctggtgagaggcagaaggggcgtcacaaggtggctctcccacccccaagtgcaaaggcaggcggatgcggggacctgttcgccgtttgagcctgg

SEQ ID NO: 13910 - DNA, 1003 bp, Homo sapiens
  SIMILAR (265)..(1152): 411254mologous to Homo sapiens p40,accession number U93567,Smith-Waterman Score=407.
  misc_feature (1)...(1003): n = a,t,c or g
gtactgcctaacctggaggatgctggatgccttcaagaaaaacattcctgtgattnaaatttttaaaaaatttatgttcaattctggtttatcaaacaacctgggtatcttgtctcacaacttacccgaaaatgtccgaattttaagattttagaagtttagaactaagctccttccctagtttaaagggcccacgtctgtcctaataaactttatacaatggcccacgtgcacgcagccttccctcactaacaaataacatgtgttggggaaaaaatgagaaaatagtggaaaggtgccctccttggaggtggtaacatcgggtcaattaatcagctgagtataaattgattcactttatacaagtctcccacacattatgatgcacatttagcaacgctgaaaaacaatttaaaagaataccttagggagttgttaaagagaatttatagtctggaacgaattgcaatcttcttaattgacacagaaatgtttggctaaaatattgctttattcacatttttgtccttggaggaaaatctaggcacactgcaacttggatcgtgtaaataaaggtacaaggaatgttttaagtcagaaaagggcatcacgcagtcagggggctgtgtggacgagctcaatttcgatgcatctcgggagacccgggcaaaaggccgcttggattccgggaggcaacgccccaaagtcaggatcccttgctcgccgcccccaaccggtcaggatccctggctcgcgtccccaaccggttccgtgtctcacctgggtcctgcaggcgtccactagaggaagccggatggcgcgggcttggtctttcaggaaggctggctggcaccgggcttccttctggctccagggggaaccgtacagaacggggagaaagggggaagctggtgagaggcagaaggggcgtcacaaggtggctctcccacccccaagtgcaaaggcaggcggatgcggggacctgttcgccgtttgagcctgg

SEQ ID NO: 13911 - DNA, 1503 bp, Homo sapiens
  SIMILAR (934)..(1452): 421254mologous to Homo sapiens beta-glucuronidase precursor (EC 3.2.1.31),accession number M15182,Smith-Waterman Score=267.
gtgagggtggcccatattcctattgctgcagcagaaattgctgccatccctgacagaggagggcacctgagtgttggaaagcggaaactcacattttggtttttctatggagtgttgccattcagggatgtggccatagaattctccccagaagagtgggagtgcctggactctgctcagcagcatttgcacagggatgcgatgttagagaactatggaaacctggtgtctctggctgcaggagatcaaagccttccaggagatgcagctgcttcagctgtctgcagacaattatcaccttcagcctgtggggcaattttgggtctgcctccagttaatggagtggctccagtaagactgagaggtgaaattgtgacatatacatggtcacagctcactggcctggcactcgccctcagcaaagatggcgcggacggtctcaggcgcctcacgcgacccacccgccgggctcctccggcgctgctcttagccccgcagacggctgccgagcggtggagaggaaagtgtgatccgaggcacggcggtggctgcgccctggcgctgcagggctggacgctgtatccccgggagagcccgtcgcgggagtccaaggagctgggcggcctctggagcttccgcgccgacttggacagtcgacgccagggcttcgaggagcagtggtacccgcggccgctgcgggagctgcggggcaggggcgggaggcgcccggaagcccggcggtgggagggggggagccctggtccctgcaggctccttcccctgagcgccccggagctggcgccctacaggaagttaaaggtcaatgggcttaggggcgcaggcttgggggacggggagaccgggggaactggggagggccgaggcgggagaagaaggaagcgctgctgccgaaccctctcacgagacgaaggcttcaacgacatctgtcaggactggtggctgcggcagtttgttggctgggtgttgtacgaacaggaggtgaccctgccggagcaatggacccagcacctgcgcacaagagtggtgctgaggattgccagtgcccactcctatgccactgtggtcagtgcagccaggagcaggcagggtagggggataggtggcctgatctacacccttgggatgccattcttcctgtctggctggcaggtccctgagccccatgctgcgggttatgtgagggagtgcctgatagcagggcccctcctcatgccccaacctgctgccccctcctcatatctcctgtgtctgcagtgggtgaatggggtcgacacgctagagcatgaggggccgacagcagcagtctggtccagaacacagactttgacttcttcaactacgcgggactgcagcggtactgtgcttctgtacacgacacttaccacatacatcgatgacatcaccatcaccaccggcgtggagcatgacagtgctgagataccaatttttcctgaatatctcagggtgaatactgggaactga

SEQ ID NO: 13912 - DNA, 307 bp, Homo sapiens
  SIMILAR (877)..(590): 331254mologous to Homo sapiens salivary proline-rich protein 1,accession number K02576,Smith-Waterman Score=125.
cacctccaagtatcccaagggttactttgtccagaacacatattttgactttttcaactacgctggactgcagcggtctgtacttctgtacacgacacccaccacctacatcgatgacatcaccgtcaccaccagcgtggagcaagacagtgggctggtgaattaccagatctctgtcaagggcagtaacctgttcaagttggaagtgcgtcttttggatgcagaaaacaaagtcgtggcgaatgggactgggacccagggccaacttaaggtgccaggtgtcagcctctggtggccgtacctgatg

SEQ ID NO: 13913 - DNA, 427 bp, Homo sapiens
  SIMILAR (235)..(11): 731254mologous to Homo sapiens zinc finger protein,accession number L15309,Smith-Waterman Score=291.
cataataacctgggtgtttggctactgtcttctgtctccttgcattccaaggctcttttctttgctccagacaggtcatcaagtctggcttaaagatagcaagacccaaggagaccaggtttccgtagttctctaacatcacatccctatacaaacgctgctgagcagagtccaggcattcccactcttctggggagaattctacagccacatccctgaatgtcaacactcccatttcccagcctccagatgttccgccgtcctccctatggatctcccagtacctgcaggtcacaggataacagaagctatagtagagtcaccgaggaactccaggaacggaggagatggaacagtggagacgcgaactaggatcagagcccggaagctaggagacaaaggccccgccatattgaagaggccgccc

SEQ ID NO: 13914 - DNA, 2835 bp, Homo sapiens
  SIMILAR (154)..(378): 521254mologous to Drosophila melanogaster Melted,accession number AF205831,Smith-Waterman Score=199.
atgggcaaatattatacgcaaggcgacaaggtgctgatgccgctggcgattcaggttcatcatgccgtttgtgatggcttccatgtcggcagaatgcttaatgaattacaacagtactgcgatgagtggcagggcggggcgtatcccaagggttactttgtccagaacacagactttgacttcttcaactatgcgggactgcagcggtctgtgcttctgtacacgacacctaccacctacatcgatgacatcaccatcaccaccggcgtggagcatgacagtgctgctgccccgatggtggattcgttaattgcgcgcgtaggagtaatggctcgcggtaatgccattactttgcctgtatgtggtcgggatgtgaagtttactcttgaagtgctccggggtgatagtgttgagaagacctctcgggtatggtcaggtaatgaacgtgaccaggagctgcttactgaggacgcactggatgatctcatcccttcttttctactgactggtcaacagacaccggcgttcggtcgaagagtatctggtgtcatagaaattgccgatgggagtcgccgtcgtaaagctgctgcacttaccgaaagtgattatcgtgttctggttggcgagctggatgatgagcagatggctgcattatccagattgggtaacgattatcgcccaacaagtgcttatgaacgtggtcagcgttatgcaagccgattgcagaatgaatttgctggaaatatttctgcgctggctgatgcggaaaatatttcacgtaagattattacccgctgtatcaacaccgccaaattgcctaaatcagttgttgctcttttttctcaccccggtgaactatctgcccgggattttgccgatttcggaaccaccatcaaacaggattttcgcctgctggggcaaaccagcgtggaccgcttgctgcaactctctcagggccaggcggtgaagggcaatcagctgttgcccgtctcactggtgaaaagaaaaaccaccctggcgcccaatacgcaaaccgcctctccccgcgcgttggccgattcattaatgcagctggcacgacaggtttcccgactggaaagcgggcaggattttgccgatttcggaaccaccatcaaacaggattttcgcctgctggggcaaaccagcgtggaccgcttgctgcaactctctcagggccaggcggtgaagggcaatcagctgttgcccgtctcactggtgaaaagaaaaaccaccctggcgcccaatacgcaaaccgcctctccccgcgcgttggccgattcattaatgcagctggcacgacaggtttcccgactggaaagcgggcagtatcccaagggttactttgtccagaacacagactttgacttcttcaactatgcgggactgcagcggtctgtgcttctgtacacgacacctaccacctacatcgatgacatcaccatcaccaccggcgtggagcatgacagtgctgaatctctttgccttgaataccagggtccacctctgatgttcactgaagagtaccagaagagtctgccagagcagtaccatctgggtctggatcaaaaacgcagaaaatacgtggttggagagcttatcgggaattctgccgatttcacgactatgcagtacgctgatgacacatcaatctacatgttttatcaaaaggtcggcgacaactcaatcgacagctggaaaaacgcgggccgtgtctttaaagacagcgataagttcgacgccaacgatccgatcctgaaagatcagacgcaagaatggtccggttctgcaacctttacatctgacggaaaaatccgtttattctacactgactattccggtaaacattacggcaaacaaagcctgacaacagcgcaggtaaatgtgtcaaaatctgatgacacactcaaaatcaacggagtggaagatcacaaaacgatttttgacggagacggaaaaacatatcagaacgttcagcagtttatcgatgaaggcaattatacatccggcgacaaccatacgctgagagaccctcactacgttgaagacaaaggccataaataccttgtattcgaagccaacacgggaacagaaaacggataccaaggcgaagaatctttatttaacaaagcgtactacggcggcggcacgaacttcttccgtaaagaaagccagaagcttcagcagagcgctaaaaaacgcgatgctgagttagcgaacggcgccctcggtatcatagagttaaataatgattacacattgaaaaaagtaatgaagccgctgatcacttcaaacacggtaactgatgaaatcgagcgcgcgaatgttttcaaaatgaacggcaaatggtacttgttcactgattcacgcgccccgcagacggctgccgagcggtggagaggaaagtgtgatccgaggcacggcggtggctgcgccctggcgctgcagggctggacgctgtatccccgggagagcccgtcgcgggagtccaaggagctgggcggcctctggagcttccgcgccgacttggacagtcgacgccagggcttcgaggagcagtggtacccgcggccgctgcgggagctgcggggcaggggcgggaggcgcccggaagcccggcggtgggagggggggagccctggtccctgcaggctccttcccctgagcgccccggagctggcgccctacaggaagttaaaggtcaatgggcttaggggcgcaggcttgggggacggggagaccgggggaactggggagggccgaggcgggagaagaaggaagcgctgctgccgaaccctctcacgagacgaagggtga

SEQ ID NO: 13915 - DNA, 2937 bp, Homo sapiens
  SIMILAR (2530)..(2868): 781254mologous to Homo sapiens beta-glucuronidase precursor (EC 3.2.1.31),accession number M15182,Smith-Waterman Score=480.
atgatcacctttgacttcatgtctcacatccaggtcacactgatgcaagaagtgagcttccatggccttgggcagctccgcccctgtggctttgcagggtatagcccccctcctggctgctttcataggctggcatccagtgtctgcagcttttccaggtgcacggtgcaagctgcagtggatttgccattctggggtctggagggcactagccctcttcttgcagcttcactaggcagtgccccagtagggactttgtgtgggggctctgaccccacatttccctcctggactgctctagcagatgttctccatgaggagggccacacccctgcatcaaacttctgcctgcgcaatctggctggggaggcctcacaatcatggagaaaggagggactggggaccccaaggcccactgcttcttccacggaggaactccagaccctgaatgaggattctcgtcttatgacgtccccgcacaatctggaggagactcgggattgcgacacagagctgcccaaaaagtctctgggctggaaagaaattcgcgtttatggacaaaacaagacgctcgggttttggctgcaggctcagctcctaatctgcgacggagggaacctccggatgttccgccttcttccctatggatctcccagtacctgcaggtcacaggataacaggggctatggtggagtcaccgaggagctaatggagcggaagagatggaatagtacagacgggttccacatacagggagtgttggagcagggagtcaatctagaatcagaacttactggagatgacaggagcattggaccagcttactcacaccagttatccaggataccaggcctggcactcgccctcagcaaagatggcgcggacggtctcaggcgcctcacgcgacccacccgccgggctcctccggcgctgctcttagccccgcagacggctgccgagcggtggagaggaaagtgtgatccgaggcacggcggtggctgcgccctggcgctgcagggctggacgctgtatccccgggagagcccgtcgcgggagtccaaggagctgggcggcctctggagcttccgcgccgacttggacagtcgacgccagggcttcgaggagcagtggtacccgcggccgctgcgggagctgcggggcaggggcgggaggcgcccggaagcccggcggtgggagggggggagccctggtccctgcaggctccttcccctgagcgccccggagctggcgccctacaggaagttaaaggtcaatgggcttaggggcgcaggcttgggggacggggagaccgggggaactggggagggccgaggcgggagaagaaggaagcgctgctgccgaaccctctcacgagacgaaggcttcaacgacatctgtcaggactggtggctgcggcagtttgttggctgggtgttgtacgaacaggaggtgaccctgccggagcaatggacccagcacctgcgcacaagagtggtgctgaggattgccagtgcccactcctatgccactgtggtcagtgcagccaggagcaggcagggtagggggataggtggcctgatctacacccttgggatgccattcttcctgtctggctggcaggtccctgagccccatgctgcgggttatgtgagggagtgcctgatagcagggcccctcctcatgccccaacctgctgccccctcctcatatctcctgtgtctgcagtgggtgaatggggtcgacacgctagagcatgaggggccgacagcagcagtctggtccagggaccatctgctacatgatcaacacctccaagtggataccatcttgtctccaccgcatgcacctaccttcccatcccaccctgtggtcttcctgctagggacagggtggccttggcagagtggaggacctggatctgaggagacctgtgagctgaggtcaagggactcagggcaagggcccagcgaaccactgtcctccgaccctaggtatcccaagggttactttgtccagaacacagactttgacttcttcaactacgcgggactgcagcggtctgtgcttctgtacacgacacctaccacctacatcgatgacatcaccatcaccaccggcgtggagcatgacagtgctggcatattagggatgctatcaggtgggatcgataggttaatatccccagaagtgatatgggctggtgaattaccagatctcctcaagtgcagcaaccagatccagttggaagtgcatcttttggaggcagaaaacaaagccatggccactggggcctttactcagggccagctgaaggtgcggctgactgcacagacgtcactggggcctttgtctgacttctacacactccctgtggggatccgcactgtggctgtcactgagagccagttcttcatcaacgggaaacctttttatttccacagcatcaacaagcacgaggatgcggacctgcgtttgtgctcctgggtcctcgttggggctgcttctggtcaccttccacttttgccttccatcctagggaagggcttcaactggctgctgctggtgaaggacttcaacctgcttcactggcttggtgccaacgccttctgcaccagccactacccctacgcgggggaagtgctgcagatgtgtgaccgctatgggattgtggtcattgatgagtgtcccgctgtgggcctggtgctggtgcagcttttcaacaatgtgtctgtgcatcaacacatgtgggtgatggaggaactggtgtgcagggacaagaaccaccccgccgtggtgatgtggtctgtggccaacaagcctgcatcctacctggaacctgccggctactacttcaggctggagatcagtgacatgatcttggctctctacaacctccgcttcccgggtttaagtgattattttgcctcaggctcctga

SEQ ID NO: 13916 - DNA, 472 bp, Homo sapiens
  SIMILAR (326)..(424): 511254mologous to Canis familiaris brain-specific synapse associated protein, Bassoon,accession number AJ012166,Smith- Waterman Score=65.
aggagccaaagcactgtccagaaaggctggaacttggcctcccagtgagccggcttctgcctcttgaagtcatattcttcccggagctcctggagcacccgcttggtggacccggtggccatccacacttcctgagccatttcctcgtggaagaggatctcccgctggaacttctccaatttctagaccaggtcttgtgcaatcttcttgagccagtcgcgggtctgactcacggcttccagttgtcctgcatcttgccaagcctccggtccaggtccagacagtaggcgtcctcctccatgcactcctgctgaggccccatcacggctctctgcccagtgcaggaagagtgggggcctcagctgcagctgcaggacctccgtctccagccgtgcccttgccccctgcagagaggcctgctccctgagcacagattggatttgggctctcactttttaaccggacgcgtggg

SEQ ID NO: 13917 - DNA, 952 bp, Homo sapiens
  SIMILAR (384)..(599): 361254mologous to Homo sapiens Human secreted protein sequence encoded by gene 6 SEQ ID NO:140,accession number Y91419,Smith-Waterman Score=71.
atggggcctcagcaggagtgcatggaggaggacgcctactgtctggacctggaccggaggcttggcaagatgcaggacaactggaagccaaaatggccttctttcattgaaaaggttttaggcttacagctctgtgaattggaatttgaaagttgtcaatgctgtgttgatttactcgagttactgatgataggagccttttggtgtattggagctcttttggatgtacgtgcagaaacccaactgaaactgacctccactgaaatggcccttgaccagaccaccagtgaacaccacgttgccaaatgtaatggcaattctaaactgccttctcactcaacttccagggaggtgtggagggagaggtgtgggcaggaaccagagctgcgcgtggcgcttgtgctggtgagcgtgggctcggcgggtcccgcactcggagtggctggctggcactgccggccccgggcaggcagggcacgggacctgcagcctgccatgcccgagcctccccccggccatgggctcctgcgtgtccgagcctccccgacaagcgccgccccctgctccatggcgcctggtcccatcgaccgcccaagggctgaggagtgtgggcacacagtgcgggactggtggcagctccgcctgcggcccttgtgtgggatccaggattctaaacgcaccaatcagcaccctgtcaaaatggaccaatcagctctctataagacagaccaatcagctctctgtaaaatggaccaatcagcaggatatcatcagcaactcatgaaagtcagcaagtatacaggatcactgaaaagtttatcactggagcagagctttactcagtatttgaatgacgagagtagtgtttggtcctctcccattttcagaactaagaaagcaggcaaataccaaatttacgtatacctgcatgtcaactgggttgcaaaaggaa

SEQ ID NO: 13918 - DNA, 492 bp, Homo sapiens
  SIMILAR (108)..(236): 1001254mologous to Homo sapiens Human secreted protein, SEQ ID NO: 5998,accession number G01917,Smith-Waterman Score=223.
  misc_feature (1)...(492): n = a,t,c or g
nagcgcggntnnnnnnnaatacgganaattttgctnactgtgcgtggaattccgcgattcgtgccggccggtcctggttctccggtcccgccgctcccgcagcagccatgtcgttcttcccggagctttactttaacgtggacaatggctacttggagggactggtgcgcggcctgaaggccggggtgctcagccaggccgactacctcaacctggtgcagtgcgagacgctagaggcggcttttttccaggactgcatttcagagcaggaccttgacgagatgaacatcgagatcatccgcaacaccctctacaaggtaatgccccacacaagccatgggggattggcctgtcggtgggtggggctgtgggaagtggtanggtggtgatttatgtgaggtgctgggacaggatgcagctatgtcaggctcctatcccagggacttactgcttattctctggctcccatgctgggcacaaggctgtgtggaa

SEQ ID NO: 13919 - DNA, 1446 bp, Homo sapiens
  SIMILAR (627)..(1445): 601254mologous to Mus musculus Ac39/physophilin,accession number U21549,Smith-Waterman Score=647.
atgctgacttcagcggtgctgagctgagccttgatgttggcactgcttgccacgagaggagcccacatgggctttgcccccatggagggcatcagaaggcctgaccaggccctgctcccagagctcccaggcctgggccttcgggccccattgaagaagacagttgcataacaggcataagaggatctgttgcaggaggctcaggccttggcagaggtaactgctcagggaaaagggttgggacaggtaagatccctggatctgtctttagaggcctgtgctggttccccacccctgcaggtactagacctgcaggaccgcgagccccgctccctcacgtcgctgccgtcaagtgcagcaaaccggggaaagctagagaaggcccagtcaaatccctgcggccacaggcgccaccaagcggccggcctcaaacttcctctttttagcgcgcaggcgccgcagggccagcccacgcctgcaccgcgcttccgcgcagccacccggaagccgggcaccgctcagagccacgcccccttatggtcaccagccatgtcgttcttcccggagctttactttaacgtggacaatggctacttggagggactggtgcgcggcctgaagggctgggcgagctcagccaggccgactacctcaacctggtgcagtgcgagacgctagaagacttgaaactgcatctgcagagcactgattatggtaacttcctggccaacgaggcatcacctctgacggtgtcagttcatcgatgaccggctcaaggagtaagatggttggtggagttccgcccacatgagggaaccatgccttatgagcccacttcgcctagcttcccttagacttccattaccttacagtttacatgattcgacaacgtgattcctggctcattcacagggcacgcttgcaccagcgctccatcgctgagctcgtgccccaagttgcccacccactagggcagcttcgagcagatggaggccgtgaacattgctcagacacctgctgagctctacaatgccattctggtggacacgcctcttgcggcttttttccaggactgcatttcagagcaggaccttgacgagatgaacatcgagatcatccgcaacaccctctacaaggcctacctggagtccttctacaagttctgcaccctactgggcgggactacggctgatgccatgtgccccatccctggagtttgaagcaaaaccgccgggcctttattaataccactaaatttttttgggcaccaagactgtcccaaagaaggaccggtgcccagccttttttccacattgggggcggggtttttccctgagggcccggcggcaatggggtttgggctgaacaaccttttaacaggggccaaaaaacggggcccatataatttcccggaagtccagctggcttttttaaggggcgacggcc

SEQ ID NO: 13920 - DNA, 1185 bp, Homo sapiens; identical to SEQ ID NO: 13091
  SIMILAR (349)..(498): 561254mologous to Homo sapiens Amino acid sequence of a human secreted protein,accession number Y19566,Smith-Waterman Score=148.

SEQ ID NO: 13921 - DNA, 517 bp, Homo sapiens
  SIMILAR (175)..(14): 471254mologous to Homo sapiens Human fibroblast growth factor 2 24 kD isoform N-terminus,accession number W99376,Smith-Waterman Score=96.
ctcgaatcctgggtcccggcgctgagctcgatttctcgccgggccttagctgccttcccgcaggacagggctccgggacctgcagcccgccatgcctgagcctcccacccactccatgggcacctgtgcggcccgagcctccccgacgagcaccaccccctgctccacggcgcccagtcccatcgaccgggaaggaacaaacaacccaagggctgaggagtgcaggcgcagggcaccgggactggcaggcagctccacctgcagccccggtgcgggatccactaggtgaagccagctgggctcctgagtctggtggggacgtggagagtctttatgtctagctcagggattgtaaatataccaatcagcaccctgtgtttagctcaaggtttctcaaggtttgtgaatgcaccaatcgacactctgtatctagctgctctggtggggccttggagaacctttatgtctagctcagggattgtaaatacaccaatcggcactctgtatctagctcaag

SEQ ID NO: 13922 - DNA, 464 bp, Homo sapiens
  SIMILAR (240)..(458): 681254mologous to Homo sapiens Mxi2,accession number U19775,Smith-Waterman Score=230.
gctatattctaatggggatggcagtggaagtagataataaacaaaatatatagtgtgtcagataagtgctgtggagaaaatgcaagaagggaaggagagtgagtgctaggatggctgttgcacttttaagaaaggtgaatacggtaagcatcattgataaagtaacaattgagcaaaaacctgaagaaggtgatataggacactggttggacatgggtgccaagtactttgtaggtgctcaagaaatatttgtggcaatttattgtcctgaaaacatggtttcctgggcctcgactctgagcagggcagcagatgtggcaagtgctgcttttgacacaaaaacggggttacgtgtggcagtgaagaagctctccagaccatttcagtccatcattcatgcgaaaagaacctacagagaactgcggttacttaaacatatgaaacatgaaaatgtaatgagctaa

SEQ ID NO: 13923 - DNA, 3757 bp, Homo sapiens
  SIMILAR (363)..(1445): 1001254mologous to Homo sapiens 31-MAY-1994 Human monocyte N5 cDNA encoding a CSAID binding protein 1,accession number V32885_cd1,Smith-Waterman Score=1899.
ggaaccgcgaccactggagccttagcgggcgcagcagctggaacgggagtactgcgacgcagcccggagtcggccttgtaggggcgaaggtgcagggagatcgcggcgggcgcagtcttgagcgccggagcgcgtccctgcccttagcggggcttgccccagtcgcaggggcacatccagccgctgcggctgacagcagccgcgcgcgcgggagtctgcggggtcgcggcagccgcacctgcgcgggcgaccagcgcaaggtccccgcccggctgggcgggcagcaagggccggggagagggtgcgggtgcaggcgggggccccacagggccaccttcttgcccggcggctgccgctggaaaatgtctcaggagaggcccacgttctaccggcaggagctgaacaagacaatctgggaggtgcccgagcgttaccagaacctgtctccagtgggctctggcgcctatggctctgtgtgtgctgcttttgacacaaaaacggggttacgtgtggcagtgaagaagctctccagaccatttcagtccatcattcatgcgaaaagaacctacagagaactgcggttacttaaacatatgaaacatgaaaatgtgattggtctgttggacgtttttacacctgcaaggtctctggaggaattcaatgatgtgtatctggtgacccatctcatgggggcagatctgaacaacattgtgaaatgtcagaagcttacagatgaccatgttcagttccttatctaccaaattctccgaggtctaaagtatatacattcagctgacataattcacagggacctaaaacctagtaatctagctgtgaatgaagactgtgagctgaagattctggattttggactggctcggcacacagatgatgaaatgacaggctacgtggccactaggtggtacagggctcctgagatcatgctgaactggatgcattacaaccagacagttgatatttggtcagtgggatgcataatggccgagctgttgactggaagaacattgtttcctggtacagaccatattaaccagcttcagcagattatgcgtctgacaggaacaccccccgcttatctcattaacaggatgccaagccatgaggcaagaaactatattcagtctttgactcagatgccgaagatgaactttgcgaatgtatttattggtgccaatcccctggctgtcgacttgctggagaagatgcttgtattggactcagataagagaattacagcggcccaagcccttgcacatgcctactttgctcagtaccacgatcctgatgatgaaccagtggccgatccttatgatcagtcctttgaaagcagggacctccttatagatgagtggaaaagcctgacctatgatgaagtcatcagctttgtgccaccaccccttgaccaagaagagatggagtcctgagcacctggtttctgttctgttgatcccacttcactgtgaggggaaggccttttcacgggaactctccaaatattattcaagtgcctcttgttgcagagatttcctccatggtggaagggggtgtgcgtgcgtgtgcgtgcgtgttagtgtgtgtgcatgtgtgtgtctgtctttgtgggagggtaagacaatatgaacaaactatgatcacagtgactttacaggaggttgtggatgctccagggcagcctccaccttgctcttctttctgagagttggctcaggcagacaagagctgctgtccttttaggaatatgttcaatgcaaagtaaaaaaatatgaattgtccccaatcccggtcatgcttttgccactttggcttctcctgtgaccccaccttgacggtggggcgtagacttgacaacatcccacagtggcacggagagaaggcccataccttctggttgcttcagacctgacaccgtccctcagtgatacgtacagccaaaaaggaccaactggcttctgtgcactagcctgtgattaacttgcttagtatggttctcagatcttgacagtatatttgaaactgtaaatatgtttgtgccttaaaaggagagaagaaagtgtagatagttaaaagactgcagctgctgaagttctgagccgggcaagtcgagagggctgttggacagctgcttgtgggcccggagtaatcaggcagccttcataggcggtcatgtgtgcatgtgagcacatgcgtatatgtgcgtctctctttctccctcacccccaggtgttgccatttctctgcttacccttcacctttggtgcagaggtttcttgaatatctgccccagtagtcagaagcaggttcttgatgtcatgtacttcctgtgtactctttatttctagcagagtgaggatgtgttttgcacgtcttgctatttgagcatgcacagctgcttgtcctgctctcttcaggaggccctggtgtcaggcaggtttgccagtgaagacttcttgggtagtttagatcccatgtcacctcagctgatattatggcaagtgatatcacctctcttcagcccctagtgctattctgtgttgaacacaattgatacttcaggtgcttttgatgtgaaaatcatgaaaagaggaacaggtggatgtatagcatttttattcatgccatctgttttcaaccaactatttttgaggaattatcatgggaaaagaccagggcttttcccaggaatatcccaaacttcggaaacaagttattctcttcactcccaataactaatgctaagaaatgctgaaaatcaaagtaaaaaattaaagcccataaggccagaaactccttttgctgtctttctctaaatatgattactttaaaataaaaaagtaacaaggtgtcttttccactcctatggaaaagggtcttcttggcagcttaacattgacttcttggtttggggagaaataaattttgtttcagaattttgtatattgtaggaatccctttgagaatgtgattccttttgatggggagaaagggcaaattattttaatattttgtattttcaactttataaagataaaatatcctcaggggtggagaagtgtcgttttcataacttgctgaatttcaggcattttgttctacatgaggactcatatatttaagccttttgtgtaataagaaagtataaagtcacttccagtgttggctgtgtgacagaatcttgtatttgggccaaggtgtttccatttctcaatcagtgcagtgatacatgtactccagagggacagggtggaccccctgagtcaactggagcaagaaggaaggaggcagactgatggcgattccctctcacccgggactctccccctttcaaggaaagtgaacctttaaagtaaaggcctcatctcctttattgcagttcaaatcctcaccatccacagcaagatgaattttatcagccatgtttggttgtaaatgctcgtgtgatttcctacagaaatactgctctgaatattttgtaataaaggtctttgcacatgtgaccacatacgtgttaggaggctgcatgctctggaagcctggactctaagctggagctcttggaagagctcttcggtttctgagcataatgctcccatctcctgatttctctgaacagaaaacaaaagagagaatgagggaaattgctattttatttgtattcatgaacttggctgtaatcagttatgccgtataggatgtcagacaataccactggttaaaataaagcctatttttcaaattt

SEQ ID NO: 13924 - DNA, 1017 bp, Homo sapiens
  SIMILAR (169)..(324): 511254mologous to Homo sapiens Mxi2,accession number U19775,Smith-Waterman Score=100.
caaaatatatagtgtgtcagataagtgctgtggagaaaatgcaagaagggaaggagagtgagtgctaggatggctgttgcacttttaagaaaggtgaatacggtaaataaaaacccatattatttattgtcctccctgcctttacagatgtaaacccctctcctcttttcatcagagctccccctcttttactgtataaataccccaaaataatatttagaacagctttttaatggtgggttttttcccttttttctccttagtgctgcttttgacacaaaaacggggttacgtgtggcagtgaagaagctctccagaccatttttaagacctgatgggtactatactgagtttaatatttatttactttttaatttttatattcttactagtagtgctgtgtgagttgtcctgagtcattcagtggtaattgagtgcctactatctatcagacactgttctcggtactttagaaagtcttctgaagataagaactttcttaggggttctagattgttatgtaacttttcactaatttctaggtatctggtgacccatctcatgggggcagatctgaacaacattgtctaaaggtacagataatacaagtaataattttttaaaatgaattctccctttctccccttacctgtagggggagaattgatcatgcatcataaagttgatcctgtctgttttgtttttttttccctgcctgtttctaagtcttagcagtttgtctgttcctcttctgccctttagattctggattttggactggctcggcacacagatgatgaaatgacagccaaggggcagccagagtgcttcgttaggtgggcctgtgcctcttgactggatgagacccctccaacaggggtcgccagacaccttatgcaagagcattcccactggcatcaggttggtgcccctctgggacggagctcccagaggaaggaacaggcagccatctttgctgttctgcagtctccactggtgacacctccaggtacagga

SEQ ID NO: 13925 - DNA, 784 bp, Homo sapiens
  SIMILAR (58)..(507): 881254mologous to Homo sapiens HT029,accession number AF250320,Smith-Waterman Score=657.
cttttccgcaagagggagatcgcagctggtgtgaactcttttctcctcccctaaaggcacattcaggaccccgcgagccagcggctgacgtggaacaagtccccaaagagcgtccttgtcatcaagaagatgagagatgccagcctactgcagccgttcaaggagctctgcacgcacctcatggaggcacgcggggcaggggggggccacgatgccaggtctctgaccacagcgcccgtgagtcgggaacctccctgcaggagggtggggtctgcaggtggaatgagcaggttggcactttgcttccaggagaacatgatcgtgtatgtggaaaagaaagtgctagaagaccctgccatcgccagcgatgaaagctttggggcagtgaagaagaaattctgtacctttcgagaagattatgatgacatttccaatcagatagacttcatcatctgcctggggggagacgggacgctgctgtacgcttcctcgcttttccagggaacgcagctgttgttctccggagtcggctgaaggtcagggtggtgaaggagctccgggggaagaagacggccgtgcacaatgggctgggtgagaaaggctcgcaggctgcaggcctggacatggatgtcgggaagcaggccatgcagtaccaggtcctgaatgaggtggtgattgacagaggcccctcctcctacctgtccaatgtggatgtctacctggacggacacctcatcaccacggtgcagggcgacggagtgatcgtgtccaccccgacgggcag

SEQ ID NO: 13926 - DNA, 1592 bp, Homo sapiens
  SIMILAR (641)..(1201): 581254mologous to Homo sapiens HT029,accession number AF250320,Smith-Waterman Score=441.
aaatcccccaagttctcatgatccttgcttccctttccagtcacccttggtgccctgtacttcactgtggtcctgaactgaagagctgtgtttttcaggaagacttggccaggccgtgttccgtgtctctggattcaagtcccaggagtcctgaccagagagcaggcatcagtgtttttctgaccgaagtgctaatttcctgacaatggagatggaacaagaaaaaatgaccatgaataaggaattgagtccagacgcggctgcttactgctgctcggcctgccacaggcgatgagacctggagttacaaccaccccatccggggccgggccaagtctcgcagcctgtctgcctcgcccgccctggggagcaccaaggagatcaggaggacacgctctcttcatgggccatgcccggtgaccacttttggaccaaaggcctgtgtgctgcagaacccccagactcattatgcacattcaggaccccgcgagccagcggctgcacgtggaacaaaggcccccaagaaccgtccttgtcatcaagaagatgagagatgccagcctactgcagccgttcaaggagctctgcacgcacctcatggaggagaacatgatcgtgtatgtggaaaagaaagtgctagaagaccctgccatcgccagcgatgaaaagctttggggcagtgaagaagaaattctgtacctttcgagaagattatgatgacatttccaatcagatagacttcatcatctgcctgggggtagacgggacgctgctgtacgcttcctcgcttttcccagggcagccgtcccctccggtcatggccttccacctgggctccctgggcttccttgacccccatcagctttgagaactttcagtcccaagttactcaggtgatagaggggaacgcaagctgttgttcttccggaagtcggctgaaaggtcaggggtggtgaaggagcctccgggggaagaagacggctcgtgcacaatgggctgggtgagaaaggcttcgcaggcttgcaggcctggaacaatggatgtcgggaaagcaaggccatgcaagtacccaggtcctgaaatgaggtgggtgattgacagaggcccctcctcctacctgtccaatgtggatgtctacctggacggacacctcatcaccacggtgcagggcgacggtaaggcccgcagcactgtcctggggccctgagcgtccctcgggcgggagtgacgcctgcgcctgtccctgtcaggagtgatcgtgtccaccccgacgggcagcacggcgtatgcggccgcggccggggcctccatgatccaccccaacgtgccggccatcatgatcacgcccatctctagaagcgtcctccccacagctgggggcccacacctctccctgcttgaccctcagatcatgctgtcacctgaagcaaggaacgccgggggtgggcctttctggaagccctggctcaggctgctgctctcccgtcccagcatcagcatcactacctcatgctacccgctcccctccatctgtgtgcgggaccccgtgagcgactggtttgagagcctcgcccagtgcctgcattggaacg

SEQ ID NO: 13927 - DNA, 473 bp, Homo sapiens
gacaaacatccatactatatcccagcacactcagcattaatcattaggtcaacttgtccctgacctgcttccttatagttgtttactgcctattttctcagaagtatgtagactctgctacaagatcatagttcacctcaactactttatagataacaacttaaatattaaggaaacattaagttttccctttgaaatattgtttcaggtcctgcatgccagtaaaactactcatgtcagctgttctgcaggatcccatgagaaggtgagtcaccagaaaatgcagtttccacatcctgatgatttcatctccctaccccaactgatcaatttctccaattttccagcctctcaccctccacaatccccttaaaaactgtagcccagaactctctggaatgatgaatttgaaggtttgctcctgtctcctcactcagaagcctgtaatcattaaactctttctctgatgcaaa

SEQ ID NO: 13928 - DNA, 462 bp, Homo sapiens
  SIMILAR (313)..(378): 591254mologous to Homo sapiens Human neurofilament-M wild type protein fragment 59,accession number Y20717,Smith-Waterman Score=74.
ggaattcccgggtcgaccctcggaaaagagaggttctgcgaccgagaaattcggtgcaacaagtgctgtgacagaaaaccccccgctcggcgctgctggcgaaagagccaacaaaacgctgggtgctgccaccgtgacaccgactttaggaccccggcctcggatggagaaaggagggtacggagccaccacataacttcctaatgtcttcaaatagcgaaagtgctagccggaaactgccggctgggtttacctattggtgctcgtgtgggactagcagattcgagaaaccagcgggactggaacctagtacacttcggcctctcaaagtgctgggattatagaagtgagccaccacgctcggcaaatgtttcaattttattcacaaaagtatactttacccaattgttgtaaactataaatattaatgtttaaaataaaatttttcttgactcaaaaaaa

SEQ ID NO: 13929 - DNA, 1779 bp, Homo sapiens
  SIMILAR (93)..(911): 821254mologous to Homo sapiens HTHBZ47 protein, a member of the kringle family,accession number Y02135,Smith-Waterman Score= 1114.
atgagtcacagggtcactcagcctttctgtggcgaaacatcgacttcctacgacctagaaatcgccgccagggctaggctggtgtttgtcctaaaaaatggaggcatcgagcaacgagctgtgctgagaccgagagacctcagttctgcgaaatgtcggtgcctggagcttgcgaatgactgcggccggcgggttgtcaaggacaacattccttatggcgcaaccaacagcgctgtcaccaagaaactggactctgagaaaaaagagggtttcggccaccgagaaactccgtgccacatgtgccgtgacagcaaaaccgcccgctccgcgccgctggtgaaagagctaacgaacgccagcgctgtcgcaaccggaaaactgtcaggccagtgctgctgcggatgtgagaaaccggtgatccgaaggaggagtggcgctgggcgctggactcgctggtgtgaaaatctggctgctctaggacccggcaagcgcgggcaccaggcgaacgccagcgactttgccagacaaatgcatgtcttttttggtcgccattcaaagatgcagccggcagtcagccccggctctgagaaacaagtggaggtgtcagccataaaccctccgttcagggaaaagagagtcgctgcgacggatcgattggccgttggttgtttactgcctattttctcagaagtatgtagactctgctacaagatcatagttcacctcaactactttatagataacaacttaaatattaaggaaacattaagttttccctttgaaatattgtttcaggtcctgcatgccagtaaaactactcatgtcagctgttctgcaggatcccatgagaagcagccaaaccagaaacatgcatggcgctaccaagagcgcggcaaccgagaaaacacggagtcgcccctagtggcgaaagtgcggatgcgaaaccgctggctcggcatcggctaccagagctgccgccaccgagaaaatggaggcaccgaggaacaagatgtgccgcgaccaagagaactcggcttggcgaaatgcggtgccgggaccctaagagtgacgccagccggaggagttcccaaggacaacatccattttggcggaaccaacggtgttgtcacgcagaaaatgtcgaccctcggaaaagagaggttctgcgaccgagaaattcggtgcaacaagtgctgtgacagaaaaccccccgctcggcgctgctggcgaaagagccaacaaaacgctgggtgctgccaccgtgacaccgactttaggaccccggcctcggatggagaaaggaggcacaagatgtccttcaaccctttagcccagcgtgcaagagagacagcccgagagccccagtgggaaccatccggagacccagaagatcgaattcgcgggacggcgcgttaccttccaacaccgctgggccaccactctgagaaccagaatcagcggtactggggcttccccacgggacaggagcgcgttctttggattcccctggtgcggcgtgcacaaccttcggacgaagagtccacgcctgccacccaggaggaggcccaggcgcaggcaggagtggcggccgcagcctcgtcggaggagcccggtcactgcgctccgcggccgccacacgcgccgcgatcggccctcttcgaagactggtcgcgggaaccagagaggtctgacgatggggacctctcggagtgtcgtcgccctgctactgagccttggcggccaccgggctcagcctggaggcttccttgtgcagcatag

SEQ ID NO: 13930 - DNA, 1223 bp, Homo sapiens
  SIMILAR (816)..(1148): 561254mologous to Homo sapiens alpha-keto acid dehydrogenase precursor,accession number M19301,Smith-Waterman Score=226.
atttcgtggagccgagagacccgagtgcacgtgtggagtatcttttgcacaagcgcggcggcgggagacactcccgcccccatcagactcaagccctcactcgactctcgcggccttcgttgctcgcacagctccctgcccaggctaggaggccggcttgcggggttgagtggcccgagctaagggtgcggagacccaagggcggcgactacgacggcgttgatatcggtggtaacgacggcctcagcaggcggggaagatgaaagggtgaggaagggcagccgggcagggcccggccggtggggtagaagggtccgggcccatgtagagggggagagccgcaaaggcgaggagagattcagggcgaagacgggcggagggagatttctctgcttctcagttccctcggctcccggagggggcggaggcgaggctcgggctgttggcgggctgaagggccagcggaggcaagacccggggggcttcagggtttcggttcggagacgagtgtgggttgttgagtggggagaagcgaccgagtggggcaacatggaaaggctattgtgaagcgcccggggcctccttcccgggagcggaccgctgagccacgccggcccgcagctccaggtggagtggtttggttgtcttccacctccagactcaactctggaacttgtggtctgtggcacagttgccatttcccgggtaaggatgtctgcagtctgtgtactgaggacctggagccaggaatgctgggccagctgatttggtttcactgttttccaaccatgtagtaatgttcatgttttgaaggcccaaattatgtgtgtttctttggattatccttcattccaagtatagtcatcccacataactttctgaaaacaattaatgctgtatgtggacagcctggttcagttcagattcccagacactgaagaagggattagaaaagtaactgttaatgttatgtaaaagaaggagatacagtgtctcagtttgataacatcggtaaagttcaaagtgataaagcttctgttacccatcgctagtccttatgatggagtcattgaaaactctagcatagtctagatgatattgcctatgtggggaagccattagtaaacatagaaacagaagctttaaagggtactgttaatttgttttaccaaattgattattgtccaccttttgtcattgggtctcaattaaaagtgacctta

SEQ ID NO: 13931 - DNA, 930 bp, Homo sapiens
  SIMILAR (274)..(1515): 1001254mologous to Homo sapiens KIAA1726 protein,accession number AB051513,Smith-Waterman Score=2249.
ctagttattcagcagagtgcccagtaaaggtccaccccgataccaccacacatcctctcggggatgaacaagggctgactgattgataagctcttggaaactcttaagctcactgcatcccttcaggtctccaaggaatgctaaatctcctccccactccaagggctcctgtgcggcccgagcctcctcgacgagcaccaccccctgctccacggcgcccagtcccattcgaccacccaagggcgtgcggcactggtaggcagctccacctgcagccccggtgcgggatccactaagtgaagccagctgggctcctgagttgaggctgtgaaccaggtgacttggtttctcctccacctgctcctccacgtgccctggctgcttctggctctgcaccttgccatgcagagcacctggcttctcatctgccaagctcactctgacccggctgctgggtaggatacaatatcgaaggggccagtatactgccctcagggggctctgtggcctcttgaccttgtggatgatgctgaccataatgttctgcttgtccctggctgaagacaggcccctccagggccctggccccaccacacagctgagctggcccaagccaaagagttgctggagcagcagctggagtggatcaggctctgctggagggggtggggggcccaggccctgatggtcaagatccagaaccgtggaggagacatctgtctcatcaggcagctcactaacactgacctcgaagcgatgctgcccatcacactggatccttgcatgattctcatctgacacaaacgctgatggccaagccctgtcattgataaaggcaatgctcatccacttgatgtctatgacgtggcccaataggttggtaaccatagaactggtcattgaaaatcttttggggtcattcttggacat

SEQ ID NO: 13932 - DNA, 597 bp, Homo sapiens
atgcaagctgtgttactcacggttctccagaaacacaaccaatcggttatatactggtatatgaaatacatttactatgagggattggtgattatggatgattatgattatgtgattatggattacatgactatggagactgagaaatcccatgatctgcaggctggaggcccaggaaagccagtggtacagtttcagttcaagcccaaaatcctgcaagccagtagaggcaatggcgttaagtcctggtccaagtccaaaggcttgagaaccaggtgtgctaatgtccaagggcaggaaaatagggagggcccagctaagcattcacctttcctctgcctttttgttcttttcggctcctcaacaggtcgaatgatacccaaccacactggtgacacaagtaaggtaatagctggaacagaagaaagaggggtccccaaaaaggtaaccttaaaatttgatgcttgtgctgctattgataggccgtgggcacatcaactcgattgtacctatcacttcaagggttctaatgacgagcatgattcccgtttacatactaatgctggccatcaggccaatcactttctagtggtgtga

SEQ ID NO: 13933 - DNA, 2811 bp, Homo sapiens
  SIMILAR (1)..(426): 1001254mologous to Homo sapiens histone H2A.X,accession number X14850,Smith-Waterman Score=706.
  misc_feature (1)...(2811): n = a,t,c or g
atttgagaaaccattggagtnccntgtcnagtgtggtggaattcgggagacagaatttatgtaaaaagagtgttatatggtaaattcttgtcctgaaataaactaactggtgtttaaagaaaaaaaatgtttgtaataagtcagaaagttgagacacattgaagaattgtcggcaaaagtcgtgaaagaaaaaatgttataaaaaaatttatgcaaaaaatgttgtataatttaaaagtaataaggcctcctgagtactattaaaaaaacagtttatgtgcaaggtgtacaagaaaagtaaaatatacctttggtaaaaaaaattataaaggggcataagaatgtggatttttacctacattaaaaggttaaaaacaattattgtttttaagagtttaagcaagttttaaaatgttaattgtaaagaaaattctgtgtgtaaacatattagctaaagttaaaaaggtatcatccagtttttctgtgaactggacattaaagtaaaaatgtgacaggtttttcttaaagcatcaacctgctctttaacaaaaattataaaaggttaaaaagagtctataaaaccttaccttatggtcaaacatgaaaaattggataaatatgtctacaaggttttattaaaattaagtttaacattaataacacactaatataaaggtaaaatttagcttatctggtataaaagtcatacaggaagcattagtaaatataaaatagcgtttagctttcttttgtctaaaaactaataaaaattggtgctaaaggaagcattcattttactagaggatcataaaagttaaagacttaaaacaaactttgggcaattaagacagcataccaaggatgcaaatgcctgggttgaaatgggatcaaatattccatctgcagggttaaacaaaaggcaattaggcatgcttgtgtgcacatgggcagggccaggaggaccctggattgtcccccttccacttaagggtgggtcctcccagtcgggccaggcatgggctgcatggtagctcttttccaggattctatagcctggagtaataagtcgatgccaagctctctctctgctatatctcaaagtccagcaccctgcgggtcagcccccgagggccatccagcttccatctcccgaacactaagttcacttcatgtctctcatggcagggaggagacttagcattccttggagacctgaagggatgcagtgagcttaagaattttcaagagcttatcagtcagtcagcccttgttcatccccgagcggatgtgtgatggtattgtcgtggacctttattgggcactctgccgaataactagagtggcacttgtgctttagcctatttggctatccctttcaccctggcatttcatcaaccagaggaaggaaaaaaaaaaataataagacatcataaagcgagagaagctccttataggtctttcaactctcacatctatttagatgcaactggagccccgcaaggaataccagatcaatttaaagcttgaaatcaaatagttacaggatttaagtcaatattttgatagatgacagtcaataaaaatgtagattagataaactgcatctattacacccaacagcaatgagcttttcatgagttgaaaaaaagaaaaaacccatgtcggccccagccctgaggctacctgacctgacaaaactctttacgctctatgtgtcagaaacaaaaaaaatggcagttagagttttaacccagactgtagggccctggccaaggccagtggccttagctctcaaaacaactagatgaggtttccaaacgctggcccccatgtccaaagtccctggtagcaatagccctgttagcacaagaagcagataagctaactcttagacaaaacctaaacataaagtccccctgtgctgtggtgattttaataaataccaaaggacaccattagctaatgaatgctagactagctagataccaaagcttgctctgtgaacatccccgcataacccttggaagtttgcaacacctaaaccccgccaccttcctcccggtgtcagagagcccagttaaacataactgtgtagaggtattggactcagtttattcctatgtggggcctaaccaccgagaccatcctttaaacatcagtagactgggagctgtaacatggatggggagcagctttcaccaacccctgcaaagtgacactctgaagaagacgacaagccctggttccagtcacacccggaagctgactggtccacgcacagctgaagcatgaggaaactcatcgcgggactaattttccttaaaatttagactgccacagtaagggcttcaactgaccttcctcaagactgagaactgtttccagtatatacatcaagtcacctgagggtagggacaaaagattggctacattcctattattttatgggttattataagtgtccccaggacctcctaaaagaaacttgtttgtataatgctattcctatcccaaggtatgtagccccaggaaataacccaacttgatgcgtgttatgacccattttaagcctcccgtgatcacagtttttaaaataaaattaaggactggtccttttctaggtgacacaagtaaggtaatagctagaatggaaaaaagaggggcccccaaaaatgtaaccttaaaatttggtgcttgtgccgctattgatagtaagcagcatggaataggatgcggttctctaaattggaaaaaaaaagtgacacagtaaaaaaaaaaataagtatatctgtcaagaatcatatttaaaaa

SEQ ID NO: 13934 - DNA, 845 bp, Homo sapiens
  SIMILAR (74)..(223): 941254mologous to Gallus gallus reading frame H2A,accession number V00413,Smith-Waterman Score=238.
atggcgcctcctctgcgacccctcgcccggctgcgaccgccggggatgctgctccgcgcgctcctgctcctgctgctgctcagtcctttgccagggctgcgagagggaataggtgaactcataaccccaatcggcaccagcttgccggatctggatccagccaggaggagatgggagggtggaattggcagggttggaagtgaagtggccgatttgtgccccggaaaggaggggggaaaagtccccgaagctgaaaaggaaggagtgtggtgctttagcgaactgtcttttgtaaaagaaccacaggatgtaactgtcacaagaaaggacccagtcgttttagattgccaggctcacggagaagttcctattaaggtcacatggttgaaaaatggagcaaaaatgtctgaaaataaacggatcgaggttctttctaacggctctttatacatcagtgaggtggaaggcaggcgaggagagcagtccgatgaaggattttatcagtgcttggcaatgaacaaatatctgagccattcttaaccaaaaagctcatcttgccttatcaaggatagggagtacatagaggaggcggccagataggccatgagaagacgaagcatttgtcatgaccacacattgtttccaagacctcctgacaagcctgatagaatcctagggcttccagaaacacttttggaaaaacacagagctttctaacttcatacacaaaatgtgaatggtgtgtgataggtgtaacaaacaaaatgtcagaactggctctttaaatatctttagatatttgcatctctatagaaaggattactaacaataactatgtacatgcg

SEQ ID NO: 13935 - DNA, 329 bp, Homo sapiens
  SIMILAR (268)..(2): 341254mologous to Streptomyces coelicolor A3(2) putative secreted protein,accession number AL159178,Smith-Waterman Score=96.
gggcagagggggaggggatgaagctgcccggcgccattttgcttgtgggctgccgcccgccgttgcctctccgcggaggctcgaagatagcaaactggaggcgcccagtctggcctccagcgctgggtgaacccggttggggtgtcactcgacgcccactaggggctgaggaggctccagtgcgcaggctccgggcaccggataaaagcggagctggcgagtctagtgctgtctcgatggaggagcaagaaacggaagaggtcggggggagaagcagccggaaaaatgcagccaccgtcaacgccgcctccctgccaccgtgcttcggg

SEQ ID NO: 13936 - DNA, 895 bp, Homo sapiens
  SIMILAR (823)..(891): 781254mologous to Arabidopsis thaliana F24O1.6,accession number AC003113,Smith-Waterman Score=113.
gtcattttagtggggaaacccttcttttattctttggtctcccccttttttcttcgagaacactggctggccctccctcgtttaatcaccgccatataaaggaattcccactcccctccccgcacattgtcccaccgggggggaaatccttccccgaggccaaaagaagtataggaggcagcgacggcaactgcaccgacggcaacggcagctttttaccccgaagcacggtggcagggaggcggcgttgacggtggctgcatttttccggctgcttctccccccgacctcttccgtttcttgctcctccatcgagacagcactagactcgccagctccgcttttatccggtgcccggagcctgcgcactggagcctcctcagcccctagtgggcgtcgagtgacaccccaaccgggttcacccagcgctggaggccagactgggctgggggaggagggggagaggaacggggagacgggactggggttgtttgggagggggagaaggtgtatcgctttcggagggtgacgggagggagttcgttcccaagccctgctgtccttgttcgtgcacccaatactggcatgcccaagctcacctatatccagacttgagggcctctgggggaaagggggaaagaaccagtcccaccgaataccgacacttcctcaaaccttcggtggattgttgaatgcatctgttgtcagaaagacagagattccgtccccctcaccgcctccagtttgctatcttcgagcctccgcggagaggcaacggcgggcggcagcccacaagcaaaatggcgccgggcagcttcatcccctccccctctgccccccgtgcacttgccgccgccgccgccgccgccgcggccgccgccgccgccgccgccat

SEQ ID NO: 13937 - DNA, 1110 bp, Homo sapiens; identical to SEQ ID NO: 1134
  SIMILAR (1044)..(940): 971254mologous to Homo sapiens A human glutathione-S- transferase (hGST) protein,accession number Y40864,Smith-Waterman Score=182.

SEQ ID NO: 13938 - DNA, 794 bp, Homo sapiens
  SIMILAR (691)..(188): 551254mologous to Homo sapiens 30-SEP-1997 Human glutathione- S-transferase cDNA sequence,accession number A59869_cd1,Smith- Waterman Score=413.
gcccttttttttttttttttttttttacatttcctgttttcattttattgggaacttcaaagaaaagaaagagagacggattggttcccaagacaagccgtgacgtagactcccaacaagctggggaattctggacagcgaaggggtggacagtgagactcagcacagcccaaagtcaaaggcattagggttgttctgaaaatagagattcaagaagccctggaaaatgctccttatccatgagaagagccacagactgtggggtcccacttcatggctgatatccagagccgcagggctggcgtgtggctcacacagtccagtatcccatacacatccagccgctcaaaccagggcccagagggaggtaatcaatcatggatatacaggttccacccaaagaaggtggtgttctgatactcaagaatctcttccaggttgctgaattcctggacgcagggctgccttcagattagtgcattctctcccacatcttcaacgctaccaggcactccttggtcaaatgtgggaccttacaaaatagctccaataacatcttttggcgagctcgttcataagggtcatatggaaacagcttccttcctggataagcatcatccaggtactcacaagcaataacagattcatagatcagttgacattggctggtctccaggacaggaatgtggcccaaaagggtgctttgtatagtaccattcaggcttgtttctcaggttaatgttgaccacttcatgtctgatgtctttggccttgaggacgaggcgggtcctgtg

SEQ ID NO: 13939 - DNA, 1419 bp, Homo sapiens; identical to SEQ ID NO: 5408
  SIMILAR (1)..(417): 531254mologous to Mus musculus histone H2A.X,accession number X58069,Smith-Waterman Score=308.

SEQ ID NO: 13940 - DNA, 3450 bp, Homo sapiens
  SIMILAR (124)..(309): 1001254mologous to Homo sapiens dJ322I12.1 (novel protein similar to C. elegans C05C8.6 (Tr:016313)),accession number AL033518,Smith-Waterman Score=336.
cacaccaaaaacccatctgtacatcaccatcgtcaaagaccaaaagtagataaaaccacaaagatggggaaaaaacagaacagaaaaactggaaagtctaaaacgcagagcgcctttcctcctccaaaggaacgcagttcctcaccagcaatggaacaaagctggatggagaatgactttgacgagctgagagaagaaggcttcagacgatcaaattactctgagctacgggaggacattcaaaccaaaggcaaagaagttgaaaactttgaaaaaaatttagaagaatgtataactagaataaccaatacagagaagtgcttaaaggagctgatggagctgaaaaccaaggctcgagaactacgtgaagaatgcagaagcctcagaaattggataaagagtcaagacccatcactgtgctgtattcaggaaacccatctcatgtgcagagacacacataggctcaaaataaaaggaaggaggaagatctaccaagccaatggaaaacaaaaaaaggcaggggttgcaatcctagtctctgataaaacagactttaaaccaacaaagatcaaaagagacaaagaaggccattacataatggtaaagggatcaattcaacaagaagagctaactatcctaaaaatatatgcacccaatacaggatcaccaagattcatgaagcaagtcctgagtgacctacaaagagacttagactcccacacattaataatgggagactttaacaccccactgtcaacattagacagatcaacgagacagaaagtcaacaaggatacccaggaattgaactcagctctgcaccaagcggacctaatagacatctacagaactctccaccccaaatcaacagaatatacatttttttcagcaccacaccacacctattccaaaattgaccacatactgggaagtaaagctctcctcagcaaatgtaaaagaacagaaattataacaaactatctctcagaccacagtgcaatcaaactagaactcaggattaagaatctcactcaaaacggctcaactacatggaaactgaacaacctgctcctgaatgactactgggtacataacgaaatgaaggcagaaataaagatgttctttgaaaccaacgagaacaaagacacaacataccagaatctctgggacgcattcaaagcagtgtgtagagggaaatttatagcactaaatgcccacaagagaaagcaggaaagatccaaaattgacaccctaacatcacaattaaaagaactagaaaagcaagagcaaacacattcaaaagctagcagaaggcaagaaataactaaaatcagagcagaactgaaggaaatagagacacgaaaaacccttcaaaaaattaatgaatccaggagctggttttttgaaaggatcaacaaaattgatagaccactagcaagactaataaagaaaaaaagagagaagactcaaatagacacaataaaaaatgataaaggggatatcaccaccgatcccacagaaatacaaactaccatcagagaatactacaaacacctctacgcaaataaactagaaaatctagaagaaatggatacattcctcgacatatacactctcccaagactaaaccaggaagaagttgaatctctgaatagaccaataacaggagctgaaattgtggcaataatcaatagtttaccaaccgtgggcttcatccctgggatgcaaggctggttcaatatacgcaaatcaacaaatgtaatccagcatataaacagagccaaagacaaaaaccacatgattatctcaatagatgcagaaaaagcctttgacaaaattcaacaacccttcatgctaaaaactctcaataaattaggtattgatgggacgtatttcaaaataataagagctatctatgacaaacccacagccaatatcatactgaatgggcaaaaactggaagcattccctttgaaaactggcacaagacagggatgccctctctcaccgctcctattcaacatagtgttggaagttctggccagggcaatcaggcaggagaaggaaataaagggtattcaattaggaaaagaggaagtcaaattgtccctgtttgcagatgacatgattgtttatctagaaaaccccatcatctcagcccaaaatctccttaagctgataagcaacttcagcaaagtctcaggatacaaaatcaatgtacaaaaatcacaagcattcttatacaccaacaacagacaaacagagagccaaatcatgagtgaactcccattcacaattgcttcaaagagaataaaatacctaggaatccaacttacaagggatgtgaaggacctcttcaaggagaactacaaaccactgctcaaggaaataagaggacacaaacaaatggtgcccaaggtaatttacagattcaatgccatccccatgaagctaccaatgactttcttcacagaattggaaaaaactactttaaagttcatatggaaccaaaaaagagcccgcatcgccaagtcaatcctaagccaaaagaacaaagctggaggcatcacactacctgacttcaaactatactacaaggctacagtaaccaaaacagcatggtactggtaccaaaacagagatatagatcaatggaacagaacagaggcctcagaaataatgccgcatatctacaactatctgatctttgacaaacctgagaaaaacaagcaatggggaaaggattccctatttaacaaatggtgctgggaaaactggctagccatatgtagaaagctgaaactggatcccttccttacaccttatacaaaaatcaattcaagatggattaaagatttaaacgttagacctaaaaccataaaaaccctagaagaaaacctaggcattaccattcaggacataggcgtgggcaaggacttcatgtccaaaacaccaaaagcaatggcaacaaaagccaaaattgacaaatgggatctaattaaactaaagagcttctgcacagcaaaagaaactaccatcagagtgaacaggcaacctacaacatgggagaaaattttcgcaacctactcatctgacaaagggctaatatccagaatctacaatgaactcaaacaaatttacaagaaaaaaacaaacaaccccatcaaaaagtgggccaaggacatgaacagacacttctcaaaagaagacatttatgcagccaaaaaacacatgaagaaatgctcatcatcactggccatcagagaaatgcaaatcaaaatacctgtgagccaaataaacctcttttatttacaaattactcaacctcatgtatgcctttctagtcgtacaaatggcctaaaacagaaaattggtatgaaggagtgcagttttgttataaagatacctgaagatgtggaagtggctttggaactgggtaatgagcagcaa

SEQ ID NO: 13941 - DNA, 3171 bp, Homo sapiens; identical to SEQ ID NO: 7867
  SIMILAR (3)..(2375): 981254mologous to Rattus norvegicus glutamate receptor delta- 1 subunit,accession number U08255,Smith-Waterman Score=4046.

SEQ ID NO: 13942 - DNA, 2433 bp, Homo sapiens
  SIMILAR (110)..(1009): 901254mologous to Escherichia coli NADH dehydrogenase,accession number V00306,Smith-Waterman Score=1358.
atgagaacaaagacacaacataccagaatctctgggacgcattcaaagccagtgtgtagagggaaatttatagcactaaatgcccacaagagaaagcaggaaaaatccaaaattgacaccctaacatcacaattaaaagaactagaaaagcaagagcaaacacattcaaaagctagcagaaggcaagaaataactaaaatcagagcagaactgaaggaaatagacacacaaaaaacccttcaaaaaataaatgaatccaggagctggttttttgaaaggatcaacaaaattgatagaccactagcaagactaataaagaaaaaaagagagaagaatcaaacagacacaataaaaaattgtaaaggggatatcaccactgatcccacagaaatacaaactaccatcagagaatactacaaacacctctacgcaaataaactagaaaatctagaagaaatggataaattcctcaacacatacactctcccaagactaaaccaggaagaagttgaatctctgaatagaccaataacaggagctgaaattgtggcaataatcagtagtttaccaaccaaagagtccaggaccggatggattcacagccgaattctaccagaggtacaaggaggaactgaaaaagagggaatcctccctaactcattttatgaggccagcatcattctgataccaaagccgggcagagacgcaaccaaaaaagagaattttagaccaatatccttgatgaacattgatgcaaaaatcctcaataaaatactggcaaaacgaatccagcagcacatcaaaaagcttatccaccatgatcaagtgggcttcatccctgggatgcaaggctggttcaatatacgcaaatcaataaatgtaatccagcatataaacagaaccaaagacaaaaaccacatgattatctcaattgatgcagaaaaagcctttgacaaaattcaacaacgcttcctgctaaaaactctcaataaattaggtattgatgggacatatttcaaaataataagagctatctatgataaacccacagccaatatcatactgaatgggcaaaaactggaagcattccctttgaaaactggcacaagacagggatgccctctctcaccgctcctattcaacatagtgttggaagttctggccagggcaattaggcaggagaaggaaataaagggtattcaattaggaaaagaggaagtcaaattgtccctgtttgcagatgacatgattgtatatctagaaaaccccattgtctcagcccaaaatctccttaagctgataagcaatttcagcaaagtctcaggatacaaaatcaatgtacaaaaatcacaagcattcttatacaccaacaacacacaaacagagagccaaatcatgagtgaactcccattcacaattgcttcaaagagaataaaatacctaggaatccaacttacaagggatgtgaaggacctcttcaaggagaactacaaaccactgctcaaggaaataaaagacgatacaaacaaatggaagaacattccatgctcatgggtaggaagaatcaatatcgtgaaaatggccatactgcccaagaattggaaaaaaactactttaaagttcatatggaaccaaaaaagagcccacatcaccaagtcaatcctaagccaaaagaacaaagctggaggcatcacactacctgacttcaaactatactacaaggctacagtaaccaaaacagcatggtactggtaccaaaacagagatatagatcaatggaacagaacagagccctcagaaataatgctgcatacctacaactatctgatctttgacaaacctgagaaaaacaagcaatggggaaaggattccctatttaataaatggtgctgggaaaactggctagccatatgtagaaagctgaaactggatcccttccttacaccttatacaaaaatcaattcaaaatggattaaagacttaaacgttagacctaaaaccataaaaaccctagaagaaaacctaggcattaccattcaggacataggcatgggcaaggacttcatgtccaaaacaccaaaagcaatggcaacaaaagccaaaattgacaaatgggatctaattaaactaaagagcttctgcacggcaaaagaagctaccatcagagtgaacaggcaacctacaaaatgggagaaaattttcgcaacctactcatctgacaaagggctaatatccagaatctacaatgaactcaaacaaatttacaagaaaaaaacaaacaaccccatcaaaaagtgggtgaaggacatgaacagacactttgcaaaagaagacatttatgcagccaaaaaagatgaaaaaatgctcatcatcaccggccatcagagaaatgcaaatcaaaaccactatgagataccatctcacaccagttag

SEQ ID NO: 13943 - DNA, 1023 bp, Homo sapiens; identical to SEQ ID NO: 10062
  SIMILAR (1)..(168): 871254mologous to Escherichia coli visA protein,accession number D90259,Smith-Waterman Score=240.

SEQ ID NO: 13944 - DNA, 2313 bp, Homo sapiens
atgaccgatcccacagaaatacaaactaccatcagagaatactacaaacacctctacaaaaataaactagaaaatctagaagaaatggataaattccttgacacgtacactcccccaagactaaaccaggaagaagttgaatctctgaatagaccaataacaggatctgaagttgtggcaataatcaatagcttaccaaccaaaaagagtccaggaccagatggattcacagccgaattctacaagaggtacaaggaggaattgataccattccttctgacactattccaatcaatagaaaaagagggaatcctccctaactcattttatgaggcaagcatcattctgataccaaagctgggcagagacacaaccaaaaaagagaattttagaccaatatccttgatgaacactgatgcaaaaatcctcaataaaatactggcaaaacgaatccagcagcatatcaaaaagcttatccaccatgatccagtggggttcatccctgggatgcaaggctggttcaatatacacaaatcaataaatgtaatccagcatataaacagagccaaagacaaaaaccacatgattatctcaatagatgcagaaaaggcctttgacaaaattcaacaacacttcatgctaaaaactctcaataaattaggtattgatgggacatatttcaaaataataagagctatctatgacaaacccacagccaatatcatactgaatgggcaaaaactggaagcattccctttgaaaacttgcacaagacagggatgtcctctctcaccactcctattcaacatagtgttggaagttctggccagggcaattaggcaggagaaggaaataaaggttattcaattaggaaaagaggaagtcaaattgtccctgtttgcagacgacatgattgtatatctagaaaaccccattgtctcagcccaaaatcttcttaagctgataagcaacttcagcaaagtctcaggatacaaaatcaatgtacaaaagtcacaagcattcttatacaccaacaatagacaaacagagagccaaatcatgagtgaactcccattcacaattgcttcaaagagaataaaatacctaggaatccaacttacaagggatgtgaaggacctcttcaaggagaactacaaaccactgctcaaggaaataaaagaggatacaaacaaatggaaggacattccatgctcatggataggaagaatcaatatcgtgaaaatggccatactgcccaaggtcatttacagattcaatgccatccccatcaagctaccaatgccttttttcacagaattggaaaaaactactttaaagttcatatggaaccaaaagagagcccacatcaccaagtcaatcctaaagaacaaagctggaggcatcacactacctgacttcaaactatgctacaaggctacagtagccaaaacagcatggtactggtaccaaaacagagatacacatcagtggaacagaacagagccctcagaaattacaccacatatctacaactatctgatctttgacaaacctgagaaaaacaaacaatggggaaaggattccctatttaataaatggtgctgggaaaactggctagccatatgtagaaagctgaaactggatcccttccttacaccttatacaaaaatcaattcaagatggattaaagacttaaatgttagacctaaaaccataaaaaccctagaagaaaacctaggcaataccattcaggacataagcatgggcaaggacttcatggctaaaacaccaaaagcaatggcaacaaaagacaaaatatgcaaatgggatccaattaaactaaagagcttctgtacagcaaaagaaactaccatcagagtgaacaggcaacctacaaaatgggagaaaatttttgcaacctactcatctgacaaagggctaatatccagaatctataatgaactccaacaaatttacaagaaaaaaacaaacaaccccatcaaaaagtcggcaaaggatatgaacagacacttcccaaaagaagacatttatgcagccaaaaaacacatgaaaaaatgctcatcatcactggccatcagagaaatacaaatcaaaaccacaatgagataccatctcacaccagttagaatggcgatcattaaaaagtcaggaaacaacagaatgaagctgcagaccttcatggctggtattgaatctcctaaagttggtgcagacccagagcgagcagcagcaagatttattgacaaagcttccacagcatggaaggggacctgcatggattgccactgctgg

SEQ ID NO: 13945 - DNA, 1692 bp, Homo sapiens
  SIMILAR (712)..(1956): 991254mologous to Homo sapiens putative p150,accession number U93572,Smith-Waterman Score=2106.
atggggagaaaccagcgcaaaaaggctgaaaattccaaaaaccagaacgcctcctctcccgcaaaggatcacaactcctctccagcaagggaacaaaactggacaaagaatgagtttgatgaattgacagaagtaggcttcagaagaataaccagtgtagagaagaacataaatgacctgatgaagctgaaaaacacagcacgagaacttcatgaagtatgcagaggtatcaatagccgaattgaccaagcagaagaaaggctatcagagattgaagatcaactcaatgaaataaaatgcagaaaaggccttcgacaaaattcaacagccttttatgctaaaaactcccaaaaactaggtatcgatggaaggtatctcaaaataataagagctatttacaacaaacccagagccaatattatactgaatgggcaaaaccaggaagcactccctttgaaaaccggcacaagacaaggatgccctctctcaccactcctattcaacatagcgttggaagtcctggccaggtcaatcaggcaagagaaagcaataaagcgtattcaaataggcagagagaaagtcaaattgtctttgtttgcagatgacatgattgtatatttagaaaaccccattgtctcagccccaaatctccttacgctgataagcaacttcagcaaagtctcaggatacaaaatcaatgtgcaaaaatcacaagcattcctatacaccaataatagacaagagacagagatccaaatcatgagtgaactcccattcacagttgctacaaagagaataaaatacctaggaatccaacttacaagggatgtgaaggacctcttcaaggagaactacaaaccactactcaacgaaataagagaggacataaacaaatggaaaaacattccatgctcatggataggaagaatcaatatcatgaaaatggccgtactgcccaaagtaatttatagattcaatgctatccacatcaagctaccattgactttcttcacagaattggaaaagactactttaaattttatatggaaccaaaaaagagcccacatagccaagaaaagccgaagcaaaaagaacaaagctggaggcatcatactacctgacttcaaactatactacaaggctacagtaaccaaaacagcatggtactggtaccaaaacagatatatagaccaatggaacagaacagaggcctgcaaaataacaccacacgtctacaaccatctgatctttgacaaacctgacaaaaacgagctatggggaaaggattccctatttcatgaatggtcttcggaaaactggatagccatatgcagaaagctgaaattggaccccttccttacaccttatacaaaaattaactcaagatggattaaagacttaaatgtaagacctaaaaccataaaaaccctagaagaaaacctaggcaatagcattcaagacataggcatgggtaaagacttcatgattaaaacaccaaaagcaatggcaacaaaagccaaaattgacaaatgggatctaattaaactaaagagcttctgcacagcaaaagaaactatcatcagagtgaacaggaaacctacagaatgggagaaaatttttgtaatctgtccatctgacaaagggctaatatccagaatatacaaagaacttaaacaaatttacaagaaataa

SEQ ID NO: 13946 - DNA, 2523 bp, Homo sapiens; identical to SEQ ID NO: 3693
  SIMILAR (268)..(729): 971254mologous to Homo sapiens putative p150,accession number U93563,Smith-Waterman Score=753.

SEQ ID NO: 13947 - DNA, 2871 bp, Homo sapiens; identical to SEQ ID NO: 6257
  SIMILAR (865)..(2016): 971254mologous to Homo sapiens putative p150,accession number U93572,Smith-Waterman Score=1909.

SEQ ID NO: 13948 - DNA, 3099 bp, Homo sapiens
  SIMILAR (976)..(131): 431254mologous to Oryctolagus cuniculus elongation factor 1 delta,accession number U47663,Smith-Waterman Score=399.
atgggagaattgatcaccccactgtcaacattagacagatcaacaagacagaaagtcaacaaggatacccaggaattgaactcagctctgcaccaaggggacctaatagacatctacagaactctccaccccaaatcaacagaatatacatttttttcagcaccacaccacacctattccaaaattgaccacatacttggaagtaaagctctcctcagcaaatgtaaaagaacagagattataacaaactatctctcagaccacagtgcaatcaaactagaactcaggattaagaatctcactcaaaaccgctcaactacatggaaactgaacaacctgctcctgaatgactactggatacataacgaaatgaaggcagaaataaagatgttctttgaaaccaatgagaacaaagacacaacataccagaatctctgggacgcattcaaagcagtgtgtagagggaaatttatagcactaaatgcccacaagagaaagcaggaaagatccaaaattgacaccctaacatcacaattaaaagaactagaaaagcaagagcaaacacattcaaaagctagcagaaggcaagaaataactaaaatcagagcagaactgaaggaaatagagacacaaaaaacccttcaaaaaattaatgaatccaggagctggttttttgaaaggatcaacaaaattgatagaccgctagcaagactaataaagaaaaaaagagagaagaatcaaatagacacaataaaaaatgataaaggggatatcgccaccaatcccacagaaatacaaactaccatcagagaatactacaaacacctctacgcaaataaactagaaaatctagaagaaatggataaattcctcgacacatacactctcccaagactaaaccaggaagaagttgaatctctgaatagaccaataacaggagctgaaattgtggcaataatcaatagtttgccaaccaaaaagagtccaggaccagatggattcacagccgaatcctaccagaggtacaaggaggaactggtaccattccttctgaaactattccaatcaatagaaaaagagggaatcctccctaactcattttatgaggccagcatcattctgataccaaagccgggcagagacacaaccaaaaaagagaattttagactaatatccttgatgaacattgatgcaaaaatcctcaataaaatactggcaaaccgaatccagcagcacatcaaaaagcttatccaccatgatcaagtgggcttcatccctgggatgcaaggctggttcaatatacgcaaatcaataaatgtaatccagcatataaacagagccaaagacaaaaaccacatgattatctcaatagatgcagaaaaagcctttgacaaaattcaacaacccttcatgctaaaaactctcaataaattaggtattgatgggacatatttcaaaataataagagctatctatgacaaacccacagccaatatcatactgaatgggcaaaaactggaagcattccctttgaaaactggcacaagacagggatgccctctctcaccactcctattcaacatagtgttggaagttctggccagggcaattaggcaggagaaggaaataaagggtattcaatcaggaaaagaggaagtcaaattgtccctgtttgcagacgacatgattgtatatctagaaaaccccattgtctcagaccaaaatctccttaagctgataagcaacttcagcaaagtctcaggatacaaaatcaatgtacaaaaatcacaagcattcttatacaccaataacagacaaacagagagccaaatcatgagtgaactcccattcacaattgcttcaaagagaataaaatacctaggaatccaacttacaagggatgtgaaggacctcttcaaggagaactacaaaccactgctcaaggaaataaaagaggatacaaacaaatggaagaacattccatgctcatgggtaggaagaatcagtatcgtgaaaatggccatactgcccaaggtaatttacagattcagtgccatccccataaagctaccaatgactttcttcacagaattggaaaaaactactttaaagttcatatggaaccaaaaaagagcccgcatcgccaaggcgatcctaagccaaaagaacaaagctggaggcatcacactacctgacttcaaactatactacaaggctacagtaaccaaaacagcacggtactggtaccaaaacagagatatagatcaatggaacagaacagagccctcagaaataacgccacatatctacaactatctgatctttgacaaacctgagaaaaacaagcaatggggaaaggattccctatttaataaatggtgctgggaaaactggctagccatatgtagaaagctgaaactggatcccttccttacaccttatacaaaaattaattcaagatggattaaagacttaaacattagacccaaaaccataaaaaccctagaagaaaacctaggcagtaccattcaggacataggcatgggcaaggacttcatgtccaaaacaccaaaagcaatggcaacaaaagacaaaattgacatatgggatctaattaaactaaagagcttctgcacagcaaaagaaactaccatcagagtgaacgggcaacctacaaaatgggagaaaattttcgcaacctactcatctgacaaagggctaatatccagaatctgcaatgaactcaaacaaatttacaagaaaaaaacaaacaaccccatcaaaaagtgggcgaaggatatgaacagacacttctcaaaagaagacatttatgcagccaaaaaacacatgaaaaaatgctcatcatcactggccatcagacaaatgcaaatcaaaaccacaatgagataccatctcacaccagaaagttccgctccacatcccatcaatcaccctaaagagaagccaggggacccgggccactcgccaatgcagggtctcctgggctcaggcagatacccgaaacttgccacctcaagcacccacttggaatgcttctgctgtcacatcactctgctctatctgccacccacaacccaa

SEQ ID NO: 13949 - DNA, 3419 bp, Homo sapiens
  SIMILAR (667)..(1896): 921254mologous to Homo sapiens putative p150,accession number U93574,Smith-Waterman Score=1990.
acacagactggcaaattggataaagagtcaagacccatcagtgtgctatattccggaaacccatctcacgtgcagagacacacataggctcaaaataaaaggatggaggaagatctaccaagccaatggaaaacaaaaacaggcaggggttgcaatccacatctctgataaaacagactttaaaccaacaaagatcaaaagagacaaagaaggccattacataatggtaaagggatcaattcaacaagaaaagctaactatcctaaatgtatatgcacccaacacaggagcacccagattcataatgcaagtcctgagtgacctacaaagagacttagactcccacacattaataatgggagactttaacaccccactgtcaacattagacagattaacgagacagaaagtcaacaaggatacccaggaattgaactcagctctgcaccaagtggacctaatagacatctatagaactctccaacccaaatcaacagaatatacattgttttcagcaccacaccacacctattccaaaattgaccacatacttggaagtaaagctctcctcagcaaatgtaaaagaacagaaattataacaaactatctctcagaccacagtgcaatcaaactagaactcaggattaagaaactcactcaaatccgctcaactgcatggaaactgaacaacctgctcctgaatgactactgggtacataacgaaatgaaggcagaaataaagatgttctttaaaaacaatgagaataaagacgcaacatgccagaatctctgggacacattcaaagcagtgtgtagagggaaattcttagcactaaatgcccacaagagaaagcaggaaagatccaaaatcaacaccctaacatcacaattaaaagaactagaaaagcaagagcaaacacattccaaagctagtagaaggcaagaaataactaaaatcagagcagaactgaaggaaatagagacacaaaaaacccttcaaaaaattaatgaatccaggagctggttttttgaaaggatcaacaaaattgatagaccactagcaagactaataaagaaaaaaagagagaagaatcaaatagacacaataaaaaatgataaaggggatatcaccaccgatcccacagaaatacaaactaccgtcagagaatactacaaacacctctacgcaaataaactagaaaatctagaagaaatggataaattcctcgacacatacacactcccaagactaaaccaggaagaatttgaatctctgaatagaccagtaacaggatctgaaattgtggcaataatcaatagcttaccaacgaaaaagagtccaggaccagatggattcacagccgaattctaccggaggtacaaggaggaactgcatataaacagagccaaagacaaaaaccacatgattatctcaatagatgcagaaaaagcctttgacaaaattcaacaacccttcatgctaaaaactctcaataaattaggtactgctgggacgtatttcaaaataataagagctatctatgacaaacccacagccaatatcatactgaatgggcaaaaactggaagcattccctttgaaaactggcacaagacagggatgccctctctcaccactcctattcaatatagtgttggaagttctggccagggcaattaggcaggagaaggaaataaagggtattcaattaggaaaagaggaagtcaaattgtccctctttgctgatgacatgattgtatatctagaaaaactcattgtctcagcccaaaatctccttaagctgataagcaacttcagcaaagtctcaggatacaaaattaatgtacaaaaatcacaagcattcttatacaccaataacagacaaacagagagccaaatcatgagtgaactcccattcacaattgcttcaaagagaataaaatacctaggaatccaacttacaaggaatgtgaaggacctcttcaaggagaactacaaaccactgctcaaggaaataaaagaggatacaaacaaatggaagaacattccatgctcatgggtaggaagaatcaatatcgtgaaaatggccatactgcccaagggaatttacagattcaatgccattcccatcaagctaccaaagactttcttcacagaattggaaaaaactactttaaagttcatatggaaccaaaaaagagcccacatcaccaagtcaatcctaagccaaaagaacaaagctggaggcatcacactgcctgccttcaaactatactacaaggctacagtaaccaaaacagcatggtactggtaccaaaacagagatatagatcaatggaacagaacagagccctcagaaataacgccacatatctacaactatctgatctttgacaaacctgagagaaacaagcaatggggaaaggattccctatttaataaatggtgctgggaaaactggctagccatatgtagaaagctgaaactggatcccttccttacagcttatacaaaaatcaattcaagatggattaaagacttaaacattagacctaaaaccataaaaactctagaagaaaatctaggcattaccattcaggacataggcatgggcaaggacttcatgtctaaaacaccaaaagcaatggcaacaaaaaccaaaattgacaaatgggatctaattcaactaaagagcttcttctgcacagcaaaagaaactaccatcagagtgaacaggcaacctacagaatgggagaaaatttttgcaacctactcatctgacaaagggctaatatctagaatctacaatgaactcaaacaaatttacaagaaaaaaacaaacaaccccatcaaaaagtggacaaacgatatgaacagacacttctcaaaagaagacatttatgcagccaaaaaacacatgaaaaaatgctcatcattaccggccatcagagaaatgcaaatcaaaaccacaatgagataccatctcacaccagttagaatcgcgatcattaaaaagtcaggaaacaacagcaaagtggatgatatccatgctatctgtagccttcttaaagactttcttcgaaacttcaaagaacctcttctgacctttcgcctaaacaaagcctttatggaagcagcagaaatcacagatgaagacaacagcatatctgccatgtaccaggctgttggtgaactgccccaggccaacagggacacattggttttcctcatgattcacttgcagagagtggctcagagtccatatactaaaatgaatgttgccaatctggctgaagtctttggctctacaatagtggcccatgctgtgcccaatccagaaccagtgacgatgttacaggacatcaagtgtcaacccaaggtggtcgagcgcctgccttccttgcccctggagtactgga

SEQ ID NO: 13950 - DNA, 2685 bp, Homo sapiens; identical to SEQ ID NO: 7862
  SIMILAR (835)..(1812): 911254mologous to Homo sapiens putative p150,accession number U93563,Smith-Waterman Score=1582.

SEQ ID NO: 13951 - DNA, 1616 bp, Homo sapiens
  SIMILAR (94)..(1347): 881254mologous to Homo sapiens putative p150,accession number U93574,Smith-Waterman Score=1927.
ctgtccctgcccctctgcccttctggtccctgccagctggtttcattcacttgttcaacaaatatttgtcaagtacctaccaccatgtgccaggctacattagccagcaatgaccagggctatgaaggacaaatgccaagcaaggtgcggcactcagagcacatgagtcaggtgcgagtggccaggagacgctttcctgaggaccttacgtagcctctggcccaggcaggctgagtggccagctctgtctttactatgctgtgtacctctgggcaacctgctaccctctctgtggctgccacgcagatgctgcatggggtcagtcagaaattcagcacaagtcaaagcagagagaagaaaacatcctgtgagctcaccgacagcaacccctgggggcctggtaaagagcaacaactgatgcaactccaccttttgcttggtagccaaaacctgagagctcagagcctcatccaggggaacggacaaaacctcacctccccagtcacccccacctttccacttccagtgccatcaaggcacggtcatcaaagccaggcaggtctgagtgctgctctgcaacttactacctttatgaccatacgcaagtcataagtctggccatacgccctactgccagagaccccattttattctgtaagaagtgacaggaaggcatagcttgttccccacaaaataccccatcttcaattttctcccttgcctggctccaacggcagagaaaaatgtgcatggacaccaaaccatctccaagaagcagccattaggtaatctgggacatggcattgacaatggcaccgggcacagggcttctgacatcatataagcaagggcggaagtcaaattgtccctgtttgcagatgacatgattgtatatttagaaaaccccatcatctcagcccaaaatctcctcaagctgataagcaagttcagcaaagtctcaagatacaaaattaatgtgcaaaaatcacaagcattcctatacaccaataacagacaaacagagagccaaatcatgagtgaactcccattcacaattgctacaaagagaataaaatacctaggaatacaacttacaagggatgtgaaggacctcttcaaggagaactacaaaccactgctcaatgaaataaaggaggacacaaacaaatggaagaacattccatgctcatggataggaagaatcaatatcgtgaaaatggccatactgcccaaggtaatttatagattcagtgccatccccatcaagctaccaatgactttcttcacagaattggaaaaaaaaaactggctagcaatatgtagaaagctgaaactggatttcttctttataccttacacaaaaattaattcaagatggattaaagacttaaatgttagacctaaaaccatgaaaaccctagaagaaagcctaggcaataccattcaggacataggcatcggcaaggacttcatgactaaaacaccaaaagcaatggcaacaaaagccaaaagagcttctgcacagcaaaagaaactaccatcagagtgaacaggcaacctacagaatgggagaaaatttttgcaatctatccatctgacaaagggttaatatccag

SEQ ID NO: 13952 - DNA, 4695 bp, Homo sapiens
  SIMILAR (442)..(1539): 951254mologous to Homo sapiens putative p150,accession number U93564,Smith-Waterman Score=1833.
atgaaggcagaaataaaggtgttctttgaaaccaacgagaacaaagacacaacataccagaatctctgggacacattcaaagcagtgtgtagagggaaatttatagcactaaatgcccacaagagaaagcaggaaagatccaaaattgacaccctaacatcacaattaaaagaactagaaaagcaagagcaaacacattcaaaagctagcagaaggcaagaaataactaaaatcagagcagaactgaaggaaatacagacacaaaaaacccttcaaaaaatcaatgaatccaggagctggttttttgaaaggatcaacaaaattgatagatcgctagcaagactaataaagaaaaaaagagagaagaatcaaatagacacaataaaaaatgataaaggggatatcaccaccgatcccacagaaatacaaactaccatcagagaatactacaaacacctctatgcaaataaactagaaaatctagaagaaatggataaattcctcgacacatacactctcccaagactaaaccaggaagaagttgaatctctgaatagaccaataacaggagctgaaattgtggcaataatcaatagtttaccaaccaaaaagagtccaggaccagatggattcacagccgaattctaccagagctgggcagagacacaaccaaaaaaagagaattttagaccaatatccttgatgaacattgatgcaaaaatcctcaataaaatactggcaaaacgaatccagcagcacatcaaaaagcttatccaccatgatcaagtgggcttcatccctgggatgcaaggcttggttcaatatacgcaaatcaataaaggtaatccagcatataaacagagccaaagacaaaaaccacatgattatctcaatagatgcagaaaaagcctttgacaaaattcaacaacccttcatgctaaaaactctcaataaattaggtattgatgggacgtatttcaaaataataagagctatctatgacaaacccacagccaatatcatactgaatgggcaaaaactggaagcattccctttgaaaactggcacaagacagggatgccctctctcaccgctcctattcaacatagtgttggaagttctggccagggcaatcaggcaggagaaggaaataaaaggtattcaattaggaaaagaggaagtcaaattgtccctgtttgcagacgacatgattgtttatctagaaaaccccattgtctcagcccaaaatctccttaagctgatacgcaacttcagcaaagtctcaggatacaaaatcaatgtacaagaatctacaagcattcttatacaccatcaacagacaaacagagagccaaatcatgagtgcactcccactcacaattgcttcaaagagaataaaatacctaggaatccaacttacaagggatgtgaaggacctcttcaaggagaactacaaaccaactgctcaaggaaataaaagaggatacaaacaaaatggaagaacattccatgctcagggggaaggaagaatcaatatcgtgaaaatggccatactgcccaagaattggaaaaaaactacttttatggttcatttggaaccataaaagagcctgtattgccaagacaatcctaagccaaaagaacaaagctggaggcatcacactacctgacttcaaactatactacaaggctacagtaaccaaaacagcatggtactggtaccaaaacatagatatagaccaatggaacagaacagagccctcaaaaataataccacgcatctacaacaatctgatctttgacaaacctgacaaaaacaagaaatggggaaagtactccctatttaataaatggtgcttggaaaactggctagccatatgtagaaagctgaaactggatcccttccttacatcttatacaaaaattaattcaagatggattaaagacttaaatgtcagacctaaaaccataaaaaccctagagggaaacctaggcaataccattcaggacataggcatgggcaaggacttcatgtctaaaacaccaaaagcaatggcaacaaaagccaaaattgacaaatgggatctaaataatctaaagagcttctgcacagcgaaagaaactaccatcagagtgaacatgcaacctacagaatgggagaaaatttttgcaatctacccatctgacaaagggctaatatccagaatctacaatgaactcaaacaaatttacaagaaaaaaacaaccaaaccccatcaaaaagtgggcaaaggacatgaacagacacttctcaaaagaagacatttatgcagccaaaaaacacatgaaaaaatgttcatcgtcactggccatcagagaaatgcaaatcaaaaccacaatgagataccatctcacaccagttagaatggcaatcattaaaaagtcaggaaacaacaggtgctggagaggatgtggagaaataggaacacttttacactgttggttggactgtaaactagttcaaccattgtggaagtcagtgtggtgattcctcaggaatctagaactagaaataccatttgacccagccatcccattactgggtatatacccaaatgactataaatcatgctgctataaagacacatgcacacgtatgtttattgcggcattattcacaatagcaaagacttggaaccaacccaaatgtccaacaattatagactggattaagaaaatgtggcacatatacaccatggaatactatgcagccataaaaaatgatgagttcgtgtcctttgtagggacatggatgaaattggaaatcatcattctcagtaaactatcacaagaacaaaaaaccacacaccgcatattctcactcataagtgggagttgaacaatgacaacatatgggcacagggaaggaaacatcacacatcagggcctgtcaacagttgtctggagaaacaggaagagccaccatcattgcttcgtctaaataatcggatcaaacagctactcccaccggtagatttaacggaactgttacttgagatagatgcccagacaggatttacacatgagtttgcgcatgtcagtgaatctggtgctcgagcgcaagatttgcacatcagtttatgtgcggtattgatggctgaagcctgtaatatcggactggaaccgctgataaagcacaatataccagcactgacccgccatcggctcagttgggtgaaacagaattaccttcgtgcagaaacgctggtcagggccaatgcccgcctggttgattttcagtccacactggagcttgctggtcgttggggaggtggagaagtggcatcagctgacggcatgcgccttgtcacaccagtgaagaccatcaactcaggatctaacagaaaatatttttgttctggacgagggatcacctggtataacttcgtatctgatcggtactctgggttccatggcattgtggtacccggtacattacgggattcgatttttgtacgggaaggacttcttgagcagcagacagggctgaatccagttgaaatcatgacagacattgcgggtagcagcgatattattttcggtctgttctggctactggggtatcagttttccccccggcttgccgatgcaggtgaggcggtgttctggcgggtgaataaatcggcaaactacggagtactggataagttggcccgaggatatgcagatctgtcaaaagcggagagtcagtgggatgagatgatgcgaaccgctggttcgctgaagttgggtacaattcatgcgtcagaactcattcgctctttactgaaaagctcgcgcccatcaggactggcacaggcaattatggaagtagggcgtgtaaacaaaacgctatatctcctcaattatattgatgatgaagattatcgtcggcggatcctgacgcagcttaatcgaggagaaggccgccacgctgtggctcgtgcgatttgttacggacaacgcggagagatcagaaagcgttatcgtgaagggcaggaagatcaactgggggcgctgggcctggttactaatgcagtggttctgtggcacacgctctatatggaggaagcgttgagttggatgcgccgcaatggcgaagaaattatagatgaagatatcgcttggctatctcccctgatgcacgggcatatcaatatggcaatcaggcaggagaaagaaataaagggtattcaattaggaaaagaggaagtcaaatggtccctgtttgcagatgacatgattgtatatttagaaaaccccatcgcctcagcccaaaatctccttaagctgataagcaacttcagcaaagtctcaggatacaaaatcaatgtgcaaaaatcacaagcattcttatacaccaataacagacaaacagagagccaaatcatgagtgaactcccattcacaattgcttcaaagagaataaaatacctaggaatccaacttacaagggatgtgaaggacctcttcaaggagaactacaaaccaatgctcaatgaaataaaagaggatacaaacaaatggaagaacattccatgctcatggataggaagaatcaacatcgtgaaaatggcaatactgcccaagctaatttatagattcaatgccatccccatcaagctaccaatgactttcttcacagaattggaaaaaactactttaaagttcatatga

SEQ ID NO: 13953 - DNA, 3871 bp, Homo sapiens
  SIMILAR (1470)..(4): 791254mologous to Homo sapiens putative p150,accession number U93574,Smith-Waterman Score=2020.
atgtaccaagcaaatggaaaacaaaaaaaggcaggggttgcaatcctagtctctgataaaacagactttaaaccaacaaagatcaaaagagacaaagaaggccattacataatggtaaagggatcaattcaacaagaagagctaactatcctaaatatatatgcacccaatacaggagcacccacattcatacagcaagtcctgagtgatctacaaagagacttagactcccacacattaataataggagactttaacaccccactgtcaacatcagacagatcaacgagacagaaagtcaacaaggatacccaggaattgaactcagctctgcaccaagcagacctaatagacatctacagaaccctccaccccaaatcaacagaatatacatttttttcagcaccacaccacacctattccaaaattgaccacatacttggaagtaaagcactcctcagcaaatgtaaaagaacagaaattataacaaactatctctcagaccacagtgcaatcaaactagaactcatgattaagaatctcactcaaaaccactcaaccatatggaaactgaacaacctgctcctgaatgactactgggtacataaggaaatgaaggcagaaataaagatgttctttgaaaccaacgagaacaaagacacaacataccagaatctctgggacacattcaaagcagtgtgtagagggaaatttatagcactaaatgcccacaagagaaagcaggaaagatccaaaattgacaccctaacatcacaattaaaagaactagaaaagcaagagcaaacactttcaaaagctagcagaaggcaagaaataactaaaatcagagcagaactgaaggaaatagagacacaaaaaacccttcaaaaaattaacgaatccaggagctgaaatacaaactaccatcagagaatactataaacacctctatgcaaataaactagaaaatctagaagaaatggataaattcctcaacacatacactctcccaagactaaaccaggaagaagttgaatctctgaatagaacaataacaggctctgaaattgaggcaagaattaatagcttaccaaccaaaaaaagtccaggaccagatggattcacagctgaattctaccagaggtacaaggaggagatggtaccattccttctgaaactattccaatcaatagaaaaagagggaatcctccctaactcattttatgaggccagcatcatcctgataccaaagcctggcagagacacaacaaaaaaagagaattttagaccaatatccctgatgaacatcgatgcaaaaatcctcaataaaatactggcaaaccaaatccagcagcacatcaaaaaccttatccaccatgatcaagtgggcttcatccctgggatgcaaggctggttcaacatatgcaaatcagtaaatgtaatccagcatataaacagaaccaaagacaaaaaccacatgattttctcaatagatgcagaaaaggcctttgacaaatttcaacaactcttcatgctaaaaactctcaataaattaggtattgatgggatgtatctaaaaataataagagctatttatgacaaactcacagccaatatcatactgaatgggcaaaaactggaagcattccctttgaaaactgccacaagacagggatgccctctctcaccactcctattcaacatagtgttggaaattctgaccagggcaatcaggcaggagaaagaaataaagggtattcaattaggagaagaggaagtcaaattgtccctgtttgcagatgacatgattgtatatctagaaaaccctatcatctcagcccaaaatctccttaagctgataagcaacttcagcaaagtctcaggatacaaaatcaatgtgcaaaaatcaccaagcattcctatacaccaacaacagacaaacagagagccaaatcatgagtgaactcccatttcacaattgcttccaagagaattaaatacctaggaatccaacttaacaagggatgtgaaggacctcttcaaggacaactacaaactactcactgatcaaggaaataagagaggacacaaacaaatggaaaaacattccatgctcatggataggaagaatgaatatcatgaaaatggccatactgcccaaggtaaatttatagattcaatgccatccccatcaagctaccaatgactttcttcacagaattggaaaaaactactttaagtaaagttcatatggaaccaaaaaaggtcctgcattgccatgacaatcctaacccaaaagaataaagccggaggcatcacactacctgacttcaaactatactacaaggctacagtacccaaaacagcatgcccgtctttcaaaacaaaagactataatttcatcaaagctgtttgctttgcccttggtcggcttctcagaataatcacctctacagtctgcaacgtgtcttggaaatgtgggctttcccggggttgtaaagcgttacagctactgctagaaggaggcttttcagggcatgccattctgcacatggtttctgagacttttaaatcggagagggagctcaaagaccacgaaatcatacctgttaactttacaggtgaggaaaggaaggctcagaggcactgtggggagccgctgaaagattttaaacagggatgggccaacggggctctctggtctgcggcttcattcctgaagtcagtgagaccacgaacctactggaaggaagaaactccagacacatctgaacatctgaagaaaccaactccagacacatcatctttaagaactgtaacactcactgtgaggttccgcggcttcattcttgaagtcagcgagaccaagaacccaccagaaggaaccaattccagacacattttggcaaccacaaagggactattgactatcgccaagtggaggaaaactagcgtttctgctgctgcgtcagtgagcgcaactattccgatcagcagggtccagggaccgttgcgggttcttgggcaagaggtgtttctgctgcttcatcgcctccctatagctccccttcctattaatgataagcctcctctaatcttccccacccagaaggaaataaacaaagacatctccaaaggaccacaaaaccctctgggctatcagttatgtccccttcatgctatagggggaggagaatttggcgcaacctggaattggaaaaaactacttaagttcatatggaaccaaaaaagagcctacattgccaagacaatcctaagccaaaagaacaaagctggaggcttcatgctacctgacttcaaactatactacaaggctacagtaaccaaaacagcattgtactggtaccaaaagagagatatagaccaatggaacagaacagagcccttagaaataataccacacatctacaaccttctgatctttgacaaacctgacaaaaacaagaaacggggaaaggattccctacttaataaatggtgctgggaaaactggctagccatatgtagaaagctgaaactggatcctttccttacaccttatacaaaaactaattcaagatggattaaagacttaaatgttagacttaaaaccataaaaaccctagaagaaaacctaggcaataccattcaggacataggcatgggcaaggacttcatgactaaaacaccaaaagcaatggcaccaaaagcaatggcaacaaaagccaaaattgacaaatgggatctaattaacctaaaaagcttctgcacagcaaaagaaactaccatcagagtgaacaggcaacctacagaatgggagaaaatttttaccatctacccatctgacaaagggctaatatccagaatctaa

SEQ ID NO: 13954 - DNA, 425 bp, Homo sapiens
  SIMILAR (53)..(136): 441254mologous to Schizosaccharomyces pombe azr1+,accession number X98329,Smith-Waterman Score=46.
  misc_feature (1)...(425): n = a,t,c or g
ggcctcgtgccatttgactgctataattatttgtactgttgatcacatgtacttaaaacatctgatactgtattctaagacaggttgtttttgcaattaaatttattttaataagacgatcatgaataaaactttaaattgatatttttnnnnnnnnnnnnnnnnnnnnnnnnnnnnnnnnnnnnnnnnnnnnnnnnnnnnnnnnnnnnnnntctgtctctgacnnnnnnnnnnnnnnnnnnnnnnnnnnnnnnnnnnnnnnnnnnnnnnnnnnnnnnnnnnnnnnnnnnnnnnnnnnnnnnnnnnnnnnnnnnnnnnnnnnnnnnnnnnnnnnnnnnnnnnnnnnnnnnnnnnnnnnnnnnnnnnnnnnnnnnnnnnnnnnnnnnnnnnncnnnnnnnnnnnnnnnnnnnnnnnnnnnnnnnnn

SEQ ID NO: 13955 - DNA, 916 bp, Homo sapiens
  SIMILAR (1933)..(311): 1001254mologous to Homo sapiens UDP-Galactose ceramide galactosyl transferase,accession number U30930,Smith-Waterman Score =2867.
actgtgacggttatccatacagttgccagagtgggaaatctggacatccagattcagaggaaatctgaactcttcctgtccctggtagtttgtgaagctataaaaaatgaaatgaatgttatgctgaaaagttctccagttgatttggtaactgctacggaccaaaaagttgaaaaaatgcttatctcttccataaaggaaaagtatccatctcacagtttcattggtgaagaatctgtggcagctggggaaaaaagtatcttaaccgacaaccccacatggatcattgaccctattgatggaacaactaactttgtacatagatttccttttgtagctgtttcaattggctttgctgtaaataaaaagaaaaaagtggatgaaacatacttaggtttggtaaaggaaacttgttttcctctgcagatagaatttggagttgtgtacagttgtgtggaaggcaagatgtacactgccagaaaaggaaaaggtgccttttgtaatggtcaaaaactacaagtttcacaacaagaagatattaccaaatctctcttggtgactgagttgggctcttccagaacaccagagactgtgagaatggttctttctaatatggaaaagcttttttgcattcctgttcatggggatccggagtgttggaacagcagctgttaatatgtgccttgtggcaactgggcggagcagaatgcatattatgaaatgggaattcactgctggggatgttgcaggagctggcattattgttactgaagctggtggcgtgctaatggatgttacaggtggaccatttgatttgatgtcacgaagagtaattgctgcaaataatagaatattagcagaaaggatagctaaagaaattcaggttatacctttgcaacgagacgacgaagattaa

SEQ ID NO: 13956 - DNA, 2903 bp, Homo sapiens
  SIMILAR (190)..(1584): 921254mologous to Homo sapiens putative p150,accession number U93563,Smith-Waterman Score=2261.
  misc_feature (1)...(2903): n = a,t,c or g
tttcgtcgttcacagagctagccggacgtcctccgactcaagctcctagaaacttggtgcatccccaggcccaggtagtcactctaagtgatggggcagcgcccaggtcctgtgctgcccgcagtcgcggtgctgggacgggtggcaaaaaggaaggtggcctggctcctacgctggaaggctgtgaccaggacagaaacagcaggaaacagttcaggtgtttatggctttgggaaaatgaaaatatttgtcaaatattttcagaagatggctgatccttggcaggaatgcatggattatgcagtaactctagcaagacaagctggagaggtagtttgtgaagctataaaaaatgaaatgaatgttatgctgaaaagttctccagttgatttggtaactgctacggaccaaaaagttgaaaaaatgcttatctcttccataaaggaaaagtatccatctcacagtttcattggtgaagaatctgtggcagctggggaaaaaagtatcttaaccgacaaccccacatggatcattgaccctattgatggaacaactaactttgtacatagatttccttttgtagctgtttcaattggctttgctgtaaataaaaagatagaatttggagttgtgtacagttgtgtggaaggcaaagatgtacactgccagaaaaggaaaaggtgccttttgtaatggtcaaaaactacaagtttccataaacaagaaagaatattaccccaaaccccctcctgggtggactgaagttgggcctcctcccagaacacccagagacctgtgaagaatggttcctttcctaatatggaaaagccttttttgccattccctgttcatgggatccggagtgttggaacagcagctgttaatatgtgccttgtggcaactggcggagcagatgcatattatgaaatgggaattcactgctgggatgttgcaggagctggcattattgttactgaagctggtggcgtgctaatggatgttacaggtggaccatttgatttgatgtcacgaagagtaattgctgcaaataatagaatattagcagaaaggatagctaaagaaattcaggttatactctttgcaacgagacgactattattaattaaggcagcctcatagtcaatcccaggtgctttttcccagatttggtgactcatcaatggatattgtgtttttggatgtatgatatgcttggtttaaattctctttgtccaggtcaaaaatttggaacttgtttcttattttactatgtctaggtttgcaagaattgacataatgtttgtttcactgatttaaaaaattttgcatgtaagaatgtacctttaggggaacatacccaggaagttcaggttgtaaatataacatcaactgaaatagtcaattagcaattttgtgtttctaaatatatatggacccctgaaattttgaccttagtatataggtgcagagacaccccacntagaaagttaactgtttggaaaaacatttctctttagtttcaaaaaccatatataattaaatccgtaaggatatactgagtaccctaggccaacttttttttctttgcagagaaccttttttgctttattcttcagtgttcatatagcacctgggcccattacatatctagggcaactaaaaacaaacattgtaaggaatgaatatttttaatgtaggtaattcctagttacaataggatacataaagtaatggaactcagcattctgtacttttgcttccgggttggaggtaaaaattatctagttaaatttttttttatttcacgttaccatgccatttcacattaccataccatcagatagcatggcttattgtgggcatttctgcagtgaatacattttccaaaacagttaaattgtctgtttggatttgctttaaagtcttgtgtaagagagaagaaactatttctataataaaaagcactctcatcagatatctgacataattagatacaatataacattttactaagttcagtattcatgttttaaaggtgtttatactgatttgattgtgctggcaaatatactgtattgttaatattgaactgtttatttttctcttagtcttcttatttaattaaccttcattggcccgctggattctgttcagccctttaaaaatatttcttagtggtcattgctctgcaggaactcaaaaaggaaaattggtaccttggttcatagacatttttaaaggggttaatttattggtccagcccttacccctggcacgtaaacagactactaaacttattgtaggttcggtttgagcttttgtgttgtaaaattaaaaatgcttctgtaaagttttcaagggtagggagtgattttattattgtgtatatctaatatattaagtatgtgtgatactaaggtttgactgcttataattatttgtactgttgatcacatgtacttaaaacatctgatacctgtattctaaggacaggttgtttttgcaattaaatttattttaataaggacgatccatggaataaaactttaaaattggatatttttattcattattacccattatcattattattatttttagattcagggtctcgctctgttgcccagggtctgtctctgactgtgctgtggtgcagtcatagctcactgtatccttaaattcctgggggctcaagtgatcctcctctttcagtctcctgagtagctggggactataagttcatgccaccatgccctactaatgttttaattttatttttgtaaagatgggatcttcctatgttttcccagccccttggcctcccaaagtgctgggattacagatgtgagccaccgagccaggccacgatatttacattattaaagttaatagttcaaactaca

SEQ ID NO: 13957 - DNA, 375 bp, Homo sapiens
  SIMILAR (297)..(142): 361254mologous to Pisum sativum early nodulin 12B ENOD12B,accession number X57232,Smith-Waterman Score=63.
gagttgcaatgcaaagctccataatgacttccctctccctcttccaaagacacagattctctgcatcatgctgcgctcctaggggaagggcgaagggtagtgtgagcaattcaaggctgtctttcccaccctcttcagtgcctcttccttgatatgatgttaaaaccaggtactgtgattgctcaccttattttctggttcttttgaaggcgctgtcttctgtggataatagttcaatttggtgttcttgaggggtgaggttggaggggacagggtgggatgatagctggagggttctgtttggccatcttgctctctttatagttattcttcattagatagaatcaccaaggcaggaaggtgtcattactgctt

SEQ ID NO: 13958 - DNA, 879 bp, Homo sapiens
  SIMILAR (416)..(793): 321254mologous to Leishmania major proteophosphoglycan,accession number AJ243460,Smith-Waterman Score= 105.
tcagatgtgagaagtgagatgcttggtgtggtgaggttcacagtgcagctctccaccaccagcttcacgatgtggaagctgctcatctgctccttctcggcattgcccctgcagagattttgagcctgcagtggcagggcttgctagaactccggttctgactaccaagacgaacccttctcctccagctaggactggtctaaatgctccctccatgggcaccagcctaattctgccctgtgttgctttccactgtatcagggcagcactgagttgcaatgcaaagctccataatgacttccctctccctcttccaaagacacagattctctgcatcatgctgcgctccttattttctggttcttttgaaggtgctgtcttctgtggataatagttcaatttggtgttctgctggtcctccagcccagtctgctctctgtacacaatccccatgagcagcatgagtgccaagaactgctcagtgctcaggtctggcacctgggcttctttcacgtgctcataaggcagccagcgtgtttccctaggtaccccggaggctttgggcacagaggaccacacgtccagaagtttgggccattcacatgtgtgccatgtggacctctctccagccactgcttcctgtagcttccaaacggcctcctcagaagtgtcacctccagccactgcttcctgtagcttccaaacggcctcctcagaagtgtcacctccagccactgcttcctgtagcttccaaacggcctcctcagaagtgtcacctgcagccactgcttcctgctctttcacattttctttcttctttgtctgtgctctgtggtttggcatctgccccagctgctctgctgccgtcttgtctaccat

SEQ ID NO: 13959 - DNA, 202 bp, Homo sapiens
  SIMILAR (1)..(105): 911254mologous to Homo sapiens NAG13,accession number AF194537,Smith-Waterman Score=167.
atgaacatcaatgcgaaaatcctcaataaaatactggcacaccgaatccagcagcacatcaaaaagcttatccaccatgatcaagtgggcttcatccctgggataaccaacgacaaaaaccacatgattatctcaatagatgcagaaaaggcctttgacaaaattcaacaacccttcatgctaaaaactctcaataaactag

SEQ ID NO: 13960 - DNA, 245 bp, Homo sapiens
  SIMILAR (63)..(245): 501254mologous to Homo sapiens BC85722_1,accession number AC006486,Smith-Waterman Score=76.
cacatggccagtgaggacatagcgagtgacgaggagcacacggtcatccatgaggaggagggggtggagaagctgaggacaggctcagggaaccggagaccgagaaggcgctgtcctcttcactgcacgcgccccggaccagtgccggccctgatcatgcagctcttccaggcccactgcttcttcctgtccactaggccacagctgctctccaggcccactatgcacacatcttcccctccaag

SEQ ID NO: 13961 - DNA, 2061 bp, Homo sapiens; identical to SEQ ID NO: 5423
  SIMILAR (1093)..(2538): 941254mologous to Homo sapiens putative p150,accession number U93564,Smith-Waterman Score=2460.

SEQ ID NO: 13962 - DNA, 339 bp, Homo sapiens
  SIMILAR (145)..(1566): 941254mologous to Homo sapiens putative p150,accession number U93572,Smith-Waterman Score=2430.
atgaacgaagaccaaatgaatgaaatgaagcgagaggagaagtttagagaaaaaacagtaaaaagaaatgaacaaagcctccaagaaatatgggactatgtgaaaagaccaaacttatgtctgactggtgtacctgaaagtggcggggagaatggaaccaagttggaaaacactcttcaggatattatccatgagaacttccccaacctagcaagaaccgaagacaaaaaccacatgattatctcaatagatgcagaaaaggccttcgacaaaattcaacagcccttcatgctaaaaactctcaataaactagtattgatgggacgtatctcaaaataa

SEQ ID NO: 13963 - DNA, 1638 bp, Homo sapiens
  SIMILAR (1)..(1278): 921254mologous to Homo sapiens putative p150,accession number U93563,Smith-Waterman Score=2091.
atgattatctcaatagatgcagaaaaggcctttgacaaaattcaacagcccttcatgctaaaaactctcaataaattaggtactgatgggacgtacttcaaaataataagagctatctatgacaaacccacagccaatatcatactgaatggacaaaaactggaagcactccctttgaaaactggcacaagacaaggatgccctctctcaccactcctattcaacatagtgttggaagttctggccagggcaatcaggcaggagaaggaaataaagggcattcaattaggaaaaggggaagtcaaattgtccctgtttgcagatgacatgattgtatatctagaaaacgccatcatcgcagcccaaaatctccttaagctgataagcaacttcagcaaagtctcaggatacaaactcaatgtacaaaaatcacaagcattcttatacaccaataacagacaaacagagagccaaatcataagtgaattcccattcacaattgcttcaaagagaataaaatacctaggaatccaacttacaagggatgtgaaggacctcttcaaggagaactacaaaccactgctcagtgaaataagaggatacaaacaaatggaagaacattccatgctcatggataggaagaatcaatatcgtgaaaatggccatactgcccaaaaattggaaaaaattactttaaagttcatatggagtcaaaaaagagcccgcatcaccaagtcaatcctaagccaaaagaacaaaggtggaggcattatgctacctgacttcaaactatactacaaggctacagtaaccaaaacagcatggtactggtaccaaaacagagatatagaccaatggaacagaacagagccctcagaaataatgccgcatatctacaactatctgatctttgatgaacctgacaaaaacaagcaatggggaaaggattccctatttaataaatggtgctgcgaaaactggctagccttatgtagaaagctgaaactggatcccttccttacaccttatacaaaaattaatgcaagatggattaaagacttacatgttagacctaaaaccataaaaaccctagaagaaaacctaggcaataccattcaggacataggcatgggcaaggacttcatgtctaaaacaccaaaagcaatggcaacaaaagccaaaattgacaaatgggatctaattaaactcaagagcttctgcacagcaaaagaaaccaccatcagagtgaacagtcaacctacagaatgggagaaaatttttgcaacctactcatgtgacaaagggctaatatccagaatctacaatgaactcaaccaaatttacaagaaaaaaacaaacaaccccatcaaaaagtgggcaaaggatatgaacagacacttctcaaaagaagacatttatgcagccaaaaaacacatgaaaaaatgctcttcatcactggccatcagagaaatgaaaatcaaaaccacaatgagataccatctcatatcagttagaatggagatcattaaaaagtcagaaaacaacaggtgctggagaggatgtggagaaataggaacacttttacactgttggtgggactgtaaactagttcaaccattgtggaagtcagtgtggtga

SEQ ID NO: 13964 - DNA, 1443 bp, Homo sapiens; identical to SEQ ID NO: 8634
  SIMILAR (1)..(438): 891254mologous to Homo sapiens putative p150,accession number U93564,Smith-Waterman Score=666.

SEQ ID NO: 13965 - DNA, 2805 bp, Homo sapiens
  SIMILAR (1)..(3156): 951254mologous to Homo sapiens putative p150,accession number U93565,Smith-Waterman Score=5296.
ctaaaggccaactactaattccttgccacatggcccttccacatcatggccctttgccttttcaaggctgttggagagtctcctccagtatgctgtgaggagccttatcacaggaaagtaatgagagatgtaagattttgctgctgagacttgcagaaagttatcgccgtcattgtcactgtcattgtcagcatcatgatcatcactgacacattttttgtcatccttgggcaatatggccattttcacaatattgattcttcctatccatgagcatggaatgttcttccatttgtttgtgtcctcttttatttcgttgagcagtggtttgtagttctccttgaagaggtccttcacatcccttgtaagttgtatttctaggtattttattctctttgaagcaattgtgaatgggagttcactcatgatttgactctctgtttgtctgttactggtgtataggaatgcttgtgatttttgcacattgattttgtatcctgagactttgctgaagttgcttatcagcttaaggagattttgggctgagatgatggggttttctaaatatacaatcatgtcatctgcaaacagggacaatttgacttcctcttttcctaattgaataccctttatttctttctcttgcctgattgccctggccaaaacttccaacactatgttgaataggtgtggtgagagagggcatccctgtcttgtgctgcttttcaaagggaatgcttccagtttttgcccattcagtatgatattggctgtgggtttgtcataaatagctcttattattttgagatatgtcccatcaatatctaatttattgagagtttttagcatgaagggctgttgaattttgtcaaaggccttttctgcatctattgagataatcatgtggtttttgtccttggttctgtttatatgctggattacatttattgatttgtgtatgttgaaccagccttgcatcccagggatgaagcccacttgatcatggtggataagctttttgatgtgctgctggattccgtttgccagcattttattgaggattttcacatcgatgttcatcagggatattggtctaaaattctctttttttgttgtgtctctgctaagctctggtagaattcggctgtgaatccatctggtcctggacttttttttggttggtatgctattaattattgcctcaacttcagagcctgttattgatgtattcagagattcaacttcttccttgtttagtcctgagagggtgtatgtgtccaggaatttatccatttcttctagattttctagtttatttgcatagaggtgtttatagtattctctgctgatagtttgtatttctgtgggattggtggtgatatcccctttatcattttttattgtgtctatttgattcttctctcttttcttctttattagtcttggtagtggtctatcaattttgttgatcttttcaaaaaaccagctcctggattcattgattttttgaaggcttttttgtgtctctatctccttcagttctactctgatcttagttatttcttgtcttctgctagcttttgaatgtgtttgctcttgcttctctatttcttttaattgtgatgctagggtgtcaatcttagatctttcctgctttctcttgtgcgcatttagtgctataaatttccctctacacactgccttaaatgtatgccagagattctggtatgttgtgtctatgttctcattggtttcaaagaacatctttatttctcccttcatttcattatgtacccagtagtcattcaggagcaggttgttcagtttccatgtagttaagcagttttgagtgagtttcttaatcttgagttctttctctctggctgcccttaacattttttccttcatttcaactttggtgaatctgacaattatgtgtcttggagttgctcttcttgaggagtatctttgtggcgttctctgtatttcctgaatttgaatgctggcctgccttgctaggttggggaaattctcccggataatatcctgcagagtgttttccaacctggttccattctccccgtcactatcaggtacaccaatcagacgtagatctggtcttttcacatagtcccatatttcttgtaggctttgttcgtttctttttactcttttttctctaaacttctcttctccctttatttcattcatttgactttcaatcacttctgaagccttcttctgtgaactcatcaaactcattctccgtccagctttgttccactgctggtgaggagctgcattcctttggagggagagagccactctgatttttagaattttcagcttttctgctatgttttttccccatctttgtggttttatgtaactttggtctttgatgatggtgacgtacagatggggttttggtgtggatgtcctttttgttgatgttgatgctattcctttctgtttgttagttttccttctaacagtcaggaccctcagctgcaggtctgttggagtttgctggaggtccactccagacgctgtttgcctgggtatcagcagcggaggccctccattactgactgactcttcacttataatccagctgtttggtttcttgataccttctaagccccactgtctcaatggctgggttaagatacttaaagtctgcctgcaggttccactaaaatcacaaccttgaattccttcctgtgttacatccaagaactctctcttggagtctggatcaatagcccattttccggcaacatctctgtagccagtgccatacat

SEQ ID NO: 13966 - DNA, 1989 bp, Homo sapiens; identical to SEQ ID NO: 3796
  SIMILAR (334)..(981): 881254mologous to Homo sapiens putative p150,accession number U93565,Smith-Waterman Score=978.

SEQ ID NO: 13967 - DNA, 1932 bp, Homo sapiens; identical to SEQ ID NO: 12692
  SIMILAR (1700)..(3880): 991254mologous to Homo sapiens BC331191_1,accession number AC007842,Smith-Waterman Score=4075.

SEQ ID NO: 13968 - DNA, 1578 bp, Homo sapiens; identical to SEQ ID NO: 8659
  SIMILAR (1174)..(2007): 901254mologous to Homo sapiens p40,accession number U93566,Smith-Waterman Score=1292.

SEQ ID NO: 13969 - DNA, 1857 bp, Homo sapiens
  SIMILAR (170)..(2248): 921254mologous to Homo sapiens putative p150,accession number U93563,Smith-Waterman Score=3334.
atgcaagggtggttcaatgtacgcaaatcactaaatataatccatcacataaacagaaacaatgacaaaaaccacatcattatctcaatagatgcagaaaaggccttcgacaaaattcaacagcccttcatgctaaaaactctcaatgaactaggtattgatggaacgtatctcaatataataagaactatttatgacagacccgcagccaatatcatactgaatgtgcaaaaactggaagcattccctttgaaaacaggcacaagacaaggatgccctctcttaccactcctattcaacataatgttggaagtgctggccagggcaatcaggcaagagaaagaaatgaagggtattcaattaggaaaagaggaaattaaattttccctgtttgcagatgacatcattgtctatttagaaaaccccattttctcagccccaaatttccttaagctgataagcaacttaagcaaattctcaggatacaaaatcaatgtgcaaaaatcacaagcattcctatacatcataaacagacaaacagagagccaaatcatgagtgaactccgattcacaattgctaccaagagaataaaatacctaggaatccaccttacgagggatgtgaaggatctcttcaatgagaactacaaaccactgctcaatgaaataaaagaggacacaaacaaatggaagaacattccatgctcatggacaggaagtatcaatattgtgaaaacagccatactgcccaaagtaatttatagattcaatgccattcccatcaagctccaactgactttcttcacagaattggaaaaaactgctttgaagttcatgtggatacaaggctacagtaaccaaaacagcatggtactgactctgctggtgatacccaggaaaatgcggtctgcagtggaactccagcaaacttcaacagacctgcagctgagggacctgactgttagaaagaaaactaacaaacggaaagcaacagcatcaacttcacaaaaaggtcatctacaccaaaaccccatctgtaggtcaccaacatcaaagaccaaagaagtaggcttcagaaggtcggtaataacaaacttctctgagctaaaggaggatgttcgaacctatcacaaggaagctaaaaaccttgaaaacagattagatgaatggctaactagaataaacagtgtagagaagaccttaaatgacctgaaggagctgaaaaccatggcacgagatcttcatgatgcatgcacaagcttcaatagacgatttgatcaagtggaagaaagggtaacagtgactgaagatcaaattaatgaaataaatgatggagagaatggaaccaagttggaaaacactcctcaagatattatccaggagaacttccccaatctagcaaggcaggccaacattcaaattcaggaaatacagagaacactacaaagatactcctcgagaagagcaaccccaagacacataattatcagattcaccaaggttgaaatgaaggaaaaagtgttaaaggcagccagagagaaaggtcgagttacctacaaagggaagcccatcagactaacagcggatatctcggcagaaatcctacaagccagaagagagtgggggcccatattcaacattctcaaagaaaagaattttcaacccagaatttcatatccagccaaactaagcttcataagtgaaagagaaataaaatcctttacagacaagcaaatgctgagagattttgtcaccaccaggcctgccttacaagagctcctgaaggaagcactaaatatggaaaggaacaaccggtgccagcactgcaaaaacttgccaaattgtaaagaccattga

SEQ ID NO: 13970 - DNA, 1106 bp, Homo sapiens
  SIMILAR (240)..(1103): 901254mologous to Homo sapiens putative p150,accession number U93572,Smith-Waterman Score=1301.
aaatacaaactaccatcagagaatactataaacacctctatgcaaatgaactagaaaatctagaagaaatggataaattcctggacacatataccctcccaagactaaaccaggaagaaggtgaatctctgaatagaccaataacaggctctgaaattgaggcaataattaataacctaccaaccaaaaaaagtccaggaccagatggattcactgccaaattctaccagagcaccaacaataaaaaccacatgattatctcaatagatgcagaaaaggccttccacaaaattcaacagcctttcatgctaaaaactctcaataaactaggtattgatggaacttatctcaaaataataagagctatttatgacaaacccacagccaatatcatactgaatgggcaaaaactggaagcattccctttgaaaactggcacaagacagggatgccctctctcaccactcccattcaacatagtgttggaagttctggccagggcaatcaggcaggagaaagaaataaactgtattcaattacacaatgaggaagtcaaattgtctccatttgcagatgacatgattgcatatttagaaaaccccatcgtctcagcccaaaatctccttaagctgataagcaacttcagcaaagtctcaggatacaaaatcaatgtgcaaaaatcacaagcattcctatacaccattaacagacaaactgagagccaaatcatgagtgaactcccattcacaattgctacaaagagaataaagtacctaggaatccaacttacaagggatgtgaagtacctcttcaaggagaactacaaaccactgctcaatgaaataaaagaggatacaaacaaatggaagtacattccatgctcatggataggaagaatcaatatcgtgaaaatggccatactgcccaaagtaatttatagattcaatgccatccccattaagctaccaatgaccctttcttcacagaattggaaaaaaactactttaaagttcatatggaaccaaaaaagagcccgcattgccaagtcaatcctaagcaaaaagaacaaagctggaagcatcatgctacctgacttcaaactatag

SEQ ID NO: 13971 - DNA, 1063 bp, Homo sapiens
  SIMILAR (1024)..(2130): 921254mologous to Homo sapiens putative p150,accession number U93574,Smith-Waterman Score=1812.
atgcaagggtggttcaatgtacgcaaatcactaaatataatccatcacataaacagaaacaatgacaaaaaccacatcattatctcaatagatgcagaaaaggccttcgacaaaattcaacagcccttcatgctaaaaactctcaatgaactaggtattgatggaacgtatctcaatataataagaactatttatgacagacccgcagccaatatcatactgaatgtgcaaaaactggaagcattccctttgaaaacaggcacaagacaaggatgccctctcttaccactcctattcaacataatgttggaagtgctggccagggcaatcaggcaagagaaagaaatgaagggtattcaattaggaaaagaggaaattaaattttccctgtttgcagatgacatcattgtctatttagaaaaccccattttctcagccccaaatttccttaagctgataagcaacttaagcaaattctcaggatacaaaatcaatgtgcaaaaatcacaagcattcctatacatcataaacagacaaacagagagccaaatcatgagtgaactccgattcacaattgctaccaagagaataaaatacctaggaatccaccttacgagggatgtgaaggatctcttcaatgagaactacaaaccactgctcaatgaaataaaagaggacacaaacaaatggaagaacattccatgctcatggacaggaagtatcaatattgtgaaaacagccatactgcccaaagtaatttatagattcaatgccattcccatcaagctccaactgactttcttcacagaattggaaaaaactgctttgaagttcatgtggatacaaggctacagtaaccaaaacagcatggtactgactctgctggtgatacccaggaaaatgcggtctgcagtggaactccagcaaacttcaacagacctgcagctgagggacctgactgttagaaagaaaactaacaaacggaaagcaacagcatcaacttcacaaaaaggtcatctacaccaaaaccccatctgtaggtcaccaacatcaaagaccaaag

SEQ ID NO: 13972 - DNA, 1014 bp, Homo sapiens; identical to SEQ ID NO: 4329
  SIMILAR (316)..(981): 831254mologous to Homo sapiens putative p150,accession number U93570,Smith-Waterman Score=939.

SEQ ID NO: 13973 - DNA, 1216 bp, Homo sapiens
  SIMILAR (1059)..(409): 881254mologous to Homo sapiens putative p150,accession number U93563,Smith-Waterman Score=985.
tcatgatattgattcttctatccatgagcatggaatgttcttccatttgtttgtgtcctcttttatttcattgagcagtaatttgtagttctccttgaagaggtccttcacatcccttgtaaattggattcctaggtattttattctctttgtatcaattgtgaatgggagttcactcgtgatttggctctccatgtgtctgttattggtgtataggaatgcttgtgatttttgcaggttgattttgtatcttgagactttgctgaagttgcttatcagcttaaggagattttgggctgagacgatggagttttctaaatagacaatcatgtcatctgcaaacagagacaatttgacttcctcttttcctaattgaataccttttatttctttcttttgcctgattgtccctagtttattgagagtttttagcatgaagggctgttgagttttgtcgaaggccttttctgcatctattgagataatcatgtggtttttgtcattggtttggtttatgtgatggattacgtttattgatttgcattttttgaaccagcctttcatctcagggatgaagccgacttgatcgtggtggataagcttttcgatgggctgccggattcggtttgccagtattttattgaggatttttgcatcgatgttcttcagggatattggtctaaaattctctttttttgttgtgtctctgccaggttttggtatcaagatgatgctagcctcataaaatgagttagggaggattccctctttttctattgattggaatagtttcagaaggaatgataccaactcctctttgtacctctcgtagaatttggctgtgaatccatctggtcctggactttttttggttggtaggctattaattattgcctcaatttcagagcccattattggtctattcagagattcaacttcttcctgctttagtcttgggagggtgtatgtgtccaggaatttatccatttcttctagattttttagtttatttgcatagaggtgtttatggtattctctgatggtaatttgtatttctgttaattgatgcagtttcttcatagcattgatgttctttacaatttggcaggtttttgcagtggctggtaccagttgttcctttccatgtttagtgcttcctttaggaactcttgtaacacaggcctggtggtgacaaaatctctgagcatttgcttgt

SEQ ID NO: 13974 - DNA, 1518 bp, Homo sapiens; identical to SEQ ID NO: 6840
  SIMILAR (1799)..(2500): 941254mologous to Homo sapiens putative p150,accession number U93563,Smith-Waterman Score=1178.

SEQ ID NO: 13975 - DNA, 1596 bp, Homo sapiens
  SIMILAR (984)..(4): 891254mologous to Homo sapiens putative p150,accession number U93572,Smith-Waterman Score=1507.
tcatttttggttccatatgaactttaaagtagttttctccaattctgtgaagaaagtcattggtagcttgatggggatggcattgaatctataaattaccttggccagtatggccattttcatgatattgattcttcctatccatgagcatggcatattcttccatttgtttgtatcctcttttatttccttgagcagtggtttgtagttctccttgaagaggtccttcacatcccttgtaagttggattcctaggtattttattctccttctggcaattgtgaatgggaattcattcatgatttggctctctctttgtctgttattgatgtataggaatacttgtgatttttgcacattgattttgtatcctgagactttgctgaagttgcttatcagcttaaagagatttggggctgagacgatggggttttctaaatatacaatcatgtcctctgcaaacagggacaatctgactttctcttttcctaattgaatacactttatgtctttctcttgcctgattgccctggccagaacttccaatgctatgttgaataggagtggtgagagaggacatccttgtcttgtcctgtcttttaaagggaatgcttccagtttttgcccattcagtatgatactggctgtggatttgtcataaatagctcttattattttgagatacgtcccatcaatacctagttttttgagagtttttagcatgaagggctgttgaattttgtcaaaggccttttctgcatctattgagataatcatgtggtttttgtcattggttctgtttatgtgatggattacgtttattgatttgcatatgttgaaccagccttgcatcccagagatgaagccaacttgatcatggtggataagctttttgatgtgctgctggattcggtttgccagtattttattgaggattttcacatcgatgttcatcagggatattggtctaaatttctctttttgttgttgttgtgtctctgccaggcttctgaagcctacttctgtcagctcgtcaaagtcattctccatccagctttgttccattactggtgaggagctgtgatcctttggaggagaaaaggcactctggtttttagaattttcagcttttctgctctggtttctccccatctttgtggttttatctacgtttggtctttgatattggtgacctacagatggggttttggtgtggatgtcctttttttttgatgttgatgctattcctttctgtttgttcgttgtccttctgacagtcaggtccctcagctgcaggtctgttggagtttgctggaggtccactccagactgtgtttgcctgggtatcaccagcggaggttgtagaaatgtttctacagggctgaaggaaaccattttatatgagctatcatcatttgaaatggcactgatgaaagtctggactatggtgaggacttcagcttccccggtgggggatgtgtttgggagaggatggtctccctttcccacttccacagttggggcactcacagtgtttggggtgtctcctgggtcctgcaggagcagtccgcttccttcagagcgtctgtgggtcat

SEQ ID NO: 13976 - DNA, 1128 bp, Homo sapiens
  SIMILAR (1)..(1464): 961254mologous to Homo sapiens putative p150,accession number U93563,Smith-Waterman Score=2438.
atgaagcgagaagagaagtttagagaaaaaagagtaaaaagaaatgaacaaagcctccaagaaatatgggactatgagaaaagaccaagtctgcctctgattggtgtacctgaaagtgacggggagaatggaaccaagttggaaaacactcttcaggatattatccaggacaacttccccaatctaggaaggcaggccaacattcaaattcaggaaatacagataatgccacaaagatactcctcaaggagagcaactccaagacacataattgtcagattcaccaaagttaaaatgaaggaaaaaatattaagggcagccagagagaaagaaatacagactaccatcagcgaatactataaacatctctacgcaaataaactagaaaatctagaagaaatgggtaaattactggacacatacaccctcccaagacaaaaccaggaagaagttgaatccctgaatagaccaatagcaggctctgaaattgaggcaataattaatagcctgccaaccaaaaaaagtccaggaccagacggattcacagccaaattctaccagaggcacaaagaggagctggtaccattccttctgaaacaattccaatcaatggaaaaagaggtaatcctcccaaactcattttatgaagccagcatcatcctgataccaaagcctggcagagacacaacagaaaaagagaattttacaccgatatccctgatgatcattgatgcaaaaatcctcaataaaatactggcaaaccgaatccagcagcacatcaaaaagcttatccaccaagatcaagttggcttcatctctgggatgcaaggctggttcaacgaacacaaatcagtaaacgtaattcatcatataaacagaaccaaagacagaaaccacatgattatctcagtagatgcagaaaaggccttcaacaaaattcagcagcccttcatgctaaaaactctcaataaactaggaatccaacttacaagggatgtgaaggaccccttcaaggagaactacaaaccactgctcaatgaaataaaagaggatacaaacaaatggaagaacattccatactcatggataggaagaatcaatatcgtggaaatagccatactgcccaag

SEQ ID NO: 13977 - DNA, 918 bp, Homo sapiens
  SIMILAR (1)..(756): 871254mologous to Homo sapiens putative p150,accession number U93572,Smith-Waterman Score=1110.
atgcaagcctggttcaagatatgtaaatcaataaacataatccatcacataaacagaaccaacgacaaaaaccacgtgaatatctcaatagatgcagaaaaggcctttgacaaaattcaacagcccttcatgctaaaaactctcaataaactaggtattgatggaacgtatctcaaaataataagagctatttatgacaaacccacagccaatatcataatgaatggacaaaaactggaagcaatccctttgaaaaccagcacaagacaaggatgccctctctcaccgctcctattcaacatagtattggatgttccggcaagagcaatcaggcaagagaaagaaataaagggtattcaattaggaaaagaggaagtcaaattgtctctgtttgcagaggacatgaatgtatatttagaaaaacccatcgtctcagccccaaatctccttaagctgatatgcaacttcagcaaagccttaggatacaaaatcaatgtgcaaaaatcacaggcattcctatacaccaataatagacaaacagagagccaaatcatgagtgaacttctattcacaattgctacaaagagaataaaatacctaagaatccaacttacaagggatgtgaaggacctcttcaaggagaagtacaaaccactgctcaaggaaataagagaggacacaaacaaatggaacaacattccatgctcattgttaggaagaatcaatactgtgaaaatggccatactgcccaaaattgacccaacattaagaaagcatcgagaacagttggtcattgaagttggacgaaaactagacaaagctcagatgattcgttgtgaggagcgaactggatatttttcctcaactgatttgggtagaactgccagccattactatattaaatacaacaccattgag

SEQ ID NO: 13978 - DNA, 3309 bp, Homo sapiens
  SIMILAR (1227)..(19): 931254mologous to Homo sapiens putative p150,accession number U93574,Smith-Waterman Score=1983.
tcatgtccttcgcccactttttgatggggttgtttttttcttgtaaatttgtttgagttcattgtagattctggatattagtcctttgtcagatgagtaggttgcggaaattttctcccattttgtaggttgcctgttcactctgatggtagtttcttttgctgtgcagaagctctttagtttaattagatcccatttgtcaattttggcttttgttgccattgcttttggtgttttagacatgaagtccttgcccatgcctatgtcctgaatggtattgcctaggttttcttctagggtttttatggtttcaggtctaacatgtaagtctttaatccatcttgaattaatttttgtataaggtgtaaggaagggatccagtttcagctttctacatatggctagccagttttcccagcaccatttattaaatagggaatcctttccccattgctggtttttgtcaggtttgtcaaagatcagatggttgtagatatgcggcattatttctgagggttctgttctgttccattgatctatatctctgttttggtaccagtaccatgctgttttggttactgtagcattgtagtatagtttgaagtcaggtagcgtgatgcctctggctttgttcttttggcttaggattgacttggcgatgcgggctcttttttgattccacatgaactttaaagtagttttttccaattctgtgaagaaagtcattggtagcttgatgggggtggcattgaatctgtaaattaccttgggcagtatggccattttcacaatattgactcttcctacccatgagcatggagtgttcttccatttgtttgtatcctcttttatttcattgagcagtggtttgtagttctgcttgaaaaggtccttcacatcccttgtaagttggattcctaagtattttattctctttgaagcaattgtgaatgggagttcactcatgatttcgctctctgtttgtctgttattggtgtataagaatgcttgtgagttttgtacattgattttgtatcctgagactttgctgaagttgcttatcagcttaaggagattttgggctgagacaatggggttttctagatatacaatcatgtcatctgcaaacagggacaatttgacttcctcttttcctaattgaataccctttatttccttctcctgcctaattgccctggccagaacttccaacactaatttattgagagtttttagcatgaagggctgttgaattttgtcaaaggccttttctgcatctattgagataatcatgtggtttttgtctttggttctgtttatatgctggattacatttattgatttgcgtatgttgaaccagccttgcatcccagggatgaagcccacttgatcatggtggataagctttttgatgtgctgctggattcggtttgctagtattttattgaggatttttgcatcaatgttcatcaaggatattggtctagaattctcttttttggttgtgtctctgcccggctttggtatcaggatgatgctggcctcataaaatgagttagggaggattctctctttttctattgattggaatagtttcagaaggaatggtaccagttcctccttgtacctctggtagaattcagctgtgaatccatctggtcctggactctttttggttggtaagctattgattattgtcacaatttcagatcctgttattggtcttctgctagcttttgaatgtgtttgctcttgcttttctagttcttttaattgtgatgttagggtgtcaattttggatctttcctgctttctcttgtgggcatttagtgctataaatttccctctacacactgctttgaatgtgtcccagagattctggtatgttgggtctttgttctcgttggtttcaaagaacatctttatttctgccttcatttcgttatgtacccagtagtcactcaggagcaggttgttcagtttccatgtagttgagcggttttgagtgagtttcttagtcctgagttctagtttgattgcactgtggtctgagagacagtttgttgtagtttctgttcttttacatttgctgaggagtgctttacttccaactatgtggtcaattttggaataggtgtggtgtggtgcttcactcattacatttaatgtgtcttgttttccatctccttcttgtgactggcctggatctagtgaagtctgagaaaggctaacttctgctgataactggtcaagactttgataacttttctcataccactgtttattgtgttttcggtaaagcaacgtatccaaggcaacagcattgacatccagagctcctggagaaggccactggttggtgagatgggcagttaactcttgtctcgatcttaaatcattattctttagcacagtcctgtgaatattaagatggtgagtgcttttgtcttcactgttctgcctcgccattcctgtaagagggtgcacagagcacagcctgcactgccccgcctgagtgttttgccagtgacctgggagcagtttagcttccccagcacagctggtgttcaacccttctgcttgagggagccccatggcctggaacacttgggacagccccgcaatttcagcacagaaagcttggaacaaatctagctggttaggtctgttcagctgatcttgaagctccacaattatatattctaattgttccttctccagtttatgagccagatcggaatcttcaatcctttgaagtagtattttattctgggagacagattcagatagttggttctctcgaagtcgtaagagttcttcaaggtaacccttctgttccagggtaagctgatacttttgtttaactctcttacacttgttgaaccaactgttctcatccatgaggaaaggaggtccgacattctctggagtactgctttcgctaccactgcttcccaaagtccttagctcctcctcatcactgctgatactatcagaacaatgtgacaaactgctgagaagtgaattgtcagagagcccctctgcccctgcaaacctgggcaattctgccaatagtaatctggaaacatcctgtgggcagagcaccaggtggtcagcttgtgcagctgggctcacattgcccccaaacctgagctgaagcagtgggtgcgatactcgttgtgcagattcagggaatctcagcccttgtgtcactgcatcaccagattccccacaaacatttctcagagtcttctctgaatcagcagtgtaaaagggttcccctttctccatacccttgccagcattcat

SEQ ID NO: 13979 - DNA, 590 bp, Homo sapiens
  SIMILAR (1228)..(3285): 781254mologous to Mus musculus N-RAP,accession number U76618,Smith-Waterman Score=2680.
atgcccataggaaaagtgggagagtactacatcaagggaacactccgtgcgacaaaagagtctgaacaacagtcttcagccctagaactttcctctgacagagtctacctaaatgagaaggaaccaggagaccaaccctggaatgctgcatttgtcttccgaggctgcggtgtggctctcgcactgcggccgcctcaccttggctggggagaacctcggtgggcaggattcagaggggcttttggtttcccgttttccacactgaacccttctaactggtctctgaccctgattattcagggctgcaaacaggaaggattttattcaccgtcgatgcggccccgagttgtcccaaagcgaggcagtgcccccaaggtccgtgctgaggagaacgctgctctgccttcgcgttgtccccctggacccctgcctgtggcacaaccaaggggcctgctgatgggggctcatgtgagcagtgccccagctgtgggtgtgggtgctgccagctgccaccgcctttgccctggtttcccagatagaccccgacccacactccgaagctgtatcatgaacgctgtggtgggcggctg

SEQ ID NO: 13980 - DNA, 777 bp, Homo sapiens
  SIMILAR (145)..(465): 561254mologous to Homo sapiens BC85722_1,accession number AC006486,Smith-Waterman Score=273.
atgttcgtgtggagcaatgtggaaggtcactctgtggccatgttcccctggtactccatccccttcctgaaccctccctgcagccacacgaggcccagcaacctgccagtcactcagtggcctccaaccagagaaaacaacctgccaagttggcagctgttgctcacgagcatccaccaggcccagttcctcagtgccctgcacaaggaacagggctcatcttctgagaaggatggacgcagccccaacaaatgggacaaggaccacatccggtgtcccatgagtggcggtcatgatcttcagcaagcggcaccaggccctggcagggcacaccagggtcaccccaaccaggataactggaccgtcagccagatgctgagcaagtggtggtacaccctggggcccaatgagaggcagaaataccatgaactggccttccaggccacagccgccctccaggcccactatgtacacatcttcccctccaagggccgctgggagctgctgcatgggtcccagaggctggactggggcaggtgccaactgaagctgctggggcagcaagggcaggatgttctgcacacaaaccttggaaaagaagaaaatagttcctgctggggctacaagatggagtgtgaagagggctttgggccacagggaggcgactgtggactagggggagttcatgcaccccttctttccccagaggggctggactcagaacagaacacgttgatcatgggcgatatttttcattgtgccaaaaagttgccatga

SEQ ID NO: 13981 - DNA, 753 bp, Homo sapiens
  SIMILAR (28)..(285): 581254mologous to Mus musculus fibrillin-2,accession number U20217,Smith-Waterman Score=303.
atgcctgaaagctttgcaatttacatcgaggacgtgaatgagtgtgcagagaaccctggcgtctgcactaacggcgtctgtgtcaacaccgatggatccttccgctgtgagtgtccctttggctacagcctggacttcactggcatcaactgtgtggatgtagatgaatgccgtatgcttgctcacctgtgtgctcatggggagtgcatcaacagccttggctccttccgctgccactgtcaggccgggtacacaccggatgctactgctactacctgcctggaccctatagttgtaaaagaacaagggcgcaaggaacaggactcatcttctgagaaggatggacgcagccccaacaaatcagacaaggaccacatccggtggcccatgagtggcgctcatgatcttcagcaggcggcaccaggccctggcggggcgcaccagggtcatcccaaccaggataaccggaccgtcagccagatgctgagcgagcggtggtacaccctggggcccaatgagatgcagaaatacaacctggccttccagcacatggccagcgaggtcatagcgagtgacgaagagcacacggtcatccatgaggaggaaggggctgactaccagatcctgtgtggaaatcaggccccgggattcctcactgacatccacacggggaagccccttgggtgttggatgtgcaacgtggccaaccgatgccccaagcttcgtacgtggcaaaccgtcgtgcctctctag

SEQ ID NO: 13982 - DNA, 2484 bp, Homo sapiens
  SIMILAR (670)..(2067): 961254mologous to Homo sapiens putative p150,accession number U93563,Smith-Waterman Score=2362.
ctatccgcgccgccgtcctagccgtgccggcgtccttgccgggcccgccgtccttgccgggccgccgtcctcgccgggccgccgtcctcgccgcgccgcgttcttcgccgagccgccgttctcggcgcgccgtagtcctcgccgcgccgccgtcctcgccgttccgccgtcctcgccgcgccgccgtcctcgccgcgccgccgtcctcgccgcgccgcgcgtcctcgccgcgccgccgtcctcgccgcgccgccgtcctcgccgcgccgccgtcctcgccgcgccgccgtcctcgccgcgccgctgccgggtctctcccgggggctgagctcccgcagagctcgcgcctagccgcacacctcgactgctgattagcccgacagctgaatagcggcgggagcagttccacgtggctgggaaggcctcacaatcatggcggaaggcaaggaggagcaagtcacattttacgtggatggcagcagacaaagagcttatgcagaaaaacctccagttgtaaaaaccatccgatcttgcactgttttggtcacagccgtcacaattcttcgtctggaatgtaatatctcctaatagtcctatccattccaattcactttccagattccttctttgctccaagctgcactctggctttgcctttgagtcacgtggcatttctttgtacgatgaccggttctgtcgagtaggcactgcttcagccctggtggcctgttctctctgtccctccagagtgccggctgcccggcaggctcccttcaggctgagttcgtggccctgccccctggtggccagagccggcttcacaggacaagagccagctaagttccaggggctttccaggaaaagtgtcccttggaaagggtatggccttttcacccctccaaacagcaccctagaaatggcttggcctttcccctcccctgagctccacagagaacacagccagcagaggacacacttccccgtcatccagaaatgggtttgattctcagccaagggacagcaggactggtagagagtgtcaggccacacagctgcctgcacagcactcccatgcggaggtcttgcactttggaggggcaatgtcgggacagctttctcttgttgggccacaagactccaagaggacagcacggttgactgattcccagcacttggggagcccaacgtaacagccaccaggcctgacagaaggaacatcgctcgaacaaggatgatgaagctaaatgggatggatggttggagtgatcgccggagccccctctgggtggtcaggaagctcaggaccctctgaagggacccctttattttcttctcctgcctgattgccctggccagaacttccaacactatgttgaataggagtggtgagagagggcatccctgtcttgtgccagttttcaaagggaatgcttccagtttttgctcattcagcataatgttggctgtgggtttgtcataaatagctcttattattttgagatacgtcccatcaatacctaatttatggagggtttttagcatgaagggctgttgaattttgtcaaaggccttttctgcatctattgagataatcatgtggtttttgtctttggttctgtttctatgctggattacatttattgatttgcgtgtgttgaaccagccttgcatcccagggatgaagcccactcgatcatggtggataagctttttgatgtgctgctggatttggtttgccagtattttattgaggatttttgcatcaatgttcatcaaggatattggtctaaaattctctttttttgttgtgtctctgccaggctttggtatcaggatgatgctggccttataaaatgatttcgggaggattccctctttttctattgattggaatagtttcagaaggaatagtaccagctcctccttgtacctctggtagaattcgactgtgaatccttctggtcctggactttttttggttggtaggctgttaactattgcctcaattttagagcctgttattgatctgttgagggattcaacttcttcttggtttagtcttgggagggtgtatgtgtccaggaatttatcgatttcttttagattttctactttatttgcgtagaggtgtttataatattctctgatggtagtttgtatttctgtgggattggtggtgatatcccctttatcattttttattgtgtctatttgattcttctctcttttcttctctattagtatactggtcccatagggctggccagcatctccccctggccaacatggccacctgcatccccaatgccacaggagccccctgctcccatgaggcggtgcatgcctgttgttgatcatgacgtgcatgatggtcttgggcgtgacaccaaccatgaggtcccacacggtcttgttgacaatggccgcgtaggagtccaccaggttctgcgtggtttccatttgccgctccagctgtgggtccat

SEQ ID NO: 13983 - DNA, 1235 bp, Homo sapiens; identical to SEQ ID NO: 4330
  SIMILAR (189)..(1220): 851254mologous to Homo sapiens NAG13,accession number AF194537,Smith-Waterman Score=1510.

SEQ ID NO: 13984 - DNA, 2715 bp, Homo sapiens
  SIMILAR (1)..(2868): 1001254mologous to Homo sapiens excitatory amino acid receptor 1, kainate receptor subunit EAA1=glutamate ionotropic receptor,accession number S67803,Smith-Waterman Score=4986.
atggggaaaaaacagagcagaaaaacaggaaaccctagaaagcagagcacctctcttcctccaaaggaacacagctcctcaccagtaacagaacaaagctggacggagaatgactttgacgagttgagagaagaaggcttcagacgatcaaactactctgagctacaggaggaaattcaaaccaatggcaaagaagttaaaaactttgaaaaaaaattagacgaatggataactagaataaccaatgcagagaagtccttaaaggagctgatggagctgaaagccaaggaaacccatctcacatgcggagacacacataggctcaaaataaagggatgcaggaagatctaccaagcaaatggaaaacaaaaaaaggcaggggttgcaatcctagtctctgataaaacagactttaaaccaacaaagatcaaaagagacaaagaaggccattacataatggtaaagggatcaattcaacaagaagaactaactatcctaaatacatatgcacccaataaaggagcatccagattcataaagcaagtccttagtgacctacaaagagactttgacttccacacaataataattgaagactttaacactccactgtcatcattagacagatcaacaagacagaaagttaacaaggatatccaggaattgaactcagctctgcaccaagcagacctaatagacatatacaaaactctccaccccaaatcaacagaatatacatttttttcagcaccacatcacacctattccaaaactgaccacatagttggaagtaaagcactcctcagcaaatgtaaaagaacagaaattataacaaactgtctctcagaccacagtgcaatcaaactagaactcaggattaagaaacccactcaaaaccgctccactacatggaaactgaacaacctgctcctgagtgactactgggtacctaatgaaatgaaggcagaaataaagatgttctttgaaaccaatgagaacaaagatacaacataccagaatctctgggatccattcaaagcagtgtataaagggaaatttatagcactaaatgcccacaagagaaagcaggaaagatccaaaattgacaccctaacatcacaattaaaagaagtagaaaagcaagagcaaataaattcaaaagctagcagaaggcaagaaataactaagatcaacaaaatagatagactgctagccagactaataaagaagaaaagagagaagaatcaaatagatgcaataaaaaataatacaggggatatcaccactgattccacagaaatacaaactaccatgagagaatactataaacacctctacgcaaataaactagaaaacctagaagaaatggataaattcctggacacatacaacttcccaagtctaaaccaggaagaagtcgaatccttcaatagaccaataacaagttctgaaattgaggcagtaattaatagcctaccaatcaaaaaaagtccaggaacagacagattcacaagtaaattttaccagaggtataaaaaggaggtggtaccattccttctgaaattattccaaacaatagaaaaagagggaatcctccctaattcattttatgaggccagcatcatcctgatgccaaaacctggcagagacaaaaccaaaaaagagaattttagaccaatatccttgatgaacattgatgcaaaaatcctcaataaaatattggcaaaccgaatccagcagcacatcaaaaagcttatccaccatgctcaagtgggcttcatccctgggatgcaaggctggttcaacatacgcaaatcaataaatgtaatccagcatataaacagaaccaaagacaaaaaccacatgattatctcaatagatgcagaaaaggccttcgacaaaattcaacagcccttcatgctaaaaactgtcaataaactagagaataagatacataggaatccaacttacaagggatgtgaagaacctcttcaaggagaactacaaaccagtgctcaacaaaataaaaaaggatacaaacaaatggaaaaacatttcacactcatgggtaggaagaatcaatatcgtgaaaatggacatattgcccaagtgagggtaaagaggggcttctcttcccagcaggcattgagtgaagaaggatcctacacctgcagactatggagagcccagggcagagctgggagaagtcggttagagctggatgaggagtgggctggagagagaccgggtgtgggccaaggagaggcagttctgcccaatacccgaaaaagacatccggcttccgtggcttttttagaagagggttgtaggtgtgggaagccttacggaactgaatccaaggaacaatgcacactccagcccagatattgcccttgtcccacggtctttgcaacctgcagaccaggagattcccttcggtgcctaccccaccagggccctgtgtttcaagcacaaaactgggcggccgtttgggcagacacagaagtagctgcaggagttgttgttgttgtttttttcccataccccagtggtgcctggaacgccagtgagacagagccgttcattcccctggaaaggggtgctgaagccccaggaagccaagtggtctggatcggcgggtcccacccccatggagcccagcaaactaagatccactggctggaaattctcgctgccagcacagcagcagtctga

SEQ ID NO: 13985 - DNA, 1304 bp, Homo sapiens
  SIMILAR (141)..(1115): 831254mologous to Homo sapiens putative p150,accession number U93574,Smith-Waterman Score=1336.
aaatacaaactaccatcagagaatactataaacacctctatgcaaataaactagaaaatttagaagaaatggataaattccttgacacatacaccctcccaagactaaatcaggaagaagtagaatctcttaatagaccaataacaggctctgaaattgaggcaataattaacagcttaccaaccaaaaaaagtccaggaccagatggattcacagccgaattctaccagaggtataaggaggagctgaccaatatccttgatgaacatcgatgcaaaatcctcaataaaatactggcaaatggaatccagcacgacatcaaaaagcttatccacgatgatcaagtgggcttcatccctgggatgcaaggctggttcaacatacgcaaatcaataaacgtaatccagcatgtaaatagaaccagagacaaaaaccacatgattatctcaatagatgcagaaaaggcctttgacaaaattcaacagcccttcatgctaaaaactctcaataaattaggtattgatgggatgtatctcaaaataataagagctatgtatgacaaacccacagccaatatcatactgaatgggcaaagactggaagcattccctttgaaaactggcacaagacagggatgccctctctcaccactcctattcaacatagtgttggaagttctggccagggcaatcgggcaagagaaagaaataaagggtattcaattaggaaaagaggaagtcaaattgtccctgtctgcagatgacatgattgtatatctagaaaaacccatcatctcagcccaaaatctctttaagctgataagcaacttcagcaaactctcaggatacaaaatcaatgtgcaaaaatcacaagcattcttatacaccaataatagacaaacagagagccaaatcatgagtgaactcccattcacaattgctacaaagagagtaaaatacctaggaatccaacttacaagggatgtgaaggacctcttcaaggagaactacaaaccactgctcaatgaaataaaagaggacacaaacaaatggaagaacattccatgctcatggataggaagaatcaatattgtgaaaatggccatactgcccaagtgcaaaactgttgggttattgagtaatatctcaacccacaaaagtgcagtgcatgctttggtagaagcgggaggcattccatctctaatcaacctactggtttgtgatgagcctgaagtacactctcgctgtgctgtcattctatatgatattgctcaatgtgaaaacaaggatgttattgccaaatat

SEQ ID NO: 13986 - DNA, 1158 bp, Homo sapiens
  SIMILAR (145)..(459): 571254mologous to Homo sapiens BC85722_1,accession number AC006486,Smith-Waterman Score=261.
atgttcgtgtggaggaatgtggaaggtcactctgtggccgtgttcccctggtactccatccccttcctgacccctccctgcagccacatgaggcccagcaaactgccagtcactcagtggcctccaaccagagaaaacaacctgccaagttggcagctgttgctcatgagcgtccaccaggcccagtccctcagtgccctgcgcaaggaacaggactcatcttctgagaaggatggacgcagccccaacaaatgggacaaggaccacatctggtggcccatgagtggcagtcataatcttcagcaagcagcaccaggccctggcagggcgcaccagggtcaccccaaccaggataaccggaccatcagccagatgctgagcgagcaatggtacaccctggggcccaatgagatgcagaaatacgacctggccttccagaacgtagaggcccggatccgctacgtcatcgtccgcggaaacgagcaaggtttctttcgcatgcatcacctccgtggcgtcagctccctgcagctggggcggaggcgtccggggcctggaacctaccggctggaggtggttgacatgattacaatcgatgctcggtaccggtgttcaggactgaggtctccaccagaccccgaccatctgaaatctgtggacttacacaggaatgaacacttctttctgcaaaaagccaggtgggaaatacatttggttttgcaggccacaccatctcagatacaactactccatgtggcctttgtactagcaaagcagccattgaggtgccggaagcagacactcttcctcatatctgtagttggcacaaaggagaagaatgtggcctccgagggccggaacccagttcgccccctccgcggccatcgctggctgcccgcgtctccgccggccgcggagcacttcgcaggcggcgccgaccggaagtcccgcctctcccgcgcgccccggagcgccgcgacagctacgccggccaatgagcagcgcgccgtggcggacgtcggccaatgggctcgcgcgcggggggggcgtgtccgggccgcgggccggagcggcctactccgagtgaagatgatgaagatgaagaccgttatgatccacttccacttaatgaaagatgaatatattttctcttcctaa

SEQ ID NO: 13987 - DNA, 1584 bp, Homo sapiens
  SIMILAR (3357)..(391): 201254mologous to Homo sapiens dentin sialophosphoprotein precursor,accession number AF163151,Smith-Waterman Score=256.
tcagatgaggtaagatggaagctggtttcctcttgtgtcaacttgggcaatggggatagtcagtctagtgaacatgttgtaactgactcctagtttactgagagtttttagcatgaagggcagttgaattttgtcgaaggccttttctgcatctattgagataatcatgtggtttttgtctttggttctgtttatatgatggattatgtttattgatttgggtatgttgaaccagccttgcatcccagggatgaggcccacttgatcgtggtggataacctttttgatgtgctgctggatttggtttgccagtattttactgaagttttttgcatcaatgttcatcaggaatattggtctaaaattctctttttttgttgttgtatctctgccaggctttcgtatcaggatgatgctggcctcataaaatgagtcagggaggattacctctttttctattgattggaatagtttcagaaggaatggtaccagctcctctttgtacctctggtggaatttggctgtgaatctgtctggtcctggactttttttggttagtaggcttttaattattgcctcaatttcagagtgtgttattggtgtattcagggattcaacttcttccaggtttagtcttgggagagtgtatgtgtacaggaatgtatccatttcttctagattttctagtttatctgcatagtggtgtttatagtattctctgatgggagtttgtatcttttcttgccttctgctagcttttgaatgtgtttgctcttgcttctctagttcttttaattgtgatgttagggtgcccattttagatcttccctgctttctcttgtgggcatttagtgctataaatttccctctacacactgctttaaatgtgtcccagagattctggtatgttgtgtctttgttctcattggcttcaaagaacatctttatttctgccttcatttcgttatgtacccagtagtcattcaggaacaggttgttcagtttccatgtagttgagcggttttgagtgagtttcttaaacctgagttgtcgtttgattgcactgtggtctgagagacagtttgttataatttctgttcttttacatttgctgaggagtgctttacttccacctatgtggtcaattttggaataagtgagatgtggtgaaacggggttttggtgtggatgtcctttctgtttgttagttttccttctaacagtcaggaccctgagctgcaggtctgttggagtttgctggacgtccactgcagacactgtttgcctgggtatcaccagtggaggtgctccattaatccaagaagcataatcactacaaaggaaagcagcaagatttgcgagttcttctacagtccccaggcgaccacagggaattctgccaatcatttctttctcaaatgttccagttgggtccagacggctaaaggcacctttggtttttataggccctggttgaatcacattgaatcgcattccatatttaccccattcagctgcaagagaccccttcacttggaacacattctctttcctgctgccctgtgaagaggtgccttccaccat

SEQ ID NO: 13988 - DNA, 1443 bp, Homo sapiens
  SIMILAR (388)..(1296): 921254mologous to Homo sapiens putative p150,accession number U93572,Smith-Waterman Score=1426.
atggggagaaaccagagcagaaaagctgaaaattctaaaaaccagcacacgtcttctcctccaaaggaacgcaggtccttgccagcaatggaacaaagctggacagagaatgactttgacgagttgagagaagaaggcttcagtagccaatttgatcaagtggaagaaagggtatcagtgattgaagatcaaatgagtgaaatgaagcgaaaagagaactttagagaaaaaagagtaaaaagaaatgaacaaagcctccaagaattatggcactatgtgaaaagaccaaatctacgtcggattggtgtgcctgaaagtgacggggagaatggaaccaagttggaaaacactcttcaggatattatccaggagaacctccccaacctacctggcagagacacaacaaaaaaagagaattttagaccaatatccctgatgaacattgatgcaaaaatcctcaataaaatactggcaaaccaaatccagcagcacatcaaaacgtttatccaccgcgatcaagttggcttcatccctgggatgcaaggctggttcaacatacacaaatcagtaaacgtaatccatcatataaacagaaccaaagacaaaaaccacatgattatctcaatagatgcagaaaaggccttcgacaaaattcaacaacacttcatgctaaaaactctcaataaactaggtattgatggaatgtatctcaaaatagtaagagctatttatgacaaacttacagccaatatcatactgaatgggcaaaaactggacgcattccctttgaaaactggcacaagacagggatgccctctctcaccactcctattcaacacagtgttggaagttctggccagggcaatcaggcaggagaaagaaataaagggtattcaattaggaaaagaggaagtcaaattgtccctctttgcagatgacatgactgtatatttagaaaatcccatcgtctcagcccaaaatctccttaagctgataagcaacttcagcaaagtctcaggataccaaatcaatgtgcaaaaatcacaagcattcctaaacaccaatagcagacaaacaaagagccaaatcatgagtgaactcccattcacagttgctacaaagagaataaaatacctaggaatccaacttacaagggatgtgaaggacctcttcaaggagaactacaaaccactgctcaaggaaataaaagaggatacaaacaaatggaagaacattccatgctcatgggtaggaagaatcaatatcatgaaaatggccatactgctcaaggggatacgttgtaagatccccagtggatgcctgaaaccaaggatagtactgaaactgactgccgtcaatcagaacacatttctgtttatgtctcccatccacaaattcaatgccttttccatcttaacaaagcacttactatgggctgtggct

SEQ ID NO: 13989 - DNA, 459 bp, Homo sapiens
  SIMILAR (3633)..(3725): 581254mologous to Homo sapiens Human secreted protein, SEQ ID NO: 8144,accession number G04063,Smith-Waterman Score=132.
atgcttctctcaatagatgcagaaaaggccttcgacaaaattcagcagcccttcatgctaaaaactctcaataaactaggccatggctatgagcagcaccatctccacaccaccaatgacgtggatgaagaagatttgagcgatgcagcctccaaaggagatgactttgcgctttctgaacagtctcaagatgcacactttttacaaccagaagcctatggactgggtgagggagcagaaacagccacaggtactgcccatcagggtaatatgaaccagatccagtacggcatcactgcagacatacacacagagctgcataaaacaggaagagagctgctaatcacagccccagagggtagtggccaaagtgatgccttggagatccgagaatgccagactgagatcacacggcctggggaattaccgcctatggtcattttggttttcccgggatag

SEQ ID NO: 13990 - DNA, 3045 bp, Homo sapiens; identical to SEQ ID NO: 6847
  SIMILAR (290)..(700): 411254mologous to Leishmania major probable proteophosphoglycan,accession number AL390114,Smith-Waterman Score= 157.

SEQ ID NO: 13991 - DNA, 1794 bp, Homo sapiens
  SIMILAR (646)..(1434): 861254mologous to Homo sapiens cytokeratin 18,accession number X12881,Smith-Waterman Score=1084.
atgcaatgcttcctatggaacttggatgtggcccgcttccagagccactaccagtgggatgctcacgcttctcattgtttaagtgacagacatgtatatcaactgttcctgatatatggtaactgctcaatcaatgtcatcaacacctccaccaccatcaccatcaacactaccatcatcaccatcaccaccaccaccattaccacaaccactaccaccaccaccaccatcaccaccaacactgtcatcactatcatcaccatcaccaccacgaccaccattagtatcaccatcaacactaccatcaccacaaccatcatcgccacaaccactactgccaccatcatcatcaccaccatcactaccatcaccaccaccaccatcaccaccattaccatcaccatcaccatcagcaataccatcactaccaccaccatcaccacaaccactgccaccaccaccaccatcatcaccaccaccatcactaccatcaccactattaccaccaccaccactatcatcatcaccatcatcacctctatcaccatcaccaccaccaccatcaccaccaccatcactaccaccatcacccccaccatcaccaccaccaccaccacctccacaaccaccatcaccaccatcatcaccactatcatcaccaccattatcatcatcacaaccatcactattaccaccatcactgtcatcattaccactaccatcatcaccatcaccactactaccactatcattaccactatcaatatcaccaccatgactatctttactatcaccactaccaccatcaccatcactaccaccatcatcattccaatcgacttaaaccataggacaatgcttttctttgggatgtggcatgtggctccttgtacctacctagcacttgcaggaaacaccttaatggcatggcccctgatgtctgcgtccagcaaggcctctggtggtgtcagcatgtttgtgtggaggaatgtggaaccttgctctgtggctgtgttctcctggtactctgtccccttcctgacccctccctgcagccgcgtgaggcccagcaacctgccagtcactcagtggcctccaaccagagcaaagaacctgccaagtcggcagctgttgctcacgagtgtccaccaggcccagtccctcagtgccctgtgcaaggaacaggactcatcttctgagaaggatggacgcagccccaacaaatgggacaaggaccacatctggtggcccatgagtggcggtcacgatcttcagcaagcggcaccaggccctggcagggcgcaccagggtcacccctaccaggataactggaccatcagccagatcctgagcgagcggtggtacaccctggggcccaatgagatgcagaagtaccacgacctggccttccagcacatggccggtgaggacatagcgagtgacgaggagcacatggtcatccatgaggaggagggggtgatggtgtcattgctgatgacggctttagcaccactgacactgatctcaagttcaaggatttttggcaaagtctatggtcccaccccgtcctcctcctacacatactcggatgcttcctcctcaaccttggcacccacctccttcttactgggcccaggagccttcaaagcccaggagtctggtgaagaagccgaggacgggctcagggaactggagaccgagaaggcgctgtcctcttcactgcacgcgccctggaccagtgctggccctgatcatgcagctcttccaggcccactgcttcttcctgtccactag

SEQ ID NO: 13992 - DNA, 2499 bp, Homo sapiens
  SIMILAR (1187)..(1417): 441254mologous to Homo sapiens testis-specific methyl-CpG binding protein 2,accession number AF120994,Smith-Waterman Score= 104.
atgcttctctcaatagatgcagaaaaggccttcgacaaaattcagcagcccttcatgctaaaaaccctcaataaactaggccatggctatgagcagcaccatctccacaccaccaatgacgtggatgaagaagatttgagcgatgcagcctccaaaggagatgactttgcgctttctgaacagtctcaagatgcacactttttacaaccagaagcctatggactgggtgagggagcagaaacagccacaggtactgcccatcagggtaatcatgttcgtgtggaggaatgtggaaggtcactctgcggctgtgttcccctggtactccatccccttcctgacccctccctgcagccacacgaggcccagcaacctgccagtcactcagtggcctgcaaccagagaaaacaacctgccaagttgccagctgttgctcatgagcgtccaccaggtgggacagggagtgttgaccctgggcggccccctggagccacctgccctgaaagcccagggcccgcaaccccacacactttgggggtggtggaacctggtaaaagctcacctcccaccatggaggaggagccctgggcccctcaggggagtccctgctggacagcccagtccctcagtgccctgcgcaaggaacaggactcatcttctgagaaggatggacgcagccccaacaaatgggacaaggaccacatctggtggcccatgagtggcgctcatgatcttcagcaagcggcaccaggccctggcggggcgcaccagggtcaccccaaccaggataaccggaccgtcagccagatgctgagcgagcggtggtacaccctggggcccagtgagatgcagaaataccacgacctggccttccaggtgaaggtggcccacttgcaacaaggaccgaaagaagtccagctcagaggccaagcccacaagccaggggctagcaggagtgtaacaagggctcgtgggagcggagaatatcagagacgggcactgccactgcccctggggtgtcctctgaactccagtcagttgcagcccaaacacttcagagctcggataccaaggagcagcctctgtggggcagaatggctgcacacacacatggccagtgaggacacagcgagtgacgaggagcacacggtcatccatgaggaggagggggtgatgatgtcattgctgatgatggctttagcaccaccgacaccgatctcaagttcaaggagtggcttttggcagtctatggtcacaccctgtcctcctcctacacatactcggatgcttcctcctcaaccttggcgcccacctccttcttactgggcccaggagccttcaaagcccaggagtctggtcaacgcagcagagcgggccccctacggccccaacccctggggatgggggcccagggacgccttccaaggtggcctgtttcctcccaatggatcctgccaccttctggtggagaagccgaggacaggctcagggaaccggagaccgagaaggagctgtcctcttcactgcacgtgccctggaccagtgccggccctgatcatgcagctcttccaggcccactgcttcttcctgtccactaggccacagccgccctccaggcccactatgcacacatcttcccctccaagccctgtgggggtcctgaccgcacctcacctggctcagactcttgacgctgccctggctgccccaccactgcctctgcccgagagtcacccctgcctgaccccacctcaacctgctcaggctctggcacaaacctggctgccctgccactgcctctgccccagagttggggccttgacagcctggttggaaggggacaccccagccctgcctcaacacctgggggtctccataactaccacaggcagggctgcaaacagaaaggattttgttcaccgtcgatgctgccctgagttgtcccaaagcgaggccgtgcccccaagcacacactttctgagtgccgagtgtctccagcaggagaggggctctagttcccgggatcccaccctccacagaggacagcagcaccttgagggacagatgtgcaaagggcaagtcagcggttttgcagcaatagcattgcatgtgggttttaggctgatgatgctcaacagtggacaatcctcttcacctgcctgggccccactgcctgcccttccatacagtgcagggtcacagctgagctctctgagacacctcgcaggatctcggcttctgaactatcaagtgtcttccagggctacagtgaattacacactctggcatgggtttgcacgccacgtgctggaagccagcagtcatgcaggccatgctctcccacacttaggaaaacagcgcatgagaaagatctccatcaagttcacacagaatgacctccagcaagacctggaaaatgctcagttccacaaaatacctgtgtccaaatcctttcagtgcacagctctggcatcaggttcctgtgaggacagaccctga

SEQ ID NO: 13993 - DNA, 5099 bp, Homo sapiens
  SIMILAR (341)..(96): 371254mologous to Acanthamoeba castellanii myosin I heavy chain kinase,accession number U67056,Smith-Waterman Score=110.
tcaccacactgacttccacaatggttgaactagtttacagtcccaccaacagtgtaaaagtgttcctatttctccacatcctgtccagcacctgttgtttcctgactttttaatgattgccattctaactggtgtgaggtggtatctcattgtggttttgatttgcatttctctgatggccagtgatggtgagcatcttttcatgtgttttttggctgcataaatgtcttcttttgagaagtgtctgttcacatccttcgcccacttgttgatggggttgtttgtttttttcttgtaaatttgtttgagttcattgtagattcttgatattagccctttgtcagatgagtaggttgtgaaaatgttctcccattctgtaggttgcctgttcactctgatggtagtttcttttgctgtgcagaagctctttagtttaattagatcccatttgtcaattttggcttttgttgccaattgcttttggtgttttagacatgaagtccttgcccatgcctatgtcctgaatgttattgcctaggttttcttctagagtttttacggttttaggtctaacatttaagtccttaatccatcttgaattactttttgtataaggtgtaaggaagggatccagtttcagctttctacatatggctagccagttttcccagcaccatttattaaatagggaatccttttccccattgcttgtttttgtcaggtttgtcaaagatcagatggttgtagacgtgtgatattatttccgggggctctattctgttccattggtctatatctctgttttggtaccagtaccattttgttttggttactgtaggcttgtagtatagtttgaagtcaggtagcatgatgtctccagctttgttctttttgtttaggattgtcttggctatgtgggctcttttttggttccatctgaactttaatgtagtttttttccaattctgtgaagaaagtcattggtagcttgatggggatggcattgaatctataaattaccttgggcagtatggccattttcacaatattgattcttcctatccatgagcatggaatgttcttccatttgtttgtgtcctcttttatttcgttgagcagtggtttgtagttctccttgaagaggtccttcacatcccctgtaagctggattcctaggtattttattctctttgaagcaattgtgaatgggagttcactcatgatttggctctctgttttttttattattggtgtataagaatgcttgtgatgttttgcacattgatttttgtatcctgagactttgctgaagttgcttatcagcttaaggagattttggggctgagacgatggggttttctagatatacaatcatgtcatctgcaaacagggacaatttgacttgctcttttcctaattgaataccctttatttctttctcttgcctgattgccctggccagaacttccaatactgtgttgaataggagtggtgagagagggcatccttgtcttgtgccagttttcaaagggaatgcttccaggttttgcccattcagtatgatattggctgtgggtttgtcataaatagctcttattattttgagatatgttccatcagtacctagtttattgagaatttttagcatgaagggctgttgaattttgtcgaaggccttttctgcatctattgagataatcatgtggtttttgtcactggttctgtttatgtgatggattacatttattgatttgcatatgttgaaccagccttgcatcccagggatgaagccaacttggtcatggtgaataagctttttgatgtgctgctggattctgtttaccaataatttttttgaggatttttgcatcaatgttcatcaaggatattggtctaaaattctcttttttggttttgtctgtgcccggctttggtatcaggatgatgctggcctcataaaatgagttagggaggattccctctttttctattgattggaatagtttcagaagagatggtaccagctcctccttgtacctcaggtagaactcggctttgaatccatctggtcctggactttttttggttggtaagctattaattattgcctcaatttcagagcctgttattggtctattcagagattcaacttcatcctggtttagtcttgggagggtgtatgtgtccaggaatttatacatttcttttaggttttctagtttatttgcatagaggtgtttatagtattctctgatggtagtttgtatttctgtgggatttatttcttgacttctgctagcttttgaatgtgtttgctcttgcttctctagttcttttaattgtgatgttagggtgtcaattttggatctttcctgctttctcttgtgggcatttagtgctataaatttccgtctgcacactgctttgaatgtgtcccagagattctggtatgttgtgtctttgttcttgttggtttcaaagaacatctttatttctgcttccatttcgttatgtacccagtagtcattcaggagcaggttgttcagtttccatgtagttgagtggttttgagtgagtttcttaatcctgagttctagtttgattgcactgtggtctgagagacagtttgttataatttctgttcttttacatttgctgaggagtgctttacttccaactatgtggtcaactttggagtatgtgtggtgctcacaacagtccccagtgtgtgatgttccccttcctgtgtccatgtgttctcgttcaattcccaccgaactgctgttgtccttagtatcttctagacgttccagaactgatgtcagatttggctcatcagagtccacagaccttatcggtgaagaagatgaataggattcctgctgcatccagggtacaatgcgcctttccagaacacagcagcgacccgggatagagggatcgctcaaacagcaccagaggctgcattccaacttttcctccatcaacgagtccgttttcattgttagtttctccttaaacacgattggctctggcaggtggggcgcgaaggtgagcccgtcgggagccgctgtgacggccgcaaccacccgcgggacctctcggcggtgctctcccagctccgcctctccctgctgcctcaactcttcatctcctcctggtcctgggccagcctgacgatgtcctcctctcccagtgctgcgtctttggcactgccccctggctgatgtactttcctgcagcttctccatggcctcctgcagggcccagtgggtgtccccacacacagattcacccccagtctctggggctggggccgctgcctctggctttttctgggatgaggccactgggtgagccaggggctggcagcacacgctttgctcctcctgggcactggctccagcggagttgaaaaatgccaccatggcctcccggctctccaggtcccctggaatgttcagcatgggccgaggtgcctcctcctcattgtccagatgtcctcctccatatccttccccagggagagccatgaggctcaactgggctttagctgctgtttctgctggctggtagcttccaggttctcctgctactaagcgaccacgaactgctgcaggtgacacaggtactggtcttgctgctgctgtggactctgagcctcttggctcttcagctccacgtgcaggaagacgctccccttcccagaggctggtgactgcctcccaaccattattagatgggtcagaggttaccgtctctttcagctcaccaagcttcagctcctttacttgccgctccaactgcagtgcactcttgttctcattattcagtgaattgatgttttcactgagttgactgattattgcggagcttgagtgcagggccactgctagttctcggtactggctgtgaggtgcatgcagagaggaggagttggaggaagattgtggggaggggtagagagaacaatcattagggctggtggagggtgtgggttgtctcagctccagatcctccagggtagcagatgatgcatggccttccccgtagatacctgttgctgaatccccaggtgagtggtaaccaccagaagtggctgtgtcagggctactgccattgattttctttttcctgttagctcctgctggaatgccagggctcttcctctgccaatattcttttaaagcatgtaacacaattgcacttttatattttaacaaattattttcccatattgaactgtaagtctcctgaaaggaggaattttgttcttgctcatcatcaactttttcaacatccagtgcaccatttagaagatgtttgtctttctttgtatcagtgctcagctgagtctgcagtgcttcagaggcagctttcattttataaaaatctatgatttctccttccagttgttttttctcttcctcgagcttccttatctcctcctgctgaatcattttaagatgctcgaacttgtcctgcagcagggtcaccccaaccaggataactggaccgtcagccagatgctgagcaagtggtggtacaccctggggcccaatgagaggcagaaataccatgaactggccttccaggtgaaggtggcccacttgcaataaggactgaaagaagttcagctcagaggccaagcccacaagccaggggctagcaggagtgtaacaaaggctcgtgggagtggagcatgtcagagactggcactgccactgcccctggggtgtcctctgaactcctgtcagttgcagcccaaacactccagagctcggataccaaggagcagcttctgtggggcagaatggggtcatccatgaggaatagggtgtgatgatgtcattgctgatgatggctttagcaccactgacaccgatctcaagttcaaggagtgggtgaccgactgagagtggggacaactctggggaggagccagagggcaacaagggctttggtgggaaggtatttgcacctgtcattccttcctcctttactcctgccgccccttgctggatcctgagccccagggtcccccgatccacctgcagcttttggcaaagtctatggtcccaccttgtcctcctcctacc

SEQ ID NO: 13994 - DNA, 637 bp, Homo sapiens
  SIMILAR (73)..(585): 611254mologous to Homo sapiens secretogranin III,accession number AF078851,Smith-Waterman Score=424.
atgtccagagttggttcctgccggtgggtctgtggtcttgctgacttcaagaatggagccacagacctttgcgacaaatctctacataatagagaattaagtgcagaaagacctttgaatgaacagattgctgaagcagaagaagacaagattaaaaaaacatatcctccagaaaacaagccaggtcagagcaactattcttttgttgataacttgaacctgctaaaggcaataacagaaaaggaaaaaattgagaaagaaagacaatctataagaagctccccacttgataataagttgaatgtgggaaggatgttgatttcaaccaagaattcggaaaactgatcgatggttatggactctactaaggagtgggattgggtccataaatttcaagatattccaaatgtcttggttggcactgcatttaatgttgatgatggaaatgggggctttgtagttcattggttaaacaacaaggaatttcattttacatcatctacagaagtatttatgcatcaattacgaaaactttctgataagcaggtagatcatgaaaatgatgatgcagatagagaagatgaggaacattcacaggaggatagagaacggggtttacatatgaaattagaccatg

SEQ ID NO: 13995 - DNA, 553 bp, Homo sapiens
  SIMILAR (64)..(153): 861254mologous to Homo sapiens Human secreted protein, SEQ ID NO: 6408,accession number G02327,Smith-Waterman Score=139.
cttcggtcgaacggaccaccgccagcgtgcgggcgccgctgggcgccgtcgtcatcgagctccatgtggagcaccgggtgcgcgctttcgacacgctgcagggcatcgcgctcaagtacggtgtcacgatggaacagattaaaagggccaataaactgtttaccaatgattgtatatttctgaagaaaactttgaacatcccagttatatcagagaagcctttgttgtttaatggacttaactccattgattctccagaaaatgaaactgctgataacagtttttctcaggaagaggagccagtggtggccggggaagacctccctcctcccagtcctcaagaatctgatgttcagcctgtgcagcctgaggaagtgtcagccagagatttcctgcagagacttgacttgcagattaagttatcaacacaggcagccaagaagctaaaagaagagagcagagatgaagaaagtccctatgcaacttccctctatcacagttaggtgatttgggggcataactctaaccaaaattaagatatgtttggaccatt

SEQ ID NO: 13996 - DNA, 495 bp, Homo sapiens
  SIMILAR (592)..(1077): 981254mologous to Escherichia coli No definition line found,accession number U00039,Smith-Waterman Score=784.
  misc_feature (1)...(495): n = a,t,c or g
ccanatttnccctatatanttgtttccaaacttgtaaaaaataaccataatatgtaaattgtgtattagtgagaggtgaagcccagctggacttcccctgggtcgagtgggcccttggaagaacttttctgtccttaacaagaggattgtaaaatgcaccccatcagtgcctctgtaaaacacacccaatcagcgctctgtagctagcaataggtttgtaaaatgcacccatcagcactctgtaaaatgcacccaatcagcactctgtaaaatgcaccaatcagcaggatttctaaaagtagacaatcacagggaggattgaaaaaaagggcactctgatagggcaaaaacggaacatgggaggggacaaataagggaataaaatctggccaccccagccagcagcggcaacctgttcaggttcgcctgccgctgtggaagctttgtccttttgctcttcataataaaccttgctactgttcaaaaaaaaaaaaa

SEQ ID NO: 13997 - DNA, 1655 bp, Homo sapiens
  SIMILAR (412)..(804): 971254mologous to Mus musculus SMAR1,accession number AF235503,Smith-Waterman Score=648.
atgccagtcgggcaaggagcctatgaaagagacttccagtcagagcttgtttgtgcaaaggctcccaagaggtccatgaaggatgactctggtgcacctactgctctgtcacctctgcacaacccagagaaaggtgccttccagcagccagaggccaagcttctgatgcttactctctcctccttagaaatccagatgatcttgaccaacacttctaagagtttgaagcagctcactcagggccagcctgaccaccacactaatgaagggggaggttacaatgaaaaggacatgtacttgaataacttcctccttgaaaaggagggtgcagaaatcaaaggcctgattgtgctgaatccttctctttggtcattattcagactggttcccagcatgccgcagtccagaggaaaaggagggagcgagagtaaagctacgccctggcgcgcagtctccgcgtcacaggaacttcagcacccacagggcggacagcgctcccctctacctggagacttgactcccgcgcgccccaaccctgcttatcccttgaccgtggagtgttatgagatcctgcaggcgcacagtccgggcctgtctgcagcccaatacccaccctcctggctcttcctgtatttactcctgctttgcattcataacaaaagctacagctccagggagcccagcgccgggctgtgacccaagccgagcgtgggaagaatggggttcctcgggaccggcacttgggattctggtgttagtgctcccgattcaagctttccccaaacctgggaggaagccaaggacaaatctcttacattaataggaggatttaagtgcagaaagaccttttgaattgaacagattgcttgaagcagaaggaaggacaaggtttaaaaaaacatatcctccaggaaaacaagccagggtcagagcaactattcttttgtttgataacttgaacctgctaaagggcaataacagaaaaggaaaaaattgagaaagaaagacaatctataagaagctccccacttgataataagttgaatgtggaagatgttgattcaaccaagaatcgaaaactgatcgatgattatgactctactaagagtggattggatcataaatttcaagaaaatgaaactgctgataacagtttttctcaggaagaggagccagtggtggccggggaagacctccctcctcccagtcctcaagaatctgatgttcagcctgtgcagcctgaggaagtgtcagccagagatttcctgcagagacttgacttgcagattaagttatcaacacaggcagccaagaagctaaaagaagagagcagctctctggagaggatgagagaagaaaccagcctttcccccacagtccccaccaaaaggtgggataccagaatcctgctgattggtgcattttacagagtgctgattggtgcgttttacagagtgctgatgggtgcattttacaaacctattgctagctacagagcgctgattggtgtgttttacagagcactgatgggtgcattttacaatcctcttgtaagacagaaaagttctccaaggccccactcgacccaggaagtccagctggcttcacctctcactaatacacaaattacatattatgttatttttacagtttga

SEQ ID NO: 13998 - DNA, 1117 bp, Homo sapiens
  SIMILAR (688)..(876): 661254mologous to Rattus norvegicus farnesoid X activated receptor,accession number U18374,Smith-Waterman Score=198.
  misc_feature (1)...(1117): n = a,t,c or g
ttttaaaacataaataggtttgcttctttaattccatatgtgcatttacactcttctttattagtggataaatattagaaaatcatctctcagacagagtggctgagggcgggcccctccaggggctccggcttggtgtgcagggtgaggctgtccctccagggctcgtacaccagcgtggaggtctcggccctcttgatggtgaacttataggatcggttgggcagcaggtttcggacgtcgaaggtgcaggcagccaccggggataacgccacactgggcgcactcctgctgtgtccgcgggtccagcagcctgaagcgcaactcatactgctccgatgtggctggctggatggtgacgaaccagcgcagccgggcccagtcctggtgagccngccgacgcctttcggtcaaacacgacaggcatcttggtgctcagcatgagccagatgtgcgggatcttggtggcactgacatcagacaccaggcggtgcttgacgtgtagccgccccggcaccatcatggtcaagaagctgtccatgacggccgacacgttcgccagccgccgctccaccagcgcccagtcggccaggaagggccgtgggtctggcgaccggagcagggcatccagctcagcacggccatggtcgagctgttccaacaggtccccgagcagcaggagctggatcttggtctgagctgtgcccaccttcttcatgcgctggaacttccaggggtcgatgagctggaacaaggcgctaggcagcaccagcgggttctggtcgcccagggccaggtgcttgggcaggacctcgatgtagtaggagcacttacgcagcagctgcatgcgggcgtggtggcgcttgagcaggtgcggactcaggtccgaggtcaggaactcacgcagggcattgcggcgctcggtgtaggtcttccacgcctctggttccagcagctgctggtcatctgcctcctcctggtccaggaaggactggggattgcccagcttcatcttgtccaggcccaggcctgccacatgggtgctcattatccgggagctggggggagggctgggtgtcagctgccaggcaggctggcctcccctgggctgtggcat

SEQ ID NO: 13999 - DNA, 316 bp, Homo sapiens
  SIMILAR (89)..(268): 981254mologous to Homo sapiens unnamed protein product,accession number AK025383,Smith-Waterman Score=307.
ccacccttcaaagcctctactagcctcctgtggcttggacagagtcttgaggatacacaggatccagaatccacggggtctggagcataaggatgagccccaagagcctcaagaacccaacaaggtgcccctagaagacacagagacagatgaactttgggcatccttggaggcagctgccaagcggaagctctcgggtttggagcagccccaaggagctctccaaacgagacggagaaagaagaagcggcctgggtccaccagcccctgacgcccctgtgcccactttgtaaataaactgctgaacacccaaaaa

SEQ ID NO: 14000 - DNA, 594 bp, Homo sapiens
  SIMILAR (256)..(486): 1001254mologous to Homo sapiens 4F2 heavy chain antigen,accession number M21904,Smith-Waterman Score=393.
atgatgaaagagggctgtgaagcaggctgcataggtttggtggtggtaattctgacagtgattgtgggaaacactcatgggcagctggcagaaattgaccttcggcaagggcgtctactgggctgtctgaaggggctggcaggcagtgtgcgtgggttgcagtgccacccttcaaagcctctactagcctcctgtggcttggacagagtcttgaggatacacaggatccagaatccacggggtctggagcataagttgtctcaggcaaggctcctgacttccttcttgccggctcaacttctccgactctaccagctgatgctcttcaccctgccagggacccctgttttcagctacggggatgagattggcctggatgcagctgcccttcctggacagcctatggaggctccagtcatgctgtgggatgagtccagcttccctgacatcccaggggctgtaagtgccaacatgactgtgaagggtgcagagagtttggcagcctacgtggttggagggcatggtccccacaagtctgttttcacttcaataccagctgcaagttcaggggtccccatgaccaccttcaggtag

SEQ ID NO: 14001 - DNA, 477 bp, Homo sapiens
ttctgagtccctagtccttgtggtggaattcggcaccctcatcacatgtgtggattctgggattctcagagtctggcatgacaaggacaaggacacatcctctgacccagtgaggctcccctgccctgatggttgggggaggtgggctgggctcctggaactgagagtgggccctggggtgtgtaggatgcgccaagacccagcacacccccatgtggttgccacaggtgggaaagagaatgctttgaagatatgggacctgcagggctctgaggaacctgtgttcagggccaagaacgtgcggaatgactggctggacttgcgggttcccatctgggaccaggacatacagtttctcccaggatcacagaagcttgtcacctgcacagggtaccaccaggtccgtgtttatgatccagcatccccccagcgccggccagtcctagagaccacctatggagagtacccactaacagg

SEQ ID NO: 14002 - DNA, 452 bp, Homo sapiens
  SIMILAR (1427)..(474): 731254mologous to Homo sapiens epithelial glycoprotein (EGP) precursor,accession number M32306,Smith-Waterman Score=1082.
gaagcacttcagcaccgaggatggcatattccagggtcagagacactgccggggcggggagggcatgttccgtggcctcgcccaggccgacgggtaagaccaatcccctcgctaaactcagggccgaagggagagcgttgatgctccctgaggatactggaatgatggcgacaggcaaactcttagtgacacggctttgaatgggtgacagggacctgggtttctgccttatgtagttcataccgtgctgtggcggcgactatccacgttcggtcgtcggggctcctcgcggccaagcaagaggcaaccagaccagattcggaagcaggagagtccgatccgagaaggcaaccaggaggagccggagaagaaatgacccaagacctgctctcagtccgccccaacctccagagaataaaatttctaacgtatacctgcagaattccgagaga

SEQ ID NO: 14003 - DNA, 1246 bp, Homo sapiens
  SIMILAR (623)..(9): 271254mologous to Rattus norvegicus glycoprotein,accession number L08134,Smith-Waterman Score=168.
tctgcctccaggctttgtcatggcggctgctgctgcacgctggaaccatgtgtgggtcggcaccgagactgggatcttgaaaggggtaaatcttcagcgaaaacaggcggcgaacttcacggccggaggacagccgcggcgcgaggaggcagtgagcgccctgtgttggggcaccggcggcgagacccagatgctggtgggctgcgcggacaggacggtgaagcacttcagcaccgaggatggcatattccaggggtcagagacactgcccgggcggggagggcatgttccgtggcctcgcccagaccgacggcaccctcatcacatgtgtggattctgggattctcagagtctggcatgacaaggacaaggacacatccttttgaccaactcctggaactgagagtgggccctgggggtgtgtaggatgcgccaagacccaagcacacccccatgtggtttgccacaggttgggaaagagaatgcttttgaagatatgggacctgcagggttctgaggaacctgtgtttcaaggccaagaacgtgcggaatgactggctggacttgcgggttcccatctgggaccaggacatacagtttctcccaggatcacagaagcttgtcacctgcacagggtaccaccaggtccgtgtttatgatccaggcatccccccagcgccggccagtcctagagaccacctatgaagagtacccactaacagccatgaccctcactccgggaggcaactcagtgattgtgggaaacactcatgggcagctggcagaaattgaccttcggcaagggcgtctactgggctgtctgaaggggctggcaggcagtgtgcgtggggttgcagtgccacccttcaaagcctctaacttagcctcctgtgcgcttggacagagtcttgaggatacacaggatccagaatccacggggtctggagcataaggtttatctcaaagtctcaattgaactgccctcctcttgtcaggcagggacaacttgggaggatgagccccagagccctcaaagacccaaacaaggtgcccctaagaagacacagaagacagatgaactttgggcgatccttggaggcagctgccaagcgggaagctcttcggggtttggagcagccccaaggagctctccaaacgagacggagaaagaagaagcggcctgggtccaccagcccctgacgcccctgtgcccactttgtaaataaacttgctgaactacccaaaa

SEQ ID NO: 14004 - DNA, 661 bp, Homo sapiens
  SIMILAR (101)..(514): 401254mologous to Homo sapiens cell adhesion protein (SQM1),accession number M33374,Smith-Waterman Score=160.
gctgcggagaagacgacagaaggggggggtcagtggttccgggtaggagctaggtgaccctcgcgctgctgcagggatctgcagcgactgcagccatgggggccccacctgggtccggcgctacctggggcgatgccttcggtggagccccgacccccctgcagattcccaacctttcccgccagactacgggcttcccccgaaacgcaaaggatcgcgagatggtggcccacacagcaggagatgatggcacgcgcagctgaagggctccaagctgcgggacttactgcgccccacccaccctcatccggcttgctcaagtgcaagcgtgacaagcttcccccaacttccctggcctgcaagcaggaagcggcacgacttggggacttacttgcggagcaccggaacttatgttgattgcgcattgaaggagttttgagcgggagcgaagggttgcttccagcggaaagaagcgggcgggagaagaaggcggcagatgtttgccaaaggccaggcgacccggggaagtggaccccaaggtgggcccgtgttagggggtgcaccccccaccctatggaccaagtcaaataaaagccttcagggctctcaaaaaaaaaaaaaaaaaaaaaaaaaaaaaaagtcgtttcgatgtcgagcgatc

SEQ ID NO: 14005 - DNA, 612 bp, Homo sapiens
  SIMILAR (336)..(605): 401254mologous to Hylobates muelleri dopamine receptor D4,accession number AB032917,Smith-Waterman Score=110.
ttacctctggaatgtaagttccaggagggcagggacgttgctttgttcactgctgcatctcagcactggaatagtgccaggcatgtggtagtgagaggtgacactgtgctggcagtcctcacagccctcgctcgctctcggggactcctctgcctgggctcccactttggcggcacttgagaagcccttcagcccaccgctgcactgtgggagcccctttctgggctggccaagaccggagccagctcccttagcttgcagggaggtgtggagggagaggcccaagcgggaacccgggctgcgctcgctgcttgcgggccagctggagttccgggtgggcgtgggcttggcgggccccgcactcggagcagccagccggccctgccggccccgggcaatgaggggcttagcacccgggccagcggctgcagagggcgtactgggtcccccagcagtgccagcccaccactgggccttagctgccttcctgcagggcagggctggggacctgcagcccgccatgcgtgagcctcccacccactccatgggctcctgtgcggcccgagcctcccggatgagcggcgccccctgctccacggcgcccagtcccat

SEQ ID NO: 14006 - DNA, 636 bp, Homo sapiens
  SIMILAR (280)..(5): 381254mologous to Homo sapiens alpha-1 chain precursor (AA - 27 to 917) (2953 is 2nd base in codon),accession number X05561,Smith-Waterman Score=100.
atgctggcagtcctcagagccctcgcttgctctccgcacctcccctgcctgggctcccactttggtggcatttcaggagcccttcagcccctccactgcactgtgggagcccctttctgggctggccaagctggagcccactccctcagcttgcagggaggtgtggagggagaggcacgagcgggaactggggctgcctgcggcgcttgcgggcagctggagttccggagcagccagccagccctgctggccccgggcagtgggggacttagcacccgggccagtggctgcggagggtgtactgagtcccccagcagtgccggcccaccagcgctgtgcttgatttctcaccgagccttagctgccttcccgtggggcagggctcgggacctgcagcccgccatgcctgaacctcccacctacttcatgggctcctgtgcggcccgagcctccccaacgagcaccaccccctgctccacggcgcccagtcccatctaccacccaagggctgaggaatgcgagcgaacggcgcgggactggcaggcagctccacctgcaaccccagtgcgggatccactaggtgaagccagctgggctcctgagtctggtggggatgtggagagtctttatgtctag

SEQ ID NO: 14007 - DNA, 612 bp, Homo sapiens
  SIMILAR (281)..(568): 351254mologous to Arabidopsis thaliana extensin-like protein,accession number AP002048,Smith-Waterman Score=118.
tttagaaacttgaattatcgagtgtctacaatggttgcagttcttggggaaagctttatagcaaaggtggaatttaagctgatcattgatctcttcgtcaatgctaagccaactccatttagcaaaggtactagggcagaaacacagcttggaaacctctatccctttgtggattttggaagctacatttggcagcttcctaagaacagccggccggccctgctggctccgggcaatgagggacttatcacccgggccagtggctgcggagggtgtactgggtcccccagcagtgccagcccaccggcgctgcgctcgatttctcaccgagccttagctgccttcctgcggggcagggctcgggacctgcagcccgccatgcctgagtctcccacccactccatgggctcctgtgctgcccaagcctccccgacgagcaccaccccctgctccacagcgcccagtcccatctaccacccaagggccaaggaatgcgagtgcacggcgcagtactggcaggcagctccacctgcagccccggtgcaggatccactcggtgaagccacctgggctcctgagtctggtggggacgtggagagtctttatgtctag

SEQ ID NO: 14008 - DNA, 504 bp, Homo sapiens
  SIMILAR (334)..(456): 901254mologous to Homo sapiens human granulocyte-colony stimulating factor,accession number M13008,Smith-Waterman Score= 203.
atgggctcctgtgcggcccgagcctccccgacgagcaccaccccctgctccacagcgcccagtcccatcgaccacgcaagggctgagaagtgcgggcgcacggcaccgggactggcaggcagctacccctgcagccctgggtatgtgaatgcaccaatcgacagtctgtatctggctactttcatgggcatccgtgtgaagagaccaccaaacaggctttgtgtgagcaataaagcttttatcacctgggtgcaggtgaatgaccagggaaatcacgtgtcccaatcccgcagttccaaagcccttggggaccctactgtcagggtcgtgcacgaggaggtgaagtgtgccacctacaagctgtgccaccccgaggagctggtgctgctcggacactctctgggcatcccctgggctcccctgagcagctgccccagccaggccctgcagctgagcttcctggaggtgtcgtaccgcgttctacgccaccttgcccagccctga

SEQ ID NO: 14009 - DNA, 924 bp, Homo sapiens
  SIMILAR (457)..(600): 971254mologous to Homo sapiens Human 5' EST secreted protein SEQ ID NO:360,accession number Y12329,Smith-Waterman Score=254.
atgggcttggtgggcctgcactcggagcagccggccggccctgccggcccaggcagtgagagacttggcacccgggccagcggctgcagagggtgtactgggtcccccagcagtgccggcccaccggcgctgtgctcgatttcttgccgggccttagctgccttcccgctgggcagggctcgggacctgcagcccgccatgcctgagcctcccacccactccatgggctcctgtgcggcccgagcctccccgacgagcaccaccctctgctccacggcgcccagtcccatcgaccacccaagggctgaggagtgccagcgcatggcgcgggactggcaggcagctccacctgcagcccggacatatgtagagtgtgtcggtcagaaggaacacctgagaaaccgctttatcatccttgtgtatgtactggcagtattaagtttatccatcaagaatgtttattctccagatatgccttcacggcttccaattcaagacatatttgctggactggttacaagtattggcactgcaatacgatattggtttcattatacacttgtggcctttgcatggttgggagttgttcctcttacagcatggcaccagttattggatttagggtccaccctaaatccaggatgctcacatcttgtgatccttaaattaacgacatctacaaagaccctttttccaaacaaggccacatttattctggttgtgctcagccaggacaagaccctgatggaagatcccaggatggaagacaaatggaaggaggaccgcttctcccctttcaacagtgaagccctggaaatcacccttggagaaaggcacagaccacagactgcctctgtgatcccgtggttttgttcttccaggcacgtccttaaccttggcaaaataaacttcgaagttgattga

SEQ ID NO: 14010 - DNA, 597 bp, Homo sapiens
  SIMILAR (284)..(93): 381254mologous to Mus musculus msg1,accession number X71629,Smith-Waterman Score=109.
ctagatataaagactctccacgtccccaccagactcaggagcccagctggcttcacctagtggatcccacaccagggctgcaggtggagctgcctgccagtcccgcgccgtgcgctcacattccccagcccttgggtggtcgatgggactgggtgcggtggagcagggggtggtgctcgttggggaggctcgggctgcacaggagcccatggagtgggtgggaggctcaggcatggcgggctgcaggtcccgagccctgccccgagggaaggcagctaaggccgttagctccagttggatgtggtcagtgaagagaaccagtggtagaagaacagtatgggagaaactaccacgtgattcaattatctcgtactgggtccctcccactgggagataccttgatttatcactctgaacaaaaggggtcttccctccttggaatcccacactattaagggaatttctgttgagagtatcaattccagacagtgttgctccaatctgctcatcacagactgtcttggctgcagctctatgctgctgggtgggaagccccgccaggcggagcgcaggacccctcaggctcggcccctccat

SEQ ID NO: 14011 - DNA, 516 bp, Homo sapiens
  SIMILAR (185)..(99): 861254mologous to Homo sapiens Human secreted protein, SEQ ID NO: 7141,accession number G03060,Smith-Waterman Score=121.
atgaagccacggaccctcgcggtgagtgttacagctcttaaggtggcgcgtctggagtttgttccttctgatgttcagatgtgttctgagtttcttccttctggagtgaagctgcagaccttcgcggtgagtgttacagctcttaaggcagcgcgtctggagttgttcgtttgtcccgttgggctcgtggtctcgctgggttcaggagtgaagctgcagatcttcgaggtgagtgttacagctcataaaagcagcgtggacccaaagaactcaggagcccagctggcttcacctagtggatcccccaccagggctgcaggtggagctgcctgccagtcccgcgccgtgtgctcctactcctcagcccttgagtggttgatgggactgggcgccgtggagcagggggtggtgctcgtcggggaggctcgggccgcacaggagcccttggagtgggtaggaggctcaggcatggcgggctgcaggtcccgagccctgcccccacgggaaggcagctaa

SEQ ID NO: 14012 - DNA, 1026 bp, Homo sapiens
  SIMILAR (1)..(7509): 1001254mologous to Homo sapiens neurofibromatosis protein type 1,accession number M38107,Smith-Waterman Score=12946.
ctagacatgaggctgccgctcaggcccagactcccaaatagttgtatgcaagtaaccccagctgctgaggctgggaggtacttctgaaggtaacagaagaatccatcttcctgcagatttattgaatacggtgtcagcttccttcccatctatttccaacatatgcagacttctgtgctctggtgactcttgagctaggcacagggtgctgattggtgtgtttacaatccctgagctagatatactctccacatccccaccagactcaggagcccagctggcttcacctagtggatcccgcaccagggctgcaagtggagctgcctgccagtcctgcgcggtgcgctcgcattcctcagcccttgggtggtcgatgggactgggcgcagactcaggagcccagctggcttcacctagtggaacccgcaccagggctgcaggtggagctgcctgccagtcccacgccatgcgcttgcattcctcagcccttgggtgatcgatgggactgggcgccatggagcagggggtggtgctctttggggaggctcgggccgcacaggagcccatggagtgggtgggaggctgaggcatggcgggctgcaggtccagagccctgccccacgggaaggcagctaaggctcggtgagaaatcgagcgcagcgccagtgggctggcactgctgggggacccagtacaccctccgcagccactggcccgggtgctaagtctctcattgcccgcggccagcagggctggccggctgctccgagtgcagggcccgccaaacccacgcccacggggaactccagctggcccgcaagcgccgcaggcagctccggttcctgctcgcgcctctccctccacaccttcctgcaagctgagggagtgggctccagccttggccagcccagaaaggggctcccacagtgcagcagcaggccgaagggctccccatcccccgacttccagaagagtggatttctttgcctttcctcgggcaccaaggagagcattcgggtatggcat

SEQ ID NO: 14013 - DNA, 2234 bp, Homo sapiens
  SIMILAR (1383)..(874): 451254mologous to Felis silvestris polyprotein,accession number X51929,Smith-Waterman Score=350.
ctaagaatcatttgccttgtgtgggaagagattgataagtggaagttttagtggggaagtaggtgagagtggccggatgagaaggagaaaaacggccgtgagggacagaagttggaacgctagctgctttttagctaccttatcagcataagcattgtcctgagtgataggatctgatgccttttgatggcccttgcagtgaatgactccagcttcttttggaagtaaaatgtctttgagaagagtttttattaaaaaagcattaatgatggaggccccttgcatagtgaggaaatttctttcttcccatataacagcatggtggtgcaggatatggaaggcacatttagagtcagtataggcaatgagtttggcttgttgagaggtagtggagcggggcagagcagtagcctcaatgatagatgtggaagatactatagcatagcctgcctttgctggtgagtggcagttaggtctggtggaactgccatcaataaaccaagtgtgttcaaggtgaggaacaggaaagaaggaaatatggggaaatggagtgaatgtcaagtggatcagagagatacagtcatggtggtcaggtgtggtatccggaataatgtggaaggccggattgaagtccaggacaggaacaatggtaacggcgctgcgctcgatttctcgccgggccttagctgccttcccacggggcagggctcgggacctgcagcccaccatgcctgagcctcccacccactccatgggctcctgtgcggcccgagcctccccgacgagcaccaccccctgctccacggcgcccagtcctatgtgtgttttcatgagaattatgccaaggtaggtaacagatgaggaagaaatttgggcttgactgaagtaatgggggctatctatgaagcactgcggcagtacagccaaggtaatttgctgagcctggtgggtgtcagggtcagtccaagtgaaagcgaagagaggctgtgatgaagggtacaaaggaatagtaaagaaagcatgtttgagatccagaacagaataatgggttgtgaagggtattgaggataagagagtatatgggtttggcaccatggggtggataggcaaaacaatttggtagataaggcacagatgctgaactaacctgtaagacttatccagtttttggacaggtaaaatgggagaattgtaaggagagtttataggctttaaaaggccatgctctaacaggcgagtgataacaggttttgatccttttaaagcatgctgtgggatggaatattgggattgagcagggtaagggtgattaggttttaatgagatggtaagggatgcatgttcagttgccaaggagggactagaggtatcccatacttgtgggttaaggtggggagatacaaggggaggatgtgagggaggctttgaaccgaagcttggcatccatgatggcccagggggcttccgaggtgattgggcagcatcagtcttcagtggatggcccaaattgtggagcagcttgcatggcagcctgaatctattgacaagccttctttggttcttgggctcgtacactagaaaatcaatcaaggtctctgcagccttaagatccttgatcaaatcttcaaagttcctattgaaacgtggggtaacaaattcacaggttctgtttggcagcaacaccttctcaaagatttgctgcctaactccacagggtcctttttcaaacttctcgtttccaataactctaaactgtccacttgattcttcattcctaggggcgttagctactttctgacaacaacctgatgaagagtgggcttgtctattcttcatcttttgttggtgcacagcttccaaagagactgcatccaattcttcatcacacagaagtacatataaattctcctgcatagttacaagcttctgaaaataatgagccttattgtcatgccggtaatccctttggtagctttgtgcattcttcagggttttccagagggacagaacaggtaggctagatgcagatatctttattaggcagaattgactcacaggatcacaaggtgaagtcctgtaatagggcgactgcaagctttccaagccaacactcacaggtagaataacaacatcacagtacagagatgtgagtggcatctgcctttgagtaagggactggttagctgcgattttatgggtttcctgacaccgtgatactgatggaagccaattac

SEQ ID NO: 14014 - DNA, 3594 bp, Homo sapiens
  SIMILAR (3435)..(2959): 851254mologous to Mus musculus retinoid X receptor interacting protein No.6,accession number U09416,Smith-Waterman Score=711.
tcaatccctcggtgtgaaaagattaggaaaggaaccacgggtgactgcatagaggagcacgccctccaaaactttcctctgacttccaaggcactctacaagccttccctttcttttgccagcctctccccgggcagtcctccaaactgagggttgtgggcggaaggcatcgcgcagggtctccagctctattccccagttccgcacatgtgggcgttctagaccctgcatggacttcgggctctgataccgctctggatttaaagcagggcgagtagcggctggatccctcctccccagctgagctcgcccacaccagcagccccaaccgccccgcacacctgtcgcccctctctccgcattgggtggacaggtgaaggcaggcgcaacgtcaccttgacggccccaggagccaatcagagcacgcgactgccgcagccaggcaaacgcagagcgtactggctcccgcagccgggagacccaacaaacctcagcttcggggccaggcgcaggagggtcacttctcccagcggggcgacaactcggctcaatctgtgcggggccaacacgcccctgaccaaccgccgccgctgccgccgccgcctgggcctcagggtcagtagccgctggccgccgcctgtttcgaagggaccaatcataaggcgggggcgtggtctgaggccccgcccccgggctgccgggaagcacgcgacccgtgggcgctcgcctgtcagcgcgtccagcgctgcgcctccgggcgtctcggagcttcggtggccaagtccctctgttcactgaaaggcgaagtggttcagtcagagcaggtcctccgatctggcctttcagcgacagccagttcgaaagccacagcccgtcctgttgttcccacaggcctgagaggtgaatgaacctcgcctgtaataattgcttctgagcgtcctggaatgttgcggtgcagctgaaggcgcttccctgagttttatcctggtctgttaagagccgctcccaaccccacatccactcgggagctggctgacctggacccactgaatttggggctatcccttgaagcccagcagaagtaccatctcctgtatgaaactttcccaagttccagggtaaacccacagcaagttccgctgcagcctttataactccctccaggcagttactgggtttttttctttctctttttttgaagacagggtgtcgctctgttgcccaggctggagacaggataacaattgctgtaagcagagcatactcctcttgagtcattttcagttccccaatacttttataaaaactaaacataggtgttatatattcatcagagataccagactcaggagcccagctggcttcacctagtggatccggcaccagggctgcaggtggagctgtctgccagtcatgcgccctgcgctcgcattcctcagcccttgggtggtcgatgggactgggcgccgtggagcagggggtggtgctcgttggggaggcttgggccgcacaggagcccatggagtgggtgggaggctcaggcatggcgggctgcaggtcccgagccctgcccctcgggaaggcagctaaggctcggtgagaaatccagcgcagcgccggtgggctggcactgctgggggacccagtacaccctccgcagccactggcccgggtgctaagtcccttattacccggggccagcagggctggccggctgctccgagtgaggggcccgccaagcccacgcccacccggaattccagctggcctgcaagcgctgcacgcagccccggttcccgctcgcgtctctccctccacacctccctgcaagctaagggagtgggctccagccttggccagcccactatttcgaattctttcttccaataggtcagaatgcccagacggaagtttcttattgaaaatctcagctgaacgaaggaacatagcttcaaccgcagaccctttcagcaaagcaatctggtcttcatggtccaaagtctgaaatcctggtagcttttttgtgaattctacaagaacctgtacatgattggttgccatttccgtcaaaatgagaaaattttcttctgcactgaattcttcttttaacctgcatgactttgttgtcgaggtcacttgtcgcaagtcacgaccttcactgtcttcattcacggtctgatctgcatgctgcttcacattttttctcagtcgcttagatttacactgaatttcagttaacaagcctgacatctgcctccttaagagatttttagtgaaatgtaattgcttgaagtgaatacctgtatacatacattcagccaacattcccatctctttgcatttccttagtcgacactcttgacactttcttcgcatgtacatatccatcacacagttgcccccgtttttacacttgtacacagcgtttttggtaatgcttctcctgaagaaacctgtatgttgggaagctcctcggagcaaggtaaaggtggaacgcgtattggagactagagagaggagactattgccataatacaactgagaggctaccaatgcctgaactctgcctctttcttgtgcatattcaacaatgctcatatcagaaaagtcatttgaaaatgaatggaaaggaaattcactgaggaacagagccttgctggtaatacaggataagtagacagggttggcattgccatctggggaatgtgtagcaccaatgggatccctgagctgaatgaaggagacagccagggccagacgtgatggaagagtgtgctcagtaccccaggatggtgtcacagagacctttcccactggtgactgaagaccaaatacaacagcactccaacagatctcagactgtgtcaacagctgtggcaccaagccccacccagccccacagctgtggggccagagccccactccccagtgcccaatccctccacaaccctcccttaatcctttacacccctcacaggtcagtgcattatagtggtatccagaggctctgtctccacaaacaacacacagctcatcccctttgatcctccctgctgacgcgcccatgcggggcttctttgttacaggcatctctgctacctcagtttctccctggtagagagtctcagctggcatacgcctgagttcatatattccaggagagtaccactcttcaggctgctgggggtagaaacccaggttggaataataggatgacgaggaaatctgtggttgaacttggggaaactgaacattgctgtattgcgagtatggttccacttccaggttctgtcccagaggacctgccacttgttctgttaaaacacctttcgcgggcttcatactcatcatttccatgaaaaatcctgacggcgtacagctgcagtgaggactaatttgaattggattttctaacccctgaaactgcattaccattcttagcttattcacagccaccctctgctgacagttctctgtgctgctcccagtggcatcaagctggcctcccccacaccagggatcttgacaactgacctctttggttttccctccttccctgttgcatcgcccactccctcgcctccactccctcat

SEQ ID NO: 14015 - DNA, 1104 bp, Homo sapiens
  SIMILAR (502)..(1101): 991254mologous to Homo sapiens plasma prekallikrein,accession number M13143,Smith-Waterman Score=1083.
atgaagccgcggaccctcgcggtgagtgttaaagctcttaaggtggcgcgtctggagtctgttccttctgatattcggatgtgttcggagtttcttccttctggagagaagctgcagaccttcgcggtgagtgttacagctcataaaagcagcgtggacccaaagagtgagcagcagcaagatttattgcaaagaatgaaagaacaaagcttccacactgtggaaggggaccccagcgggttgccactgctggctccgcagcctgcttttattctcttatccggccccacccacatcctgctgattggtagagctgaatggtctgttttgacggcgctgattgcccttgggtggtcgatgggactgggcgccgtggagcagggggcggcgctcatcggagaggctcgggccgcacaggagcccgtgaagcgggtgggaggctcaggcatggcgggctgcaggtcccgagccctgcccggcgggaaggcagctaaggcccggcttcccctgcaggatgtttggcgcatctatagtggcattttaaatctgtcagacattacaaaagatacacctttctcacaaataaaagagattattattcaccaaaactataaagtctcagaagggaatcatgatatcgccttgataaaactccaggctcctttgaattacactgaattccaaaaaccaatatgcctaccttccaaaggtgacacaagcacaatttataccaactgttgggtaaccggatggggcttctcgaaggagaaaggtgaaatccaaaatattctacaaaaggtaaatattcctttggtaacaaatgaagaatgccagaaaagatatcaagattataaaataacccaacggatggtctgtgctggctataaagaagggggaaaagatgcttgtaagggagattcaggtggtcccttagtttgcaaacacaacggaatgtggcgtttggtgggcatcaccagctggggtgaaggctgtgcccgcagggagcaacctggtgtctacaccaaagtcgctgagtacatggactggattttagagacaacacagagcagtgatggaaaagctcagatgcagtcaccagcatga

SEQ ID NO: 14016 - DNA, 2155 bp, Homo sapiens
  SIMILAR (212)..(8668): 991254mologous to Homo sapiens GAP-related protein,accession number M82814,Smith-Waterman Score=14551.
ttaattgttgtgcagtttcatagatgggtcaggaggtggacaagttggggccagagatgatggcagtccagcagcaactccctgtgctcccttctctttgggcagagattctatttttgacatttgcacaagacaggtagggaaaggggacttgtggtagtggaccataccttgagctagatacagagtgccgattggtgtatttacaatccctgagctagacataaaggttctccaaggccccaccagagcagctagatacagagtgtcgattggtgcattcacaaaccttgagaaaccttgagctaaacacagggtgctgattggtatatttacaatccctgagctagatatactctccacattcccactagactcgggagcccagctggcttcacccagtggatcccacaccggggctgcaggtggagctgcctgccagtcccgcgccgtgcgctcgcattcctcagcccttgggttgtttgttccttcccggtcgatgggactgggcgccgtggagcagggggtggtgctcgtcggggaggctcgggccgcacaggtgcccatggagtgggtgggaggctcaggcatggcgggctgcaggtcccgagccctgccccgcgggaaggcagctaaggcccggcgagaaatcgagcgcagcgccggtgggctggcactgctgcgggacccagtacaccctccgcagccgctggcccgggtgctaagtccccctttgcccggggccagcagggccggctgctccgagtgcgcggcccgccaagcccacgtccacccggaactccagctggccagcaagcgctgcacgcagccccggttcccgctcgtggaaaatgagcttatatatgaagaagtcagcgagtggacaaagccaggcgcaatggatagcaaagatgtggaagtctcctcgattcaaaccactctggctcacatcatagccagcaacagcaagaaacatagcataaggtttgtgacattatctgcaacaaatgccaagacaaatgatgtgcgagatgtcataaaacaagctcaaaatgaaaagagctttttcaaaaggaaaaccatcctttttattgatgagattcatcggttcaataaatctcagcaggtcaacgctgctcttctgagccgctgtcgagtgattgttcttgagaagcttccagtagaggcaatggtgactattttaatgcgagcgatcaactccctgggaatccacgtcctagactctagccgtcccactgaccctctgagccacagcagcaacagcagctcagagcccgccatgttcatagaggataaagcagtagacaccctggcttacctcagtgacggtgacgcccgagctgggttgaacggactgcagctggcggtgctggctaggttaagctctaggaagatgttctgtaagaagagtgggcaatcctattctcccagtagagttctgatcacagagaatgacgtgaaggagggcctacagcgatcccacattttatatgaccgggcaggtgaggagcattacaactgcatctccgccctgcacaagtccatgcggggctcagaccagaacgcctccctctactggctggctcgcatgctcgagggaggagaggacccactctacgtggcacggaggcttgtcaggtttgccagcgaggacataggtctggcagacccatctgcgttaacacaagcggttgctgcctaccaaggctgtcattttataggcatgcctgaatgtgaggtgcttctggcccagtgtgtggtctactttgccagagccccaaagtccattgaggtgtacagcgcctacaacaacgtcaaagcctgcctgaggaaccaccaggggccactgccccccgtgcccctgcacctgaggaacgcgcccactaggctgatgaaggatttgggctatggcaaaggctacaagtacaaccccatgtacagcgagcctgtggatcaggagtacctgcctgaagagttgagggggttgcatgtcgtgcatatgcccacaaggatggccccttcaggtagtcggttctcctcctgccgttgcgtgatccctcctggggtcctcctgccatgtctggaaggctgccggctgttggcctgggacgtcctctgcctttattctgagtga

SEQ ID NO: 14017 - DNA, 966 bp, Homo sapiens
  SIMILAR (431)..(195): 391254mologous to Hydra sp. mini-collagen,accession number X61048,Smith-Waterman Score=115.
tcagcttgagcccagtagtgaccaccacaaagagtcaacttggtctggtaaatctaagggagcagttgacctggctgtaggtgctgaatagcctagtggatcccgcaccggggctgcaggtgaagctgcctgccagtcctgcgccgtgcgctcacattcctcagcccttgggtggtcaatgggactgggcgccgtggagtagggggtggtgctcgtcggggaggctcgggccgcacaggagcccatggagtgggtgggaggctcaggcatggcgggctgcaggtcccgagccctgccccgtgggaaggcagctaaagcccggcgagaaatcgagcacagcgccggtgggccggcactgctgggggacccggtacaccctccgcagccactggcccgggtgctaagtcccccattgccccgggccagcagggctggctggctgctcttggcattaatggagcaggtgagcgtctgttcatgaaggtggctttctctcttaagacatgctctctctcctgctcctaccttaggctcactctgagcagaggtgggtctgtgcacgtgctgcgcgggaatctgactgtgtgcaagcctcagcccgcgcttctgagagtggtcttccaccaccagagacaggcagactgtggagctcttccggtcccataggctcaggccctttaagaacggggagtcggctctgcaaccagctgcttgggtggtggttctggcacttgctggcttttgaggagcccttgtaacattttctgggtccttgatggctttgactttcccagctaggctgtgcagtctcccagggagggagtggaggaagatcttagccaggtgctgcaggccacaagttatatgcagaagatgcttaacgaagacagtaaaagagggtcccaggagtgggtagaactggatgctgtgtttctcaatatctctgcccctgcaaaattttctcat

SEQ ID NO: 14018 - DNA, 725 bp, Homo sapiens
  SIMILAR (458)..(556): 541254mologous to Nicotiana tabacum Pistil extensin like protein, partial CDS only,accession number Z14014,Smith-Waterman Score=84.
atgactgtatttgaagataaggcctttggaaggataggagccagaagcgctggtgcaagtcaagccttcatcgacattttgaccacacacgtaatgggtttttcagctggaagtctgacgatccagccagccagtgcttctcagcccccttgcagtaagaagcagccagtgggagctcagatgaggcaggaatctagctcccgtaggcctgacagtacctcaggcagcgattcgcgaagggccatctgcagatttttgagggtccctgaatccaatttaggaaggtatgaagtcaaaactcttcgtaacaatagtaagacgtttgcctttgtcactgtgttgatatttgtactgatgcccttggctgcaagtaaggcaggggctgtcgagttggcagctgagtgtgcagctaagaagaaaaggagaacgggctctgagagggctcgggacctgcagtctgccatgcctgagcctcccacccactccatgggctcctgtgtggcccgagcctccccgacgagctccaccccctgctccacggcgcccagtcccatcgaccacccaagggctgaggaatgcgagcgcatggcgcaggactggcaggcagctccacctgcagccccggtgcgggatccactaggtgaagcccagctggggcttctgagtctgtgactaaacaagaaaaggaggaggaactgctaccttcacaagacatgaaaacccag

SEQ ID NO: 14019 - DNA, 1760 bp, Homo sapiens
  SIMILAR (730)..(1473): 1001254mologous to Cloning vector pZC320 SopB,accession number U26464,Smith-Waterman Score=1237.
cccggccgctccgcgggtggaggaggacgcgggacgctcgggctcccaggcgctgccgctgcgggtcccatggcgcacgcaggtgcctgcggaaaacagcggcgacatcgcgatgtggcggcgctcctggccccgcggtcacggccaccctcaactggccaggccgcggaggccggtgactggctgctgggtgcaatccctagggaggtctcagggctgcggatgggcctgggtctcggccgccacgggggtcgatcgggctactgtgtggacagggtggccaaggaggcagcagcccttgggtggtccatgggactgggcgctgtggagcagggggtggcgctccttggggaggctcgggccgcacaggagcccatggagtgggtgggaggctcaggcatggcgggctgcaggtcccgagccctgccccgcaggaaggcagctaaggctcggcaagaaatcgagcacagccccggtgggccggcactgctgggggacccagtacaccctccgcagccactggcccagggagggatggagagggaggggcaaactggagcacacgtgtctgccttaaaagggactcctggcactgagtggccagcgcatgggttggtgccatacagtattggggaccagacctgcctaatttttaaagtgacttttaaggcagtagttctaaagtgtggtccccagacaactagcagcaccagtatctcctgcccaggaagtgccaatttcctcccagccctgctggctgagaagctctgggtgtgggtccagcagtctgtgctctgcacactcagtccaagaggacagccaaccccagtagaagaggactggtcttcagtcaaacctacggtaggtctgggtcttcctctaatgagcctcggtaccactcagatttgcccacaagtagatcaaagttacgtaatgaagacactttctttggaagaaggaaaaagctctctgaggtacagagaactgggcaagatcctgcatgaagccaccacaccagcagctacacgctgcccggcctataaactgccgaaggaaaggaccgtgtggaaaacgccgcgtgaaaggggtcgcccaatttccaaaggtcggggactttcaacccaaaaggaggagcgaggaaaaccaggcaggcgtggcatcctcgtgctccaaattgtcaagctggaaccccaccccgagaaggctcatcggggccacggacctccctcagcgctgcattcagaatccctcaggaggttgtaaacttcctgatttctggacccatcaccagagcccaacgtcacggggagccagaaagcccacggggacaaacaggaagtccacccctgggaaaaacaggaagtgagggaacagacagaaagtccacaggagctgacaagaagtccacaggggacagacaggaagtgagggagccaacagaaagtccacaggggttagacaggaagcccactgggatggacaggaggtccacagggaacagacagaaagtgaggaggcagataggaagtccactggggctaaacaggaagcccaatgggacagacaagaagtccacaaggaacagacaggaagtgaggcgtagacagtccgcaggggctagacaggaaagagcaggttcttccaccttccttagactgtccgcattgtgtgggctgttggtggatgtgaatagagagcaggtggcaaagcagaaatgggatttgtatagttccaggttcacatcaggaaacagagtttaa

SEQ ID NO: 14020 - DNA, 2968 bp, Homo sapiens
  SIMILAR (391)..(981): 991254mologous to unidentified cloning vector 29kD protein essential for the replication of mini F plasmid,accession number AB015619,Smith-Waterman Score=1024.
ttatttgagttcattgtagattctggatattagccctttttcacatgagtaggttgcgaaaattttttcccattttgtaggttgcctgttcactctgatggtagtttctttggctgtgcagaagctctttagtttaatcagatcccatttgtcaattttgtcttttgttgccattgcttttggtgttttagacaagaagtccttgcccatgcctatgtcctgaatggtaatgcctaggttttcttctagggtttttatggttttaggtctaacatttaagtctttaatccatcttgaattgatttttgtataaggtataaggaagggatccagtttcagcttcctacatatggctagccagttttcccagcaccatttattaaatagggaatcctttccccattgcttgtttttctcaggtttgtcaaagatcagatagttgtagataagcagcgttatttctgagggctctgttctgttccattgatctatatctctgttttggtaccagtaccatgctgttttggttactgtagccttgtagtatagtttgaagtcaggtagtgtgatgcctccagctttgttcttttgacttaggattgacttggcagtgtgggctcttttttggttccatatgaactttaaagtagttttttccaattctgtgaagaaagtcattggtagcttgatggggatggcactgaatctgtaaattaccttgggcagtatggccattttcacgatattgatttttcctacccatgagcatggaatgttcttccatttgtttgtatcctcttttatttccttgagcagtgatttgtagttctccttgaagaggtccttcacatcccttgtaagttggattcctaggtattttattctctttgaagcagttgtgaatgggagttcactcatgatttggctctctgtttgtctgttgttggtgtataagaatgcttgtgatttttgtacattgattttgtatcctgagattttgctgaagttgcttatcagcttaaggagattttgggctgagacaatggggttttctagatatacaatcatgtcatctctgaaaatttgaagggtccttgctgcagccacactcacatcattggcttgttcatcaacagtcaatattctgagaacactgaagggaaagaagatggttctctgtagaccaccccagaatagctcaaattttttcctctggctcagctgaatgacaagagcaaggttagggctgacataggcaagctcacttgctagggtaggaaaccctctaggacagttccagaagttagcggggtttggtggaagggtattttggcaccagcagagagcatgctgggctgctgcaaggagcaggagctggcaatcaacagcgagtttggatgttggcaacctgccaccaacaggccccagtatgtaatgttcccctccctgtatccgtatgttctcattgttcaactcccacttatgagtgagaacatgtggtgtttggttttctgttcttgtgttattttgctgagaatgttggtttccagcttcatccatgtcctgtaggagaagttcatcacatatatttttggccagattatctacaaaagcagttgtttgtactgattcagtaatagatacaacagcaatgctaacagttgccataatgtctatggctgagcctgtaaagaccataagtgtaaatgtgaatcttttgtgtctgacctgggacagggcactttctaaggtggcaagggcagaagagtcttgccaattgcatgtcaaattggctggtagaagtgcctcagattgtctccttaataccacgacactggaagtttttaaactagacatatcatgaccagtgatacatgaggcaaaccaagcctgtccctgcacccgggtcacaaatgtggcatttccaggtgtaatggaaatgttagttccagactcaggagcccagctggcttcacccagtggatcccgcaccggggctgcaggtggagctgcctgccagccccacgctgtgcgctcgcactcctcagcccttgggtggtcgatgggactgggcgccatggagcagggggtggtgctcgtcggggaggctccggccgcacaggagcccatggagtgggtgggaggctcagacatggcgggctgcaggtcccgagccctgccccgcgggaaggcagctaaggcccagcgagaaatcgagcacagcgccgatgggccggcactgctgggggactcagtacaccctccgcagccactggcccgggtgctaagtcccccattgcccggggccagcagggctggccggctgctccgagtgcggggcccaccaagcccaagcccacccggaactccagctggcccgcaagcgccgcacgcagccccggttcccgctcgtgcctctccctccacacctccctgcaagctgagggagtgggctccagccttggccagcccagaaaggggctcccacagtgcaggggggaggctgaagggctcctcaaatgccaccaaagtgggagcccaggcaggggagaagaattgtggcattcacgatagaagtgggggtgttgagggaagatctgttttgaatggtgatcctactttgaacattttgggtgtagagcagtacgaggccatcaggtatccaggtggagatggcatactgctgagccagcaggaaaaggcaacaggacgaggggcaggatttgccactggaatgtcagcaggccatacctcaggcgttcagctccatggagcaaagacagtagtgatcacgttccttgacaacagtgctagtgtgcggggagcttttagttttccttttctctgctccttgaaccaagaatccagcatcagcatcagcatcagcatcagcatcagcatctgctcagctgtaggccatgattgtctgtactgtttaccagcagctcatgtaatatgcttgatgtaa

SEQ ID NO: 14021 - DNA, 380 bp, Homo sapiens
  SIMILAR (625)..(1140): 981254mologous to unidentified cloning vector 29kD protein essential for the replication of mini F plasmid,accession number AB015619,Smith-Waterman Score=881.
cgggcactggggaatggtgaactcgccgtgccgcgcctctgccacagtctcccgtgggtccccactgccgggagttttacctacctccccaccctcagccacgagcacctgcaggatgcggtgccatcctcgccggtgcccgctccccttccggaggctctctccaccctcactgacgcctcctcgggaaagcccccgctccttccccgacctcacagcatgccaggtctggggcttccgctggggggcttacctgttttccacccctgctagactgggagctccagggcaaggccgtagctgccttgcggattgttacgttgtccagcttgtctccacacgtgatacccagcaggtgcctaataaacttgtgtagaaag

SEQ ID NO: 14022 - DNA, 1818 bp, Homo sapiens
  SIMILAR (607)..(1266): 1001254mologous to Cloning vector pZC320 SopB,accession number U26464,Smith-Waterman Score=1100.
atgaagagtaaatacaagagcaaacatccaccactctttctacacaagtttattaggcacctgctgggtatcacgtgtggagacaagctggacaacgtaacaatccgcaaggcagctacggccttgccctggagctcccagtctagcaggggtggaaaacaggaggaagaagaccacaaatctaaccagcctagcagccccagatacacagagcacatgtggacaaagctgtggctgcctgcattccatgggatcatcttgtatgcagcactcttactataccggattcctcaggtccctgtggccttgcaggtgccacaggagcgctttctctggccagcggagaagcgaggagaaagactccaaatcagtcagggagaggagtggaaggagccaaaacgtccctgcgaggcctgcgctcaccagcccccttacccaaagtcccgggcccctggcgccaggagcaggctcctggagccggagccagctcggcactggaaccggcgtcctctggtggcagagagagagcgctactggcgattttcggaccgaatcggcacgctcgtcagatccaagcaggcgggactggcctggagcaaaaagaaagagagaggagggcgccgccaccgtgttatgggcgtgcgcaactgcctctacggcaataatatgtcaggacaacgcgatatcccccctgaaatcggggaacagcccgagcaaccacctttggaggccccaggggcagctgcccccggtgctgggcctagcccagccgaagagatggagaccgaaccgcctcacaacgagcccatccccgtcgagaatgatggcgaggcctgtggacccccagaggtctccagacccaactttcaggtcctcaacccggcattcagggaagctggagcccatggaagctacagcccacctcctgaggaagcaatgcccttcgaggctgaacagcccagcttgggaggcttctggcctacactggagcagcctggattccccagtggggtccatgcaggccttgaggccttcggcccagcactcatggagcccggagccttcagtggtgccagaccaggcctgggaggatacagccctccaccagaagaagctatgccctttgagtttgaccagcctgcccagagaggctgcagtcaacttctcttacaggtcccagaccttgctccaggaggcccaggtgctgcaggggtccccggagctcctcccgaggagccccaagccctcaggcctgcaaaggctggctccagaggaggctacagccctccccctgaggagactatgccatttgagcttgatggagaaggatttggggacgacagcccacccccggggctttcccgagttatcgcacaagtcgacggcagcagccagttcgcggcagtcgcggcctcgagccatcagtgcctttctcaccacatccccatgagccccagcgtgggcaggaatggacttttaacaaaaccaccatctacctcaagaagggggaagctaacaaaaagagatgacatgtattactttgttccttttagaagcctaaatgatatgatgcacatgttacccttcattgaagattctaggtggacacacaacttggatatcaacagggagcagaaaacaaacccactagcaggaccaaaaggcagacccatcagcagaacacaggcggcagcttccacaagtaactccaaaactgaaagtcaaatccaggagaagactgaggaagctccattttctttgaggtacatcaacatcaataacagatcaatggacccacttaatggagctcttaattga

SEQ ID NO: 14023 - DNA, 877 bp, Homo sapiens
  SIMILAR (1493)..(1651): 641254mologous to unidentified cloning vector 29kD protein essential for the replication of mini F plasmid,accession number AB015619,Smith-Waterman Score=148.
ctaaggagctggaacgcccagatttgggcactctctgagcaggtcctgggccccctcggcctttgcctcctcggtcttcagaagggcctcctggggcctccatctctctgtgctcagaagtgcctgggccatcatgccaggggcgctttcggggaggtagggatgccatgtccatgccttggagagaagaggagcgttctctgctggctggggaatgaccgtcgtgagggggatgatcagggcggggagtatcacgaaaatgttcatgacctggccctcgtggggtaccccgacctcgacctctgagatctcgtcctcgggccgcttcctcagaagcatcaaaattctcctctggaccaaagtcttcataggaccaggaaaaccatcccttcctctggggggagcacggccatcatgcctcggcggggctcctcttctgaaactttcttctctgcgccctcgaaaacgtgggtcctcgggatcccgggggaaacgttcatctccgggcctgcggccttcccatgcccccggagggcctcgggctgcaccccggccatccccctcgctgaattccctgtgatcagggggaaacggaggcccagggccccctcgcctccacttctcttcatgcggtaaaggtcctcctcgcccctcaaattcacgtaaccggtggccaaagcgcttgtcagggtggaagtcatctggtctgctgaagtcatcggggaagtctgggtgagggccacgcctatcagggggacccctgcagtcctggccaccccgcaaaggccccctctcgggcccatgctcaggcccgccgctctgctcatgccgcctctctgacatcgggcccatgtgatgcctcgtgccaagcttggcg

SEQ ID NO: 14024 - DNA, 546 bp, Homo sapiens
  SIMILAR (352)..(200): 1001254mologous to Homo sapiens Human secreted protein, SEQ ID NO: 5325,accession number G01244,Smith-Waterman Score=274.
tgatgtccggaaccaaattttggttggtacctgcaattcataggattattcaaccatccctataggtgggaccagatccattgtaaataaccctgcatccaggctgaattgcccgcatatctctctggtctcttggccatattctgttctccaaatacttaattacagatggattgtagtctatggtttttcggttcacagcttttctcattcgttttccatcaaaagtaagctgttgcattgcttgctgttgtgcaaaatcaggtcgcttataaaacagctgtcgaggtgcctggtgctggaaccttggcatatggaaaaaacgaggaggagaaccaatttctgtagccatggtgatgttttccttctaggatacgtctggctttgagcagagctcctaaatggccagcgaagcgttcgccttcagagccagaaatgtctctcctgtttggtctccccaccccgatcctaacaataccgctcctccaaaggagcagccgccatcttcccccgggcgcgtgggtcgacacgggaattggagcgtcg

SEQ ID NO: 14025 - DNA, 549 bp, Homo sapiens
  SIMILAR (487)..(284): 381254mologous to Mycobacterium tuberculosis SEQ ID NO 15C,accession number AX005204,Smith-Waterman Score=81.
aaaattaaatttttattttgagatcactgtttgtgttcagttgtaagaaacaagagagattctgtgtaccctttacccattcctccatgttgcaaaactagcacaatatcaccgccacggtagacgcagtgaggccataagacatttccgtcagcaaaagggtcacttcttgtgcccctttagaaccacaaccccacccctgccttccaactattaatgctggcaggacttagccagaccgcaaggggcgcctactccgaacaaggaagagggtcaggcgcctgggagggcgactgcaagcggacaggcagcacctgcgaccacggtacttggggacaccacaaaagtccgcagggcaggcaccgcggcacttccgcgagcgccgcaggccctgcccctttcgccgtcgccgaccaattgccgcccgaagaccgagccgcttcagcggagggccggaagtgagccgcagcttttcctttctgccaccgccttgtccaagatggcggacctccaccgccagctgcaggagtacctggcgcaggggaaagc

SEQ ID NO: 14026 - DNA, 2616 bp, Homo sapiens
  SIMILAR (1186)..(1536): 991254mologous to unidentified cloning vector 29kD protein essential for the replication of mini F plasmid,accession number AB015619,Smith-Waterman Score=598.
acagcgactacgcactgtcgtgtagcactttatcacgtctcttccgtcacagtcctgctaattcgttttcaaggtgggctagccaccaatagcgactacgagactcctacgcgctgtcgctccgtggcagcgccgtcccgattagctcgcagctgtaggcatggcttcgcactgcttccgccagcggcgtcagtctcagtcgcctgcgcggtctccgcggcgctggctccgcgtactccccagcggcaaggcgcgaggtcctcacacgggcagcaccttggcgaggccggcgccgcggcccaggcgacccagtgcgaggcgcagcgcggtgccgccgccccagggcagcagcccaaccagcgcggccagcagcgcggccacctgcgcgcccgcgcccagcaccgtgagcagcgtgctgcgaaggcccagcgcggcgaacagcgtggcgcccagcgctgccatgtagagcagcgcgggccgggacggcgcttcttcgcagcgcagcaggcgtccgcacgccgcgccgccccgcagcagcgcgcttcccgccaacggcaagcgccgagcccagtgaccagagcagcgcgaacttgcggcgcgcgcagcagcaacaccggtgcgtagagcgcggctaggccgaaacacagtgcagccagcagcaggcacccgccgcccgccgccagccgctgcccgcgcgtcacgctcgggaggcacgtcaggccggccgctgccgactccgcagggctccgcgcccacgtccagcgcaagcccgcgcggcccagccactcctccgccggccggtccccgggctcctccgccttctccgcggcgagcagcggctccgcggccgccgggccgccagctttcccctgcgccaggtactcctgcagctggcggtggaggtccgccatttccggccctccgctgaagcggttcggtcttcgggcggcaattggtcggcgacggcgaaaggggcagggcctgcggcgctcgcggaagtgccgcggtgcctgctctgcggacttttgtggtgtccccaagtaccgtggtcgcaggtgctgcctgtccgcttgcagtcgccctcccagcgcctgaccctcttccttgttcggagtaggcgcccttgcggtctggctaagtccctcaacctgcttctctattctgttctcagtttcggccacaggcctggcaacatccttgactccttcgcgccccttgtccaagactcggtgctgctgtcccatgtgtttggtgtcactctcgtgctctggacagcgccacgcccaggtggatgtaaggttaacggcttcctgctgtttggcttctcagcctttccatcccctcccttcaaccaggccttcgttccaccgtgccagcaaaattgttcattacaaaatcgccagacgctgtcggctagtgcgaaaattggtactgaggagtgggacattgctataaaaatacctgaaaatgtggaagtgactttggaactgggtaatgagcagaggttggaagagtttggagggctcagaagaagacaggaagatgaggggaaatttggaactcctacggactggttaaatggttgtgaccaaaatgctgatagtaatatggatagtgaaggccagggggaagatggcggctgctcctttggaggagcgggattgagaggatcggggtggggagaccaaacaagagagacatttctggctctgaaggcgaaccttcgctggccatttaggagctctgctcaaagccagacgagtcaggaaggggcagcaggtgccaggtccggcctcaaaggtggcaagaagaaccctttgaaactgcccaaaaagcaggccaagaagatgaataaggctttcaagcagaaacaagaaaaggaacgaaagaaacacaaggagctaaaagcgaaagcctcctggaaggggctccggccacaggtggaatttaaaaatctggcagaaaggagaggtgaagctgccgtgcctgggtgccccgtggtggccggacactcctggcggctgctcagtcttgcacgtggctgtgccaagcgggccaggcagctgctatttccctcagagaagttgctggcggcgctcagggaaggaagcacccgaggaggcggagcggcatctcagccacagagaaaactgcgggtctgcatgagagtcctggattctagtgttgaggatttccacatggatgggctgagtcgggagtggaactgctgtttagggcctgcacccacacgcctgccccctctggcttccagctgtgctgaccctactcccacgggccagaacaatggtgatgccagaggtcccttcagctgtgatagtcaaagatcttgtggttgtttctccttattctctaagacgagtagtattgcctggacgaggaacgccctacacagtgcctcgcaaaggctgactgtcatccctgtgtcatttgaggtttcagaagaggagccccgccgaggcatgagggccgtgctccccccagaggaagggatggttttcctggtcctgaagactttggtccagaggagaattttgatgcttctgaggaagcggcccgaggacgagatctcagaggtcgaggtcgggtacccacgag

SEQ ID NO: 14027 - DNA, 888 bp, Homo sapiens
  SIMILAR (1)..(531): 851254mologous to Homo sapiens putative p150,accession number U93574,Smith-Waterman Score=765.
atgattatctcaatagatacagaaaaggcccttgataaaattctacaccccttcattctaaaaactctcaataaactaggtattgatggaacgtatctcaaaataataagagctctttatgacaaacccacagccaacatcataatgaatgagcaaaagctggaagcattccctttgaaaagcaacacaaagcaaggatgcccttttttaccactcctattcaacatagtattggaagttctggccagggcaatcaagcaagagaaagaaataaagagtattcaaataggaagggaggaagtcaaattgtctctgtttgcagatgatatgattgtatatttagaaaaccccatcatctcagccccaaatctccttaagctgataagcaacttcagcaaagtctcaggatacaaaatcaatgtgcaaaaatcacaagcattcctatacaccagtaatagacaaacagagatccagatgatgagtgaacttccattcacaattgctacaaagggaataaaatacctaggaatactacccacttacaagggatgtgaaggacctcttcaaggagaactccaaacccctgctcaagaattagaaaaaactactttaaatttcatatggaaccaaaaaagagcccatatagccaagacaatgctaagcaaaaagaacaaagctggaggcgtcatgctacctgacttcaaactatactacaaggctgcagtaaccaaaacagcatggctgggggacgatcaggtctttctcatcccacgaggccatatttcagactatcacatggggaaaaaccttggacaatacccggctttccaggacagaggtccctgcggctttccacagtgcattgtgcccctggtttatcgagactag

SEQ ID NO: 14028 - DNA, 1546 bp, Homo sapiens
  SIMILAR (1)..(1077): 991254mologous to Cloning vector pZC320 SopA,accession number U26464,Smith-Waterman Score=1862.
agggaaacaacagtgggtccaggggaccggcactcagcacaccaaggacctgcaccggcctctgagttccctcagtttttattgattatgattttcattatttcagcaaaaaggaatatactaggagagcagggtgataataaggaggtcaacaaaaaacatgtgagcaaaagaatctatatcataattaagttcaagggaaggtactatgcctggacgtgcacgtaggccagatttatgtctctctccacccaaacatctcagcggagtaaagaataacaaggcagcattactgccaacatgtctcgcctccctccacagggcagcttttctccgagctcagagttgaacaaatgtacgatcgggttttacaccgagacattcagttcccaggggcaagcaggagacagtggccttcctccatgtcaactgcaagaggctttcctctttgactaatacacctcagcacagacgctttacgggtgtcaggctgggggacagtcaggtctttctcatcccacgaggccatatttcagactatcgcatggggagaaactttggacaataccctgctttcaagggcagaggtccctgcggctttccacggtgcattgtgtccctggtttattgagactagagaatggcaatgacttttacaaagtatactgcttgtaaacatttggttaacaaggcacgtcctgcacagccctagatcccttaaaccttgattttatacaacataggtttttgtgtgctccaagttgggtcaaagcggctggggcaaagtggctggggcaaagctacaaatgaacaacatctcagcaaagcaattgtttaaagtacaggtccttttcaaaatagagtctcttatgtcttccctttcgacatagacacagtgacagtctgatctctctttcttttccctacatccaaggacttgaacatttcttgacttgttagcaatccaaatcgttatgtctccgaaacagagttgactcaggggaccgcagggctgggcaggacctttgacttcctatacatccacaggagcaagaaaacctcagccccgctctaccaacacgcacctagtaaaattccgccaattgaatctcacgcacgctaacacgtggggagcgttgcttgcaccacgagtccccatttggctcaaccgccgatgccaagtgtgtggttccggttgcgacggctccccgtgaagtggcttccggatgtgcgaatgaaccaggcagagtttcgctggccaagtagaccccagcaaagctgaagttaactcccacatttgggatgtacttcagaggtgaaacattcatccctcttctttccggatgtctgacaccgggcctttccatggttctccccctgatcctaagagtagctgaggtagagactcactgaaagatctaggcagggatatcccatcatgcacaggctctctccattctctgacctgggaacaactctcagcaggattgcatacctaggcggcctcggaactcagcgggatttgctgagacacaccaaatggctg

SEQ ID NO: 14029 - DNA, 2925 bp, Homo sapiens
  SIMILAR (1273)..(2922): 901254mologous to Homo sapiens putative p150,accession number U93574,Smith-Waterman Score=2619.
atgttgattgaaccagccttgcatcccagggatgaagccgacttgatcgtggaggataagctttttgacgtgctgctggattcggtttgccagtattttattgaggattttcgaattgagtcaggatcctctgctgcaggtctcctggagtttgctggaggtccactccagaccctgtttgcctgggtatcaccagcagatgctgcagaacagcaaagtttgttgcctgttccttcctctggaagcttcatcccagaggggcacctgcagatgccagccatagctctcctgtatgaggtgtctgtcagctcctactgggagggggcatccagtacagcagtgacacacagtaaaggcttgcaaacatttgccaaatgcaaaaaattagtaacatttcaagaaggcatgagatgtccagaacagagctatccaaaggtgcagcaagttttagaaaatggggttagcaagagagtggattctgaggttccttgttttaattcttcaggaaatacgatcaatgagacagaaagagaacaaggatatccaggacttgaactcagctctgcaccaagcagacctaatagacatctacagaactctccaccccaaatcaacagaatatacattcttctcagcaccacattgcattgcacttattccaaaattgaccacacacttggaagtaaagcactcctcagcaaatgtaaaataacagaaattataacagactctcagaccacagtgctatcagaactcaggattaagaaactcactcaaaaaccgctcagctacatggaaactgaacagctcctgaatgactactgggtacataatgaaatgaaggcagaaataaagatgttctttgaaaccaatgagaacaaagacacaacataccagaatctctgggatacatttaaagcagtgtgtagagggaaatttatagcactaaatgcccacaagagaaagcaggaaagatctaaaattgacaccctaatgtcacaattaaaagagctagagaagcaagagcaaacacattcaaaagttagcagaagaccaataacagggctctgaaattgaggcaataattaatagctttaccaacccaaaaagagtcccaggaccagatggattcgacgagccgaatttctaccagaggtacaagcaggagctggtaccattccttctgaaactattccaatcaatagaaaaagatggaatcctccctaactaattttatgaggccagcattatcctgataccaaagcctggcagaggcacaacaaaaaaaaagagaattttagaccaatatccctgatgaacatcgatgcaaaaatcctcaataaaatactggcaaaccgaatccagcagcacatcaagaagcttctccaccatgatcaagtgggcttcatccctgggatgcaaggctggttcaacatatgcaaatcaataaatgtaattcagcatataaacagaaccagtgacaaaaaccatacgattatctcaatagatgcggaaaaggccttcaacaaaattcaacagctgttcatgctaaaaactctcaataaactaggtaccaatgggatgtatctcaaaatagtaagagctatttatgacaaacccacagccaatatcatactgaatgggcaaaaactggaagcattccctttgaaaactggcacaagacagggatgccctctctcaccactcctattcaacatagtattggaagttctggccagggcaatcaggcaggagaaagaaatacagggtattcaattaggaaaagaggaagtcaaattgtccctgtttgcagatgacatgattgtatacttagaaaaccccattgtctcagcccaaaacctccttaagctgataagcaacttcagcaaagtctcaggatacaaaatcaatctgcaaaaatcacaagcattcttatacaccaataacagacaaacagagagtcaaatcatgagtgaactcccattcacaactgcttcaaagagaataaaatacctaggaatccaacttacaagggatgtgaaggacctcttcaaggagaactacaaaccactgctcaatgaaataaaagaggacacaaacaaatggaggaacattccatgctcatgggtaggaagaatcaatatcgtgaaaatggccatactgcccaaggtaacttatagattcaatgccatccccatcaagctaccaatgactttcttcacagaattggaaaaaactattttaaagttcagatggaaccaaaaaagagcccacattgccaagacaatcctaagtcaaaagaacaaagctggaggcatcagactacctgacttcaaactattttacaaggctacagtaacaaaaacagcacggtactggtacgaaaacagagatatagaccaatggaacagaacagagcccctggaaataatgccacacatctacaaccatctgatctttgacaaacctgacaaaaacaagcaatggggaaaggattccctatttaataaatggtgctgggaaaactggctagccatatgtagaaagctgaaactggaccccttccttacatcttatacaaaaattaattcaagatggattgaagacttaaatgttagacctaaaaccatagaaaccctagaagaaaacctaggcaataccattcaggacataggcatgggcgaagactttatgactgaaacaccaaaagcaatggcaacaaaagcccaaattgacaaatgggatctaattaaactaaagagcttgtgcactgcaaaagaaactaccatcagagtgaacaggcaacctacagaatgggagaaactttttatagtctacccatctgacaaaggcctaatatccagaatctacaaagaacttaaacaaatttacaagaaaaaatcaaaccaccccatcgaaaagtag

SEQ ID NO: 14030 - DNA, 3350 bp, Homo sapiens
  SIMILAR (13)..(2082): 761254mologous to Rattus norvegicus dendrin,accession number X96589,Smith-Waterman Score=2703.
tgaggaggaagatggcggccggcaagagcggcggtagcgcaagggagattacttttctggaagctttggctagatcagagtctaagagagatggaggttttaaaaataattggagctttgatcatgaagaagaaagtgaaggagatacagataaagatgggacaaatctgctcagtgtggatgaagatgaggattctgaaacctcaaaaggaaaaaagttaaatcgtcgatctgaaattgttgctaatagctctggtgaattcatcttgaagacatatgtaagacgaaacaagtctgaaagttttaaaactttgaaaggcaacccaattggacttaacatgttgagcaacaataagaaattgagtgaaaatatgcaaaatacgtcattatgttctggaactgtagttcatggtagacgttttcatcatgctcatgcacagataccagtagtaaaaacagcagcccaaagcagtctggaccgaaaagaaaggaaagaatacccacctcatgtccaaaaagttgaaattaatcctgtaaggttaagtcggctccaaggtgttgaacgtataatgaagaaaacagaagagtccgaatcacaagtggagcctgaaattaagaggaaagtacaacagaaacggcactgtagtacctatcagcctactcctcctctatctcctgcttcaaaaaaatgtttaacccatttagaggatttgcaaagaaattgcagacaagctattactttgaatgagtctactggaccattattaagaacgtcaattcatcagaattctggaggacagaagtcacaaaacacaggattaacaaccaagaagttttatggcaacaatgtggaaaaggttccaattgatattattgtgaattgtgatgacagtaaacacacttatttacagactaatggaaaagtcattttacctggggcaaaaatacccaaaatcacaaacttgaaagaaaggaaaacaagtttgtcagacctaaatgatccaatcattttgtccagtgatgatgatgatgacaacgacagaactaacagaagagaaagcatatctcctcagcctgctgattcagcatgttcttcccctgcaccatccactggaaaagtagaagcagcactaaatgaaaatacttgcagagcagagcgtgaactacgaagcattccagaagactcagagttaaatacagttacattgccaagaaaagcaagaatgaaagaccagtttggcaattctattatcaacacacctctgaaacgtcgtaaagtgttttctcaagaacctccagatgctttagctttaagctgccaaagttcctttgacagtgtcattttaaactgtcgaagtatacgagtaggaacactcttccggctgttaatagagcctgtaattttttgtttagattttatcaagatacagctagacgaaccagaccatgatcctgtagagattatattaaatacctctgatctaactaaatgtgaatggtgtaatgtccgaaaattacctgtagtgtttcttcaagcaattccagcagtttatcaaaagctgagcatccaactgcaaatgaataaggaggataaagtttggaatgattgtaaaggagtaaataaattaacaaatttagaagaacaatatataattttaatttttcaaaatggccttgatcctccggcaaatatggtatttgaaagtatcattaatgaaattggtataaagaataacatctccaatttttttgcgaaaattccctttgaagaagctaatggcagacttgttgcctgtacaagaacctatgaagagagcatcaaaggaagttgtgggcaaaaggaaaacaaaattaaaactgtatcatttgaatctaaaatacaacttagaagcaaacaagaatttcagttttttgatgaagaagaagaaactggagaaaaccacaccatcttcattggcccagtagaaaagttgatagtatatccaccacctccagctaagggaggcatctctgttaccaatgaggacctgcactgtctaaatgaaggagaatttttaaatgatgttattatagacttttatttgaaatacttggtgcttgaaaaactgaagaaggaagacgctgaccgaattcatatattcagttcttttttctataaacgccttaatcagagagagaggagaaatcatgaaacaactaatctgtcaatacagcaaaaacggcatgggagagtaaaaacatggacccggcacgtagatatttttgagaaggattttatttttgtaccccttaatgaagctgcacactggtttttggctgttgtttgtttccccggtttggaaaaaccaaagtatgaacctaatcctcattaccatgaaaatgctgtcatacagaaatgttcaactgtagaggacagttgtatttcttcttcagccagtgaaatggagagttgttcacaaaactcttctgccaagcctgtaattaagaagatgctaaacaaaaaacattgcatagctgtaattgattccaatcctgggcaggaagaaagtgaccctcgttataagagaaacatatgcagtgtaaaatacagtgtgaaaaaaataaatcatactgcgagtgaaaatgaagaattcaataaaggagaatctacatcccagaaagttgctgataggactaaaagtgagaatggcctacagaatgaaagtttaagttccacacatcatacagatggcttaagcaaaatcagactaaactatagcgatgaatcacctgaagctggtaaaatgcttgaagatgaactcgtcgacttctcagaagatcaggataaccaggatgatagcagtgacgatggattcctcgctgatgacaactgcagttcagaaataggacagtggcatttaaagcctactatctgtaaacaaccttgtatcctacttatggactcactccgaggcccttctcggtcaaatgttgtcaaaattttaagagagtatttagaagtggaatgggaagttaaaaaaggaagcaaaagaagtttttccaaagatgttatgaagggctctaatccaaaagtaccacagcaaaacaacttcagtgactgtggtgtatatgtattgcagtatgtagagagcttttttgagaatccaattctcagttttgaactacctatgaatttggcaaactggtttcctccaccaagaatgagaacaaaaagagaagaaatccgaaacataattctgaagctacaggaagatcagagcaaagagaaaagaaagcataaggacacttactcaacagaagcacctttaggcgaaggaacagaacaatgtgtcaatagtatctcagattga

SEQ ID NO: 14031 - DNA, 1110 bp, Homo sapiens
  SIMILAR (930)..(1133): 561254mologous to Homo sapiens adipocyte-derived leucine aminopeptidase,accession number AF106037,Smith-Waterman Score=156.
atggggagttatggaccgagaggaaccgttttcgtgaagcgccgtcgtcatcgtcggcggtctcgttcccccggcccgtctgaacgtgggagcgcagcccgcctgacggctgagcccgaggcccgcaaccctgcggcgtctaccctcctccggcgcggcccctcatcccggcgagcacggcggcggtgtgggccatggattaagaaggaggcggcgtgggaggaggaagatggcggccggcaagagcggcggctcgggcaggacctacgaacccgtaccctcaacaagtctaaaggcggcatcgactcgagaattatatccctaggacagcacagtcaccccacccacgcaaagctttggctagatcagagtctaagagagatggaggttttaaaaataattggagctttgatcatgaagaagaaagtgaaggagatacagataaagagccgggcccgctcgacgcccctccacgaccaaatcgggaccacgagccccagggaaaggactatagcgtcgaagcgtcacccctactacattacaccaaagggcatacgttacgaacaagatacactatcacgaacgccaatcacgactatccggtcgaggcagcgcccgctaggccctcttaccgctagcccgcccccttctttccccacgctcgcgcccccgacgcaagccattaagccgagtttacatctaagggaaggaaaacctactcccactcccggagaaaggagcacacgtccacaccacccggaacctcctcgcaaggaatacgcgctttcctccctttacccacccacctacctactcgcccccactagcacggacctggggaacgcccaccccacccaggagccacaatttaacgttgacgccacccacccccgtcaaaaccgctttatcccggttgccgggaactcccctaagcggtcctcgcaattcccgatagttttcgccccaaaaaaaaacacgacccctccgtacctcgatttcgcagccatattaggcctacaccggcgccccccccgttctcggttcagaactagctacccccccaaggaatttcggtcttccccaccagagagaacggcacccagaaattaa

SEQ ID NO: 14032 - DNA, 297 bp, Homo sapiens
  SIMILAR (41)..(115): 881254mologous to Homo sapiens ribosomal protein L7,accession number L16558,Smith-Waterman Score=112.
agtgcaaaagtcagtattatgctcttttcaggctggaaccatggagggtgtcgaagagaagaaggttcctgctgtgccagaaacccttaagaaaaagcgaaggaattttgcagatgctattcaatttctccaaactgtgtttcttgctttttagtataccctgctgaaaggtagacaggatgtactggctagtagaagaataacaccaattctataaaatttcttacagaaaaaaaatggtacaacgtatcagacagcatccacagagctgcactgtccaaaagagctggtggccac

SEQ ID NO: 14033 - DNA, 755 bp, Homo sapiens
  SIMILAR (9)..(365): 1001254mologous to Homo sapiens ribosomal protein L7,accession number L16558,Smith-Waterman Score=598.
ctggaaccatggagggtgtagaagagaagaagaaggaggttcctgctgtgccagaaacccttaagaaaaagcgaaggaatttcgcagagctgaagatcaagcgcctgagaaagaagtttgcccaaaagatgcttcgaaaggcaaggaggaagcttatctatgaaaaagcaaagcactatcacaaggaatataggcagatgtacagaactgaaattcgaatggcgaggatggcaagaaaagctggcaacttctatgtacctgcagaacccaaattggcgtttgtcatcagaatcagaggtatcaatggagtgagcccaaaggttcgaaaggtgttgcagcttcttcgccttcgtcaaatcttcaatgtgaaccttttgtgaagctcaacaaggcttcgattaacatgctgaggattgtagaaccatatattgcataggagtacccaaatctgaagtcagtaaatgaactaatctacaagcatggttatggcaaaatcaataagaagtgagttgctctgacagacaacactttgattgctcgacctcttggtaaatatggcatcacctgcatggaggatctgatcatgagatctatactgttggaaaatgcttcaaagaagcaaataacttcctgtggcccttcaaattatcttctgcattaagtggaatgaagaaaaaactacacattttgtagaaggtggagatggtggcaacagggtggaccagatcaacacgcttaatagaagaatgaactaa

SEQ ID NO: 14034 - DNA, 388 bp, Homo sapiens
  SIMILAR (97)..(363): 541254mologous to Homo sapiens PRO2221,accession number AF116695,Smith-Waterman Score=222.
atggctgaacaagaacagctctggtctgcagctcccagcatgatcaacgcagaaggtcaccaacatcaaagaccaaaggtagataaatcaacgaagatgaggaaaaaccagtgtaaaaaggctgagaattcaaaaaaccagaatgcctcttctcctccaaaggatcacaagaatgagtttgatgaattgacaaaagtaggcttcagaaggtgggtaataacaaactcctccaagctaaaggagcatgttctaacccaatgcaaggaagctaagaaccctgaaaacaggttagaggaattgctaactagaataaccagtttagagaagaacataaatgacctgatggagctgaaaaacacagcacgagaatttcgtgaagcatacacaa

SEQ ID NO: 14035 - DNA, 1145 bp, Homo sapiens
  SIMILAR (1587)..(667): 991254mologous to Cloning vector pBACe3.6 levansucrase,accession number U80929,Smith-Waterman Score=1600.
atgacaaggaactacgagtggcttctggaagctgaaagcagtccccagccaatagctttccagaaaatggagccccagccctacaactccaaggaactgaattctgccaacaaccagtgtcttctagagaaacccaagctaagacagagactaaaggacaaggaatatgaccaaggtcacactgctgttcaatgccaaagctgggtctatgtgctgactcctgactccttctgccaacagctcattctactgcccagcacagagaactttcatgaatgtagcagaagtgacactgcaggacatctgaggacaggccatgtggcttccaactggctctcagaacactcaccccaaacaatgccagctgccatgcaatgggacaaaaagatgcagaatacatcatcttggttcccccagaaggccccagaaaaagtcaaaccaatgagcaaactgtggcagactccttcccagaatgacaccctctacaaggctgtaaaagcgctgacattgtcctccccagaaaggaatagcatcaacaccaacaaaaaggatgtccacacagaaacttcatccaaaggtcaccaacatcaaagaccaaaggtagataaatccatgaagatgaggaaaaaccagcacaaaaaggctgaaaattcccaaaaccagaatgcctcttctcctccaaggaatcacaactcttcaccagcaagggaacgaaactggtcggagaatgagtttgacgaattgacagaagtagtcttcagaaggtgggtaataacaaactcctccgagctaaaggagcatgttctaacccaatgcaaggaagctaagaaccttgaaaaaaggttagaggagttgctaactagaataaccggtttagagatcaatcaagcagaagaaaggatatcagagactgaagatcaacttaatgaaataaagcatgaagacaagattagagaaaaaagaatgaaaaggaatgaacaaatcctccaagaaatatgggcctatgtgaaaaagaccaaaactacgtttgattggtgtacctgaaaatgacagggagaatggaaacaagttggaaaacacacttcaggatactattcaggaaaacttccccgaactagcaagataggccaacattcaaattcagg

SEQ ID NO: 14036 - DNA, 665 bp, Homo sapiens; identical to SEQ ID NO: 727
  misc_feature (1)...(665): n = a,t,c or g

SEQ ID NO: 14037 - DNA, 1308 bp, Homo sapiens; identical to SEQ ID NO: 728
  SIMILAR (799)..(1428): 1001254mologous to unidentified cloning vector 29kD protein essential for the replication of mini F plasmid,accession number AB015619,Smith-Waterman Score=1098.

SEQ ID NO: 14038 - DNA, 555 bp, Homo sapiens
  SIMILAR (459)..(1172): 971254mologous to Escherichia coli Excinuclease ABC subunit C,accession number D90832,Smith-Waterman Score=1171.
aatttgcttcccggccaagaatttttccccaaaggaggggcgccccccggtttgttcttcaaaaaagatgcccttccttgaataaccctttcgtcccccccccattcttttatcggacacaaaaccccagcgagtggtcccccgcaaaagatcccaccccagccaagtcaagtaaacagtggggcgaccccacccccgtggaggcgtgctcgtttcgtgccccacccagggatttatatcgccgacccgtggggggcccccctgcaagcacgaatccctcgttgtgcctctggttgggaccccccggagaaaccagcccggcggtcatatccagcacagccagcgctgggcccccgtcctgacctgagcggttaccaccccccaccctgtaaactaggcggctgcagcaagcagaccttcgcatcaacacagcagacaccaaaaaccagtggagccccgctctctaccgcccggccccagcactcgctagctttcctgacacctggaactgtgcacctggcaccaagcggaaaataaactccaagcagccagtaa

SEQ ID NO: 14039 - DNA, 2663 bp, Homo sapiens
  SIMILAR (307)..(1170): 1001254mologous to Homo sapiens chromosome 22 open reading frame 4,accession number BC002743,Smith-Waterman Score=1544.
gcccgctgcagctgctcacgttgcctggcctgggccccaccctgcagaacgtggcccaggcctcgcctggctccagcacaattgtgacagtgcccgcaggggctgcccccgggcctgaggagcacacggccaccattgaggtggctgccatggcagaggaccacgagcggaagtagccgacaggagggcgaggcccctgggacggacagggctggctgtctctcagccgcggcagcagggagcgggcagaggccgcagggctggctcgggcaggtgggtcacgtggtctgcagaaccaaagagaggaatcgccaaaacaaatcacgagaagagagaaggggacagaacagcgagagcaacctggaaaaccggtcttcaggtcccacgtttcctcccccttttttcttgggaaatatatttttccatctgttgcttattaatactgtttacacattgggccttgatcaggagccaggtgggcgggggctagggggagcctgggtgcagcagagacagaggaagcagagccaggtgccgagcgcgaccctgcaggtgctggacgcggtgcagcaggtcacgaggcccccatgtctgcacccagccaggtccctggggacgttactaactcatgacttgggagctaagcccaagtgtgaaacctctggatcctatggatttggtttcttcccacagttttctgtaggtttagtgtggctggcgccccgttctcctccagttgggaacatgcacccggagcttggggtgcagatcctgatgggtgcctgcctcccccgcccccagccggtgctcaggtggcccaggggccgcacagacgaggcgtggtccaggcattgttgcacatgtactgagggtgtttttaagtgaattgcttagtaggcttctaggaagagtcagatttatagcattttcaaccaaaataatggtgagtgcctaggcttcccgagttagctctttgggtggcccctgagcccctgtgagtgcacttgaccgggtgcggaggtcctgggcagcctgtccctgagccggcccctcccaggggtctgagatccatgaggtgtgtccctagggcttcagtcctggggcagaggcataaacagaaccagtcactatggaggtcgaggattcccatgtgggcccttcagcttgggctgcttggccacggaacagcccttggctccctggcccccggcccccatgcagcccctgggctggcccttggtggtctctgtccaagggagagcccctgggtgttcaggaggctgccccgggtgggctgctcagggcagctgccgaaggtggagcccagagcctgtctggaagggctgtctgtggctgtcctgagacctggccttggactcacaaggaagaccaggctgaggcccctccaggccagggtcctggggcaggcatctcagggagcagccagcccaggcctcctgccgtctccaacagggcatgtcccgggaggaccctgagtgccagattcccctggacgctcctgctgattctgtcggcagttgaaggcccgtctgaggccccgcaatgcgagggtcctgtgtcccacttcactgctccgaagggaactggctggctgtccgtccagtgagcggcccagaccccacctctgcgccattgtcaccagggccctgtcctggctgccctcacccatgtcaagctactgaggctgtgtcttgtttgttttctctgttacatttttgtttgctgttgtcacagtcagctggtttcggcgtgatgttgaccttttgatgtacatactccgttttaaactcatttccactctagttgagttctgcagcatgcagcggtatgaccctacgggggtcaggagagccctgcggcccccacccaccagctcagaacctgtcactaatacagctgcctgtgaccctgggacccgcaaccttccagctgcttccctttgtcaaagtcacgagtgcgtctgccttgacagccctcgtcaacagaacttccagtgggttgtgggttcatttcctttctttttaagaacagggttgggaccttttctgcccctgccccttagctactgaggcatagggagaggaagttaatttcagagccatacaaaaataagccacaaccagcttcagaattaattcccaatcccccattccaccagggctgggagcccattcccagtgcttcccaaggccctcggggacatctaccgccaacccagctgcttctggcaggggctccaagccccagcgtggggaagggccctggagaagccctcatcctcatgggaaccacactgcagtgggtggggaaggttgttgtcagcaccgcccccggctcctccaggtcctgctggctcctcgggggcagggttccctggacctcccagttctgcgccttggggccagccagtactcagagaggaggaccttctcaaccacgtacagaacacgggttttcatggctgcctttggtttggttttctgagaagataggattggattggattttgcagagggtgagaacttctctgtgcctgctcagaggcgccctagggaagggccatgtttgagttttgctttgtatgttgttttgcaagtatctgcctggtactttgatttaaaataaaaacaattttcatagtt

SEQ ID NO: 14040 - DNA, 1042 bp, Homo sapiens
  SIMILAR (145)..(300): 1001254mologous to Escherichia coli extragenic suppressor,accession number M34828,Smith-Waterman Score=262.
catcggggctactggctgcttggagtttattttccgcttggtgccaggtgcacagttccaggtgtcaggaaagctagcgagtgctggggccgggcggtagagagcggggctctcactggtttttggtgtctgctgtgttgatgcgaaggtctgcttgctgcagccgcagcacacggccaacacgctcacacgggctgagtgtgacaccacgggacagagttccacgtacacacagcacacggccaacaacacgctcacacgggctgagtgtgagaccacgggacagagttccacgtacacacagcacacggccaacaacacgctcacacgggctgagtgtgagaccacgggagagagttccacgtcctcctcacccagcgtccctgccagtgggttccatggccccccagtgccagcctgccgtctgctgccctctgccgtctgccatcacctgaaccctgcaggaaaacgtacacactgtccccagcgtcacgaagcagaccctatcacctcctccactcaaggtgtgagcttttggctgagacacccgccggttcacagcagccccattcccagcagccccagactgaaaacagctccaatgcgtatcaccaggcggctgaataaacaaaccgtggaacgtctgtacgacacaacactactcagacaaaaccaaaaccgaacacgtccgacccacacagaagcatggaggaatctcagaaacagttcagtgaaagaggccaaacacagacgagtattaaatgtgcggttccgtttctatgaagctcaggaacagacgaattctaaaaaccagacaaaagatctgaagagtcacctcaccagagacagagagaaggcaaagcagcagcttgtgaaagggtgcttcccatcacacatcattaggaaatctgcaaacccaaacaagaccaccaagggccagcccaggggctgcatgggggccgggggccagggagccaagggctgttccgtggccaagcagcccaagctgaagggcccacatgggaatcctcgacctccatag

SEQ ID NO: 14041 - DNA, 583 bp, Homo sapiens
  SIMILAR (576)..(217): 361254mologous to Mus musculus formin, isoform IV,accession number X62379,Smith-Waterman Score=149.
tttggaacctcgggccacacagctcaggcacacaccatcggggctactggcctgcttggaagtttaattttccggcttggttgcccaggtgcacaggttccaggtgtcaggaaaagcttagcgagtgctggggccgggccggtaggagagcggggctctcactgggtttttggtgtcttcctgtgtggatgcgaaaggtctgctttgctgcagccgccctaagttaacagggtggggggtgggaggtggggaggggggcgagggatgcggagtggggagaggggcggggaggggctctggtggactagcgcctccgcaggccgtggggctcggtggtaaccgctcaggtcaggacgggggcccagcgctgtgctgtggtggactgatccgccgtgcttgctcctcgcgggatgccgaggcagtccaaaagggggcatgctgcgtgaaggcctgggcagtttcccgattgtctgcgggtggcagatacttggtgcttgagtggatcgtgctgttccgaaaaagaagtggcccccgaatgtgccgggtatcctttgtgaaacctgggggtgcgaatgtcctcccc

SEQ ID NO: 14042 - DNA, 2330 bp, Homo sapiens
  SIMILAR (14)..(1462): 1001254mologous to Homo sapiens enamelysin,accession number Y12779,Smith-Waterman Score=2584.
aattcatagttccttcctgtggagaagggtctgaaatgggaatcagtggtagaaggggctggtctcctgggcagggcttacatccactgagtcctaagattcctttcctgatctgcacctacgcctggtctgtatggtggaatttgtcagctggaactcagaaacaacaacttgaaaaaaataataataattagaacatatttgcataagatagctatttactctggaaaccaacaacttttgagatttcccttgccctgtggacgcccagctcctgtcatccttccttaggtcctgcagtacagtcttcccctgaatgccaccggggacccagggggactccacccccctaaagcaagcacacacatacttcacagttgatgagttgctgggtcttttgagtcccagctcataaaaccctccctttactccaccaagcccgacgacccattgacttgaggaaggggatttctacaagtctcaggattttagaaagtctgtaaagccatccatgcttccagaaagcaccgatctgttgtagttgcaaaaacaactctgtaatttgttggagggtctcaaactgacagcccagccgagacttgggtgggaagcccctggatctgttctccctgacttgcgggggggagcagccactaaggactttatcaggaagcccacatggaggctcccccaggcttggggccacctggtgaagggcccttttgctcctggcagcctgaggcacagctgcctgtattgtcctcatctgttctgactgaaggatggaggtgctgaataaattaggcctcaggcctctaccaccagagagctggagaatgggttccacgtcatttcaagggactggaattttttatgttcagggagcattgggaatcttcttctttccagggaggaatttagccctgcaaggttaggacttgaagagggaaggtatttaataactgggcgaggatgggtgtggtggctcacacctgtaatcccagcattttgggaggctgaggtggccagatcccaaggtcagaagatcgagaccatcctggctaacatggtgaaaccccatctctactaaaaatacaaaaaaaaattagccgggggtgtgtggcgggtacctgtagtcctagctacttgggaggctgaggcaggagaatggcgtgaacctgggaggtggagtttgcagtgagctgagatcgtgccactgcactccagcctggccgacagagcaagactcttgtctcaaaaaaatatagaattaaactaaattaaaaaataaatggaaccacccagcccatcccctacccacctgtcctgcattttttttctccttatcactgtctcaccactagaggccagctccaccagggcaagggtttttccctgcctgccacttgtatgccgagtgtccagaacaaagcctagcacaaggaaaagaaaaaagccatccaggaggaggaggagagagaccaggccttgcaggccaaggcgagcctgaccatcccgctggtgccccgaaacggaagatgaccgcaagctggcggctctgctgaagttccacaccctggactcctacgaggacaagcagaaactcaagcggaccgagatcatcaagccgttctggtttcccttttgcccccggatccgcctccagcaagcaaggtcagcggcgtcctgaagaagctggcacagagccgcagaaccgcgcttgccacctcccccatcaccgtcggggacctgggcatcgtgcggcggaggtctcgggacgtcccggcagagcccccagcatgcggccgacacccccaagtcttgggaaccgggggtaccagaggaggctgcccaggaccggcccatgtccccccggagactgtcctccggaaaacaaactgagaccccccaagtgcagccaacccgaggggccaggaagggagccgtcaggacaagcccccttttcgccagcaggctcctcccaggaggcagctgacaccccccgacacgcggccacccctgcagtctcggctcctcccttcgtggcgggactactccgactcggagagtgacttgagcgatccccatcctggagactggacccgctctagaggcccggacacacccaggaggcccctcacagactgcagacccccggctcgcccaccagccctgggagagctcagatgccgcatccttccccagaccgcgccttcctgcaaccgtggagttatttatttggtcctggtgagggtgtttgtgccttgtgagactccggtacattaaagacctgtctcttcttccctgtcaaaaaaaaaaaaaaaaaaacc

SEQ ID NO: 14043 - DNA, 780 bp, Homo sapiens
  SIMILAR (35)..(412): 881254mologous to Homo sapiens neurotrimin,accession number AF126426,Smith-Waterman Score=556.
attgtctccacccgcaatcatggtgagcctagagagatagcgcgaacgataaagacaatagtgtcagcacactcgcagaagcggactcgcagcaactacacggttctgaagcaaaaacacctggatgattgcctgcgacatgtatctgtaagaagatttgaatcatttaatctgttttcagtaacagaaggcaaagaaagggaaactgaagaggagcaaacagaacagctttccaggtctcaagaaaacagtcccctcgcagttggtccagtattgcccaagtttttaaatatcctggaagccaatggtgtaccaaaaggtaccggcatgaccccgtccaccccgcaccccggaccaccaccccgaccccggccccgcgccccacccgcgccaacaccacccgccgccgcgctcacccgacgccgagcccgcccaaccaccccgacacgacgccgcccaccaacgcaaccacccgacccacacccaaaacgacccccaccacacagcaagccacacccaccccagcaaccacccacaccacccacggcaacccccaccgaacaacaacgccacaccgccccacccacgccccgcccacccacaacacaccccccaagcacccccaaacacccagcacacccacaccgcgccgccacccacaaagaacacaaaaccacccacccctcaacgcacaacacaagacaaaggacgacaaaaaaaaccaagacggcaaccacaccacagcgagccaaacaagaaaagcccaaaagcacacattga

SEQ ID NO: 14044 - DNA, 1128 bp, Homo sapiens
  SIMILAR (523)..(786): 711254mologous to Mus musculus Pro-Pol-dUTPase polyprotein,accession number Y12713,Smith-Waterman Score=318.
atggcagcagaccacatacacaccacgcttcacacaccgcgacacgtacccacagcacggagaccaaacagggacacaaccacgtgtagcacccccgaacatacatatagatgcgccaatatattaccaacaacaaccaaaacgacaaacaagacaaaacacacagcgaccacaacgagtaaaaccaccccaactcacaaacaccccacacacacgcgagctgcagaccccccaacacacacccaccaagacaaccacaaagcaaccaccacaccaatacgacgaccacaccacacaagcacacccaacaaacacatatacaactcaatcacaacctaccagcaaacgcacaataacacacacagacacaatcatacgaaacacgacaacgaaacacacagccctacacaagcaacctcacacaagcaaacaaacaagatcaacaacacaccaacacaacacacaacaatcacagacccatacactgcactagcaagtccagcactcacagctaagcgaacacagagcgcatacaatgaacacatcgcagcgatcacgcatctcagcgtcgaacgatctcgagcgacagaacatgagctcagccagcgccgcaaacacgagcatcacacagaccgagcacacaccgacaacaacgaacacactatcagggtcgtccgaggagcgcagtacaccagcaacaaggagcacaaggaacaattgtcacgcgcgggcaaaggctcagacgcacaccgccagggccccacgacaaaagcacaccccccaaaaagagacaaaaacgccctaagtgggaaaaaacaccacaacacagttaaacacattcaatatggggacaaagccggccagggtacctcagcacccccagaggcctcacccacagctgcccagagtcctctacatccttcccgcctgcccccacctcaggcatgtccatcccccacctgccgccagagaggacaagagcccatcagaggaatccgccccacgacgtccccagagtctgtgtcagggctttgctgcttccccacagtgacgggctctgagtatgagacgatgctgacggagatcatgtcatgggctatgagcgagagcgggtcgtggccgccctga

SEQ ID NO: 14045 - DNA, 944 bp, Homo sapiens
  SIMILAR (586)..(699): 941254mologous to Homo sapiens Human protein SEQ ID NO:4,accession number Y57602,Smith-Waterman Score=180.
cccacgcgtccgcgctaagatggcggcggcgtgagttgcatgttgtgtgaggatcccggggccgccgcgtcgctcgggccccgccattggccggtcaccatcacggtcaaaaccgctgcagcagcagaccttcaagatccgcatggagcctgacgagacggtgaaggtgctaaaggagaagatagaagctgagaagggtccgtgatgccttccccgtggctggacagaaactcatctatgccggcaagatcttgagtgacgatgtccctatcagggactatcgcatcgatgagaagaactttgtggtcgtcatggtgaccaagaccaaagccggccagggtacctcagcacccccagaggccttcacccacagcttgccccagagtcctcttacatccttccccgcctgcccccacctcagggcattgttccccatcccccaccttgccgccagagaggggacaagagcccatcagaggaatccgcccccacgacgtccccagagtctgtgtcaggctctgttccctcttcaggtagcagcgggcgagaggaagacgcggcctccacgctagtgacgggctctgagtatgagacgatgctgacggagatcatgtccatgggctatgagcgagagcgggtcgtggccgccctgagagccagctacaacaacccccaccgagccgtggagtatctgctcacgggaattcctgggagccccgagccggaacacggttctttccaggagagccaggtatcggagcagccggccacggaagcagcaggagagaaccccctgggagttcctgcgggaccagccccagttccagaacatgcggcaggtgatttcagcagaaccctgcgctgctgcccgccctgctccagcagctgggccaggagaaccctcagcttttacagcaaatcagccggcaccaggagcagttcat

SEQ ID NO: 14046 - DNA, 428 bp, Homo sapiens
  SIMILAR (282)..(431): 901254mologous to Homo sapiens putative taste receptor HTR2,accession number AF073924,Smith-Waterman Score=257.
ggaattccttgattccctgccccgcaagcccagcaccggttttgccgccttgtctcgaagggtcaaccatgccatctcctgcctcgggacggagagcgccctggaaaaggcggaggggccggtgaggagcagggcttccctcgcttcggggctttgagcttccctgtgaccgtcatttccttgtagcgtataattgggttggccattaataattgctcgataactgcataatggtgaaacctggtaccactcaaatgcaactttcttgctcgttttcacaagtcgatgttatcgaaatgaagcacttttctctgaattggtgtgggttttggaatgatttttgcagagatagtcacgaccttagtcacacaagagcgatggcaagattttcacccaagccatctgacttggaacccatggattaacca

SEQ ID NO: 14047 - DNA, 1455 bp, Homo sapiens
  SIMILAR (234)..(389): 881254mologous to Homo sapiens putative taste receptor HTR2,accession number AF073924,Smith-Waterman Score=265.
atggaaaaaatcacctggatacgtaaaacaaaaagggaggtacctgcagcttctcagaacagccctcagaaaagtaatggcctcactctcaactcagctgacaaacctggtaactgcaggctacagccttctgctaaacaagaaaacaaatccctggcaatgagcagctgtcaggaactcgggacactttcccagcccaattcacagaaggaaggccagaagcttaacccagtagtgtctgagtacctgcttggcaaagccttctacggccaaaatgaaaaccctgaatccactaccaggtgctctaggcctagttgtctgctgacttcagccacccaactgaaggcccaatccatgccttcaaaggtgcctgtccctgcatggatcggctggcttcttgtgggccacaaaccacgcacaccttctcagcaagctactgaacgatgggctcccccaagacaaggaaatcaaccaagaaaggaggggcactggatccagaaacgagacaagagaaggggagagggaattccaaggctgaaggggaagcagagccagggaaaagggatgcgcccaggagaaacgtggaaccgttgcgagtacctggggctacgaatgcaaattccccccgagacgcccctgagcctccgacctccagaccccaattcggttcgaacggtccctcagcccgaaacacggttggatcacaaccggccgatgtcccggcccatcttcccagttcccctggctcgccgcacggaactcccaggggctgcgccggcgggcgagccgagggctccccatcgccccgaccccgccgccttcgggtctccggcagggggtccccggcgcagctgcccccgacctaccagctcctcggctaccatcggggtgcgggatgcggagtccgcgcgccgccgccggcccccggctgtgccccgcggcccggcccgcagcgccgcgcttccgcagctcccccacgtgctagcccaggcggagagccgtcatctctccggtgcccgggagaggggccgggcgggacggtacagcaaccggaggaaccttgattccctgccccgcaagcccagcaccggttttgccgccttgtctcgaagggtcaaccaggccatctcctgcctcgggacggagagcgccctggaaaaggcggaggggccgaccttagtcacacaagagcgatggcaagattttcacccaagccatctgacttggaacccatggattaaccaactgccactggaggcaaatccagagaccaagggagcagtttatacagaaacagatgccggcattaacccacagggagttattgttacagactgaagaatagaaaaagaaaaagccaaatagagccttattccacccagcttagcttccatagaacattgtgaatgaaagagtagattcttgaaaaaaatctgggggtaaccaagttttcat

SEQ ID NO: 14048 - DNA, 393 bp, Homo sapiens
  SIMILAR (264)..(392): 881254mologous to Homo sapiens Human membrane channel protein -5 (MECHP-5),accession number Y70455,Smith-Waterman Score=186.
tgagccccagctgggggtggaagctgagccagggacagtcacagaggaacaagatcaagatgcgctttaactgagaagcccccaaggcagaggctgagaatcagaagacatttcagcagacatctacaaatctgaaggacaaaacatggttcaagcatctgggcacaggcgcaaagatccaggaaatatggtgcgaggaagatgagaggaagatggcgcgagagttcctggccgagttcatgagcacatatgtcatgatggagtggctgaccgggatgctccagctgtgtctcttcgccatcgtggaccaggagaacaacccagcactgccaggaacacacgcactggtgataggcatcctcgtggtcatcatcagggtgtaccatggcatga

SEQ ID NO: 14049 - DNA, 440 bp, Homo sapiens
  SIMILAR (338)..(183): 861254mologous to Homo sapiens aquaporin adipose,accession number AB006190,Smith-Waterman Score=206.
gggttctgggccagggtttttaaggggattgtggcgggtgaggttctggagaattggggttgtcaattgctcaggtcaaggaagattaaatcatcatgatgtgaaaactgcattcttctgtgagtcggctccttgctgggaccttcagatcaagtatttttctcaactatcatatgtatgttcatcatgacatatgtgctcatgaactcagccaggaactctcgctccatcttcctctcatcttcctcgcaccatatttcctggatctttgctatcacggaccaggagaccattttggagccacgggtggaccgcctgtgcccagatgcttgaaccatgttttgtccttcagatttgtagatgtctgctgaaatgtcttctgattctcagcctctgccttgggggcttctcagttaaagcgcatcttgatcttgttcctc

SEQ ID NO: 14050 - DNA, 389 bp, Homo sapiens
  SIMILAR (838)..(1260): 761254mologous to Homo sapiens Human G-protein coupled receptor GRIR-1,accession number Y28279,Smith-Waterman Score=503.
  misc_feature (1)...(389): n = a,t,c or g
gaagctgagccagggacagtcacagaggaacaagatcaagatgcgctttaactgagaagcccccaaggcagaggctgagaatcaaaagacatttcagcagacatctacaaatctgaaggacaaaacatggttcaagcatctgggcacaggcgaacatacatatgatagttgagaaagacacatattctgatcatgaagaaataaacacaagttaaatatgactaagcagaaagatggaaggaccaggaatggtgatgctaacttggaaccacgatgcaggctctaaactcctctacaatcatcctcccttgtgagaaaaatacgtaagtcacttttaaaataaatagaaacctgaacacnnnnnnnnnnnnngggggcggcctttttaa

SEQ ID NO: 14051 - DNA, 775 bp, Homo sapiens
  SIMILAR (358)..(519): 871254mologous to Homo sapiens Human membrane channel protein -5 (MECHP-5),accession number Y70455,Smith-Waterman Score=221.
acagacatagactactgagctctactttccagcctgctctctcccaccctactttttcccagaggcttgttggcaccgtggattgcactttcagctccccacctgtccgtctgcaaagtggcctcattggtgtgccatttttactggtccagtcccaactacaaggggcatggcttggccatctaccccagttcctctccatgtccccatggctctcaagtgtctccaattccagctgtcccagctgccccgggcaagaggaggcgtgtgtgggcgaggctgctgggttacctattaactcagctgggagttgaagagccgatgggcagcaggcagacttgagtctcctttctgtccatgggctcgggccactgtctcaggtccacccgtggctccaaaatggtctcctggtccgtgatagcaaagatccaggaaatatggtgcgaggaagatgagaggaagatggtgcgagagttcttggccgagttcatgagcacatatgtcatgatggtgagtgggtgggcagcacgaagtgggtggggctccaccagggctgtccatgaaccccctccccatgctgaccccatgggtcacattgtccattccttgcctctgagctgggagcctggggaagcagtgaggaaagtaaggagtgggggctttctcatcaagtctttttggacagaaagggctcataatatgtgggggtcaaatgaaaccatgcactggggtatccggggcacggctggaaatggggagaagggaaacccagagt

SEQ ID NO: 14052 - DNA, 789 bp, Homo sapiens
  SIMILAR (1286)..(1729): 841254mologous to Homo sapiens putative taste receptor HTR2,accession number AF073924,Smith-Waterman Score=635.
tttgaagatgctgtgattcgaactgtcagtgggataagggggcagatcaagagagcactctgagctccagaaggagctttccaggatagctttgaggataagctgcggatgagcgatatggtcttcatgcgaactttggtatcttgtttccatcccagccttctataacccagtaacatctttgttgaaaccagtgggtgagaaagacacctggtcaggaatgtggaccacgggccaactcaggctcgcccatggtgtcagactaaagacaacgaaggactctctgtataagaacatacatatgatagttgagacagacacatattctgatcatgaagaaataaacacaagttaaatatgactaagcagaaagatggaaggaccaggaatggtgatgctaacttggaaccacgatgcaggctctaaactcctctacaatcatcctcccttgtgagaaaaatacataagatctaaggcacatgagatgatatgctttgtgtttgagtttctcctttatgttacgcatactgataaaattgttgatgccagttgatctgaaggtcccagcaaggagccgactcacagaagaatgaagttttcacatcatgatgatttaatcttccttgacctgagcaattgacaaccccccaattctccagaacctcacccgccacaatccccttaaaaaccctggccccagaacccctcaagcagacagatgtgaagcttgaggattccttcatctctttgcccaatggcattgtgattattaaactctttttctgctgc

SEQ ID NO: 14053 - DNA, 618 bp, Homo sapiens
  SIMILAR (35)..(151): 791254mologous to Homo sapiens Human membrane channel protein -5 (MECHP-5),accession number Y70455,Smith-Waterman Score=145.
ggcacgagggcagacttgagtctcctttctgtccatgggctcgggccactgtatcaggtccacccgtggctccaaaatggtctcctggtccgtgatagcaaagatccaggaaatatgatgcgaggaagatgagaggaagatggcgcgagagtcccctggccgagtccatgagcacatatgtcatgatgaaccatacatatgatagttgaggaaagacacatattctgatcatgaagaaataaacacaagttaaatatgactaagcagaaagatgggaagggccccaggaatggtgatgctaacttgggaacccacgatgcaggctctaaactcctctacaatcatcctcccttgtgagaaaaatacttgatctgaaggtcccagcaaggagccgactcacagaagaatgaagttttcacatcatgatgatttaatcttccttgacctgagcaattgacaaccccaattctccagaacctcacccgccacaatccccttaaaaaccctggcccagaacccctcaagcagacagatgtgaagcttgaggattccttcatctctttgcccaatggcattgtgattattaaactctttttctgctgcaaaaaaaaaaaaaaa

SEQ ID NO: 14054 - DNA, 384 bp, Homo sapiens
  SIMILAR (229)..(348): 901254mologous to Homo sapiens Human PRO1298 (UNQ666) amino acid sequence SEQ ID NO:210,accession number Y99397,Smith-Waterman Score=182.
aatcactggacttgaagctttaaatgtttagcacacatctagcaaacgtctgtagccttctgtacaccaggcatatggtactgggtgagagtcttggggaataaaacagaatcagacattgcccatgaggagcccacagactagccagacggggtgggtgtctgtgttcttggtttggttgaagttgagttgacccctttatccgctgttgatttttgcttaggctaggtgtctgcctgtatcccagtgttcaggctggctagacggcggaagaagttcctatttgactgtcacttcccagatctgcttctcaccaagagagattctggtcttaatcgactatacagggtattgcagctcatggtgtagctctctcctcgtgcc

SEQ ID NO: 14055 - DNA, 505 bp, Homo sapiens
  SIMILAR (152)..(505): 1001254mologous to Homo sapiens Human PRO1298 (UNQ666) amino acid sequence SEQ ID NO:210,accession number Y99397,Smith-Waterman Score=615.
cctggcgctctacgtgctgttcctcgccgacgaggagttcgacgtggtagtgtgcgaccaggccatttgcatcccactgtccttgtgttcggagccaggccacaccgtcctcagcagtgtcatgtgttaaaaacgccaagctgaatatatcatgcccctattaaaacttgtacatggctccccattggtttttggagaaaagttcaagctttttaccttggtgtctgcctgtatcccagtgttcaggctggctagacggcggaagaagatcctattttactgtcacttcccagatctgcttctcaccaagagagattcttttcttaaacgactatacagggccccaattgactggatagaggaatacaccacaggcatggcagactgcatcttagtcaacagccagttcacagctgctgtttttaaggaaacattcaagtccctgtctcacatagaccctgatgtcctctatccatctctaaatgtcaccagctttgactcagtt

SEQ ID NO: 14056 - DNA, 1709 bp, Homo sapiens
  SIMILAR (325)..(1266): 981254mologous to Homo sapiens putative p150,accession number U93565,Smith-Waterman Score=1639.
gcggggtgcagttgcggctccagggccatggcggaggagcagggccgggaacgggactcggttcccaagccgtcggtgctgttcctccacccagacctgggcgtgggcggcgctgagcggctggtgttggacgcggcgctggcgctgcaggcgcgggggtgtagcgtgaagatctggacagcgcactacgacccgggccactgtttcgccgagagccgcgagctaccggtgcgctgtgccggggactggctcccgcgaggcctgggctggggcggccgcggcgccgccgtcttgcgcctacgtgcgcatggttttcctggcgctctacgtgctgttcctcgccgacgaggagttcgacgtggtagtgtgcgaccaggtgtctgcctgtatcccagtgttcaggctggctagacggcggaagaagatcctatttctactgtcacttcgcagatctgcttctcaccaagagagattcttttcttaaacgactatacagggccccaattgactggatagaggaatacaccacaggcatggcagactgcatcttagtcaacagccagttcacagctgctgtttttaaggaaacattcaagtccctgtctcacataggaccctgatgtcctctatccattctctaaatgtcaccagctttgacttcagttgttcctgaaaagctgggatgacctagtccccaaggggaaaaaattcctggctgctctccatcaacagatacggaaagggaaggaaaaatctggactttgggcactgggaaggccctagtacagctgcgtggaagattgacatcccaagattgggagagggttcatctgatcgtggcaggtggttatgacgagagagtcctggagaatgtggaacattatcaggaattgaagaaaatggtccaacagtccgaccttggccagtatgtgaccttcttgaggtctttctcagacaaacagaaaatctccctcctccacagctggcacgtgtgtgcttttacacaccaaggcaatgaggcactttgggcattgtccctctgggaaggccatgttacatggcagtgccccagttcatttgctgtttaattcgggttggaccctttgggagttccatttgaccacagtgttcacagggtttctgtgttgagcctgacccggtgcacttctcagaagcaatagaaaagttcatccgtgaaccttccttaaaagccaccatgggcctgggctgggaagagccagagtgaagggaaaaattttcccctggaagcattttacaggaacagctctaccgatatgtttaccaaactgctggataaacatacacgcaaggttgaatcatctttcctttccccttggatcaggaacccaagaaaacagatgcaggaagcaggtgggaacgctggtgagcaggatgttgcttctgccatgcttctactgctcagcggccccagcggggatgtggtgggaggaatgagggggctcttcagctatctgggggctcatctcaataatatacagcaggtcttcagacaagggacacagtatgggctgcctaaaatagctctcccagaagctttcaatcaaggccagaaagcagcagtttccacagcagcagtcgagagggttttgggagagccacaccacactgctgttttgtttagagcaggggtgttcaatcttttggctttcctggaccacaatggatga

SEQ ID NO: 14057 - DNA, 648 bp, Homo sapiens
  SIMILAR (337)..(474): 381254mologous to Homo sapiens Human secreted protein encoded by gene No. 31,accession number Y27730,Smith-Waterman Score=78.
atggagagcaaggaagagcagggtggtgtggcggaccaccagaaagccacacggggaatccccaccccccagccaagggaggtagtgagtgagcgtgctacccagcgtggaaaccgtgctttttccacgaaactgtgcaacccaaaaacaaacagaaagcaacaacaacagtatcaacaacaacagaaaggccgcacaaaaaccctacccaagggtcagcatcctcaaagatcgaaactagacaaactcacagagatgagaaagcatcaacaaaaaaacaccaaaaatccaaaaggccagagtccctgttctcctccaaatgattgcaacgtttctccagcaagggtgcataattggacaggggatgagatggaagaattgacagaagtaggtttcaaaaaatgggtaagaaaaaactgtgctgagctcaaggagcatgttctaacccaatgcaaagaagctaagaaccttgataaaaggttagaggagctgctaactagaaaaaccagtttagaaaggaacataaatgatctgatggagctaaaaacacagcatgagaactttgtaaagcatacacaagtatcaatagctgaatcgaccaagcagaagaaaggatatcagagtttgaagaccatcttgctgaaataa

SEQ ID NO: 14058 - DNA, 1649 bp, Homo sapiens
  SIMILAR (436)..(987): 961254mologous to Cloning vector pSacBII SacB,accession number U09128,Smith-Waterman Score=931.
  misc_feature (1)...(1649): n = a,t,c or g
atgccggtcaaaggaggcaccaagtgcatcaaatacctgctgttcggatttaacttcatcttctgggtgagtgagcgcgactgccgcgcgctcctctcagggcccacctgttcgcgggccccggacactggccgcggccgcgagtgccggcagctggcactgcccgcaccgggcaggcaccgggcgggaagagagagcgccctgcggctgccagctggctccaaggccgggtccagagccgggcgggacggccgcgacgggcgcattcgggttggggtcagcgggactttatttggatccaccacaggtcttttcaaccaaagccttgcagaaacaggctttaccccatacacacagaagagcaacgacttccttgttaagagtctgaaaatctggcacacctacttcaagaatttccatcaggaggccaggctgtacatacgaacctccccaggttctaactggaactggttttgcacacttggcatagagtccccagagcagccaggcgtatatgaggggcagagaccaagggtggtcacaaagtcctttgcaagtctcacccttaagcgcgtggggactgtgttgttgctggcagccagaattaatgctgatgtcctgtatgtcttgcagcttgccgggattgctgtccttgccattggactatggctccgattcgactctcagaccaagagcatcttcgagcaagaaactaataataataattccagcttctacacaggagtctatattctgatcggagccggcgccctcatgatgctggtgggcttcctgggctgctgcggggctgtgcaggagtcccagtgcatgctgggactgttcttcggcttcctcttggtgatattcgccattgaaatagctgcggccatctggggatattcccacaaggatgaggtgattaaggaagtccaggagttttacaaggacacctacaacaagctgaaaaccaaggatgagccccagcgggaaacgctgaaagccatccactatgcggtatgtcgccttggcaaagacaccctcctgcgctttctccggattgtgtctgcacacaggttgaactgctgtggtttggctgggggcgtggaacagtttatctcagacatctgccccaagaaggacgtactcgaaaccttcaccgtgaagtcctgtcctgatgccatcaaagaggtcttcgacaataaattccacatcatcggcgcagtgggcatcggcattgccgtggtcatgccttccttcagatcaaaccaccctgatcctcatgtttcttcctatctcctagatatttggcatgatcttcagtatgatcttgtgctgtgctatccgcaggaaccgcgagatggtctagagtcagcttacatccctgagcaggaaagtttacccatgaagattggggggannnnnnnnnnnnnnnnnnnnnnnnnnnnnnnnnnnnnnnnnnnnnnnnntgccactaattttagtattcattctgcattgctagataaaagctgaagttactttatgtttgtcttttaatgcttcattcaatattgacatttgtagttgagcggggggtttggtttgctttggtttatattttttcagttgtttgtttttgcttgttatattaagcagaaatcctgcaatga

SEQ ID NO: 14059 - DNA, 1402 bp, Homo sapiens
  SIMILAR (172)..(1050): 931254mologous to Homo sapiens putative p150,accession number U93570,Smith-Waterman Score=1394.
cataaagagagtgagggttggcctccgcgggtatacaagctgtatcgtataaaaggggggcccataattaaggtgagacatggtcataattttttattatgtatcaaattgtcttcaattataagttaccactttgattaaagttgataggcatttgtatctatttaaagacaaaaaaattctttttatgtacaatatcttgtctagagtctagcaaaatataggtacctttcattgcaggatttctgcttaatataacaagcaaaaaacaaacaactgaaaaaatataaaccaaagcaaaccaaaccccccggctcaactaccaattgtcaattattgaatgaaagcattaaaaagacaaacattaaagtaactttcagctttttatcttagcaattgccagaatgaattactaaaattttagtgggcaaaaaaaacaaacaacaaacaacaaaccaaaacaaaaccaaccaaaccaaaaaatccccacgaatcttacatagggtaaaactttcctggctcaggggatgatagctgactctagaccatctcggcggttcctgcggatagcacagccacaagatcatacgtgagatcatgccaaatatcatggcccacggacatgcgcttgccccactagcgccgatgatgtggaatttattgtcgaagacctctttgatggcatcaagaacaggacttcacggtgaagagtttcgaagtacgtccttcttggggcagatgtctgagataaactgttccacgccccccagccaaaccacagcagttcaacgcatagtggattggcttttaagcgttttcccgcttggggctcatccttggttttcagcttgttgtaggtgtccgttgtaaaactccgtggacttccttaatcacctcatccttgtgggaatatcccccaaatggccgcagctatttcaatggcgaatatcaccaagaggaagcccgaagaacagtcccaagcatgcaactgggacttcctgcacaggccccgcagcagccccaggaagccccaccagcatcatgacgggcgcccggctcccgatcagaaatatagactcctgtcgaagaagctggaattattaatactagtttcctgcccgaagatgctcttggtctgagagtcgaatcggagccatagtccaatggcaaggacagcaatcccggcaagccagaagatgaagttaaatccgaacagcaggtatttgatgcacttggtgcctcctttgaccggcatggtgagggctaacttagcctgggccgaacgggtgcgggactggggggctgccgcagctgggactggcgggacctggtgctggatacagatgcaggcggctgtaggctggtctccggctgcacttttaaaaagtgccactccacgaaa

SEQ ID NO: 14060 - DNA, 1335 bp, Homo sapiens
  SIMILAR (21)..(1007): 951254mologous to Homo sapiens hypothetical protein FLJ11159,accession number BC000953,Smith-Waterman Score=1641.
tcagcactgagccgccgcagcagcacagggctgggggctcccggagctgcggccagccggggttcggccagagccgcggaggctgcccggtggtaggtgcgactcttcaccctccggggagcggcggccgacgacccaacccacccgcagcgctgccgtcgcccggctggtcccccgcgcgggcacaaaaacaggcggcagttcgccaggtctcttttcccaaacctgaaccgccaagccgaaggttcttccaaagtccggttccccgggcttcacacccgccgggcaggcgcgaaccagccccaggcaaccattttcctcttcactgtatctgagtcgttgtccatctgactcgatgtcacctgattttcccagctgtgacctccagcgacgggactccgaggactgattccagcgtctcgattctctccgcctctccgcccgttttggctgagcggtttgcagccgtcggggcagaaggggtgggatgtggcagccaccagcccagcccagagaagaaaagaggacgaaattaacgcgaaaggacaccggagtctgaaagcgactccctcggatcctcggaatccgaggcaaaccctgctgcccggacacatccagagctggccgacgggtgcgcgggcgggcggcggcaccatgcagggaagctgccaggggccgtgggcagcgccgctttctgccgcccacctggcgctgtgagactggcgctgccaccatgttccccagccctgctctcacgcccacgcccttctcagtcaaagacatcctaaacattactgtgcggccgcgctcgtaggtcaagccgctcttaccaagcgtctctctgcctctctgttccccccagagctgtgcgcgctgcagaaggcggtggagttgcgtgatactgtcggctgtgcggggtaattgatatgcaggttctagagcccacagggattgcacgcagtagcaactcagggagtgtccaacagctgcatgggtatcacgagccgagtccacaacactcaaagcgtccactgacgtcgacgggggtgagaaggggctccacaacaggacgaggaggcacactggtattttgcattcactcctgcggagactaggaacttttctgtcccacgcgcgtttgttcttgcgcacgggagagtttgtggcggcattatgcagcgtgcaatgagtgatcctgcagcctggtgtcttagcttgggagtggtagttgctcagtgagtccatggtgctgaatgagtggctatgaattggcttcccatggggctcctgttcagggaggaatttactgatctgatgctgagagatctggttcat

SEQ ID NO: 14061 - DNA, 452 bp, Homo sapiens
  SIMILAR (310)..(366): 891254mologous to Homo sapiens Human secreted protein sequence SEQ ID NO:155,accession number Y87116,Smith-Waterman Score =96.
  misc_feature (1)...(452): n = a,t,c or g
tnnnnnnnnnnnnnnnnnnnnnnnnnnnnnnnnnnnnnnnnnnnnnnnnnnnnnnnnnnnnnnnnnnnnnnnnnnnnnnnnnnnnnnnnntgcccagccggaaaaccattggtacttgccccaggtaggaggaggagcagagaacagaaggtttctgtggagctgcgttaatcaccaaggagaggcagatggctccaagcccacagagtgtgaccnnnnnnnnnnnnnnnnnnnnnnnnnnnnnnnnnnnnnnnnnnnnnnnnnnnnnnnnnnnnnnnnnnnnnnnnngaaagattgctgcctgttccttcccctggaagcttcatcccagaggggcacccgccagatgccagccagagctctccgagatgccctgcccagagaggaggaatctagagaggcagactggatacagcagctttgcnnnnnnnnnnnnnnnnnnnnnnnnattg

SEQ ID NO: 14062 - DNA, 647 bp, Homo sapiens
  SIMILAR (247)..(597): 301254mologous to Plasmodium falciparum merozoite surface protein 2,accession number AF010461,Smith-Waterman Score=116.
gcttactctactccttacgctactgacaatgaagaaattaatgttacctcaactgacagtgaagtggagattgtaacagttggagaaagctatcggtctcgttcaacccttggacactccagatctcattggagccagggttcaagttctcatgcaagtcggccacaggagccacggaaccgcagtaggatttctactgttatacagcccttgaggcagaatgcagcagaagttgtggaccttaccgttgatgaagatgaacctactgtagtaccaaccacttctgcaagaatggaatcacaagctactagcgcttccattaacaattcaaatccatctacctctgagcaggcctctgatactgcttcagctgtcaccagtagccaaccttccacagtgtcagagacttcagctactcttacaagcaatagtaccactggcacttctataggagatgactcaaggaggactacatctagtgctgtaacggaaactggccctcctgcaatgccaaggttaccttcctgctgtccccagcactcaccatgtggagggtcgtcacagaaccaccatgcattaggacatcctcatacaagttgctttcagcagcatggtcaccattttcaacatcatcaccaccatgtatt

SEQ ID NO: 14063 - DNA, 2905 bp, Homo sapiens
  SIMILAR (1491)..(2108): 991254mologous to Homo sapiens hypothetical protein FLJ11159,accession number BC000953,Smith-Waterman Score=1074.
gttaaatcacctaaattattggaataagcatatcggtgttggatttttttaaaatgcagtaatattttggtaacacgtctgttcgatattgcagtttagctttgtgaacgctttctttaccaaatgttattagagagcttgtatttttaaagtttttttatttattaattataaacacattagcttacattaaaaatataaccctttatctaatttgttttgaaatgctaagttgacattttgtattttgtagaacctactgtagtaccaaccacttctgcaagaatggaatcacaagctactagcgcttccattaacaattcaaatccatctacctctgagcaggcctctgatactgcttcagctgtcaccagtagccaaccttccacagtgtcagagacttcagctactcttacaagcaatagtaccactggcacttctataggagatgataagactattccagcaaacgaaacgcttatttggtgcaacgacttggaatgcccccaggggaggaattggttaggcggcggcggcggcgaagcggcggcggcggctgtaggggagcagcggcagtggcggcgacggcgaggaggtgttcggtttgcgcagcgtagaaacgcccgcagcttcagagaaggagttcttgtgggaccaaattaggcattctgaacccacgccggcttagctgggccgagtccaggcgctgccgcacgtacagttttggtggcggggacagacactgttcttgactctaggggcctattacgccgacgtctgaggcgcagatcgctggctctcgacgcattactctttacgccttacatttctgtcttccttcctggggcagtgattcccggaccctggaagagaagaggggggctaatgattaaggctttccttaaagtttcccatgtctcaatggactcctgaatataacgagctctacaccttaaaagtggatatgaagagtgagattccttctgatgcaccaaagacacaggagagtctgaaagggatccttttgcatccagagcccattggggcagccaaaagttttcctgcaggagttgagatgattaatagtaaagtggggaatgaattctctcacctgtgtgatgattctcaaaagcaagagaaggaaatgaatggtaaccagcaagaacaagaaaaaagtctcgttgtgaggaaaaaacgcaaaagccagcaggctggcccttcgtatgtgcagaattgtgttaaagaaaaccagggaatattaggactgaggcaacacctagggacaccaagtgatgaagataatgattcctcttttagtgattgtctttcttctccttcatctagtctgcattttggagattctgatactgtgacttcagatgaggataaagaagtctctgtaagacattcccagaccattttgaatgctaaaagtagaagccatagtgcacggtctcataagtggcctcggactgagacagaatctgtatcgggattgttaatgaaaagaccctgtttacatggcagttcgttacggagacttccatgcagaaagagatttgtaaaaaataattcctcacagaggacacagaaacaaaaagagaggatattaatgcagaggaagaaacgagaagtgttagctcgaagaaaatatgccttgctacctagttctagtagttccagtgagaatgacctcagcagtgaatcctcttctagctcatcaactgaaggagaagaagatttgtttgtttctgccagtgaaaaccaccaaaacaatccagctgttccctcagttacctatggtcaaccatggtccaaaaatattaaagaaaaaactctagaaataaacagctcacaagctttaaccgcttatgaatgcctacacagtgcccatgtcattaacctcatttcgccattttatcatcattttccgtcatcacaagaaagatcatacctttccactctgagcaccctttctaacaagaagactggctcagtatggttcactaggtcgcccaaggtcacacagttcttccctgggggagccatcacaggaactctgagtcaaaggcctgaaagggaaatcctccgaccccttgcgcttcccgggaaaggcaacactccaccctacttctgctcgccctccatgggctgcacccactgtccaaccagtcccaatgagatgaaccagggcatctctgaagatacggcagcagccccagtcagggacatatacataaaacccccatctccctgggacagagcacctgggggaaggggcggctgtgggcacagcttcagcagacttaaaagtccctacctgagagctctgaagagtgcagcagatttcccagcacagcattcgagctctgataagggacaggctgcctcctcaagtgggtccctgacccccgtgtatcctgtctgggtgacacctcccagtaggggccgacagacacctcatagaggagagctctggctggcatctgacgggtgcccctctgggaggaagcttccagaggaaggaacaggcagcaatctttgctgttctgcagcctccgctggtgatacccaggcaaacagggatcacaactcctcaccagcacgggaacaaacctggacagagaacaagtttgacaaactgacagaagcaggtttaagaaggtgggtgataaactcctccgagctaaaggaacctgtgctaacccaatgcaaggaagctaaaaaccttgaaaaaagattagacgaatcgccaactagaataaccagttcagagaagaacataaatgatctaatggagctgaaaaacacagcacaagaacttcatgaagaacacacaagtatcaatagccaaatcaagcagaataaaggatatcagagattgaagatcaactcaatgaaataa

SEQ ID NO: 14064 - DNA, 739 bp, Homo sapiens
  SIMILAR (463)..(1677): 761254mologous to Homo sapiens golgin-like protein,accession number AF266285,Smith-Waterman Score=1446.
ctgaaccggggcgagcagagagctgtcagatactatagccatatgaagttgaacatggcagaagaagaggactatatgtctggattccttcattaatgtccaagaagatatcagaccaggattgccaatgctaaggcaaatccgagaagcccgtcgaaaagaagaaaagcaacaggaagccaatttgaaaaacaggcagaagagtttaaaagaagaagaacaagaaagacgtgacattgggttgaagaatgcactaggctgtgaaaacaaagggtttgccttgctccaaaagatgggctataaaagtggtcaggcacttggcaagagtgggaaaagtggcattggtcatgaggcatcattaaaacggaaagcagaggaaaaattggaaagctacagaaaaaagattcacatgaaaaaccaagctgaagaaaaagctgcagaacagtttcgaatgcgacttaaaaataagcaagatgaaatgaagctagaaggagatctcagaagaagccagcgagcctgtcaacaactggatgtccagaaaaatattcaggttcccagggaagcatggtactggttgaggcttgaagaggagactgaagaagatgaagaagaaaaagaacaggatgaagatgaatataagagtgaagatttaagcataaagaagacctatcttcaaattgtccaggaccaacttctgcagatcatgactaagattattcccaataaagtggaaacttga

SEQ ID NO: 14065 - DNA, 1863 bp, Homo sapiens; identical to SEQ ID NO: 3795
  SIMILAR (817)..(1860): 911254mologous to Homo sapiens putative p150,accession number U93563,Smith-Waterman Score=1638.

SEQ ID NO: 14066 - DNA, 1206 bp, Homo sapiens; identical to SEQ ID NO: 13263
  SIMILAR (745)..(1146): 881254mologous to Homo sapiens putative p150,accession number U93572,Smith-Waterman Score=595.

SEQ ID NO: 14067 - DNA, 1119 bp, Homo sapiens; identical to SEQ ID NO: 3797
  SIMILAR (1)..(711): 851254mologous to Homo sapiens p40,accession number U93570,Smith-Waterman Score=1041.

SEQ ID NO: 14068 - DNA, 1410 bp, Homo sapiens; identical to SEQ ID NO: 4326
  SIMILAR (64)..(1398): 771254mologous to Homo sapiens putative p150,accession number U93572,Smith-Waterman Score=1655.

SEQ ID NO: 14069 - DNA, 1734 bp, Homo sapiens; identical to SEQ ID NO: 8621
  SIMILAR (91)..(1728): 891254mologous to Homo sapiens putative p150,accession number U93569,Smith-Waterman Score=2503.

SEQ ID NO: 14070 - DNA, 906 bp, Homo sapiens
  SIMILAR (1007)..(1525): 321254mologous to Volvox carteri f. nagariensis hydroxyproline-rich glycoprotein DZ-HRGP,accession number AJ242540,Smith-Waterman Score=134.
atggggaaaaaacagaacagaaaaactggaaactctgaaaaccagatcgtctctcctcctccaaaggaacacagctcctcaccagcaatggaacaaagctggacagagaatgattttgatgagttgagagaagaaggcttcagatggtcaaactactctgagctacaggaggaaattcaaaccaatggcaaagaagttaaaaactttgaaaaaaacttaaacgaatggatacctagaataaccgatgcagagaagtccttaaaggagccgatggagctgaaagccaaggctcgagaactacgtgaagaatgcagaagcctcaggagcagatgtgatcaactggaagaaagggtatcagtgatggaagacgaaatgaatgaaatgaatgaaggggagaatggaaccaagttggaaaacactctgcgggatattatccaggagaacttccccaatctagcaaggcaggccaacattcagattcaggaaatacagagaacgccacaaagatactcctctagaacagcaactccaagacacataattgtcagattcaccaaagttgaaatgaaggaaaaaatgttaagggcagccagagagaaagaacaggttacccacaaagggaagcccatcagactaacagcggatctcttggcagaaactctacaagccagaagacagtgggggccaatattcaacattcttaaagaaaagaattttcaacccagaatttcatatccagccaaactaagcttcataagtgaaggagaaataaaatcctttacagacaagcaaatgctgagagattttgtcaccaccaggcctgccctaaaagagctcctgaaggaagcactaaacatggaaaggcacaactggtaccagctgctgcaaaaacatgccaaaatgtaa

SEQ ID NO: 14071 - DNA, 729 bp, Homo sapiens
  SIMILAR (148)..(327): 541254mologous to Homo sapiens bA393J16.1 (zinc finger protein 33a (KOX 31)),accession number AL117337,Smith-Waterman Score=174.
aggaacacagctcctcaccagcaacggaacaaagctggatggagaatgactttgatgagttgagagaagaaggcttcagacgatcaaactactctgagctaaaggaggaagttcgaacccatggtaaagaagttaaaaaccttgaaaaaaaattagatgaatggctaactagaataaccaatgcagagaagtccttaaaggacctgatggagctgaaaaccacagcaagagaaatatgtgacgaatgcacaagtctcagtagccgatgtgatcaacttccacgaccagatggattcacagccgaattctacgagaggtacaaggaggagatggtaccattccttctgaaactattccaatcaatagaaaaagagggaatcctccctaactcactttatgaggccagcatcatcctgataccaaagcctggcagagacacaacaaaaaaagagaattttagaccaatatccctgatgaacattgatgcaaaaatcctcaataaaatactggcaaaccgaatccagcagcacatcaaaaagcttatccaccataatcaagtgggcttcatccctgggatgcaaggctggttcaacatatgcaaatcaataaacataatccagcatataaacagaaacaacggcaaaaaccacatgattacctcaatagatgcagaaaaggcctttgacaaaattcaacaacgcttcatgctaaaaactctcaataaattag

SEQ ID NO: 14072 - DNA, 909 bp, Homo sapiens
  SIMILAR (298)..(522): 681254mologous to Mus musculus NK10,accession number X79828,Smith-Waterman Score=276.
atgaaggcagaaataaagatgttctttgaaaccaacgagaacaaagacacaacataccagaatctctgggacacattcaaagcagtgtgtagagggaagtttatagcagtaaatgtccacaagagaaagcaggaaagatctaaaattgacaccctaacatcacaattaaaagaactagagaagcaagagcaaacacattcaaaagctagcagaaggcaagaaataactaagatcagagcagaactgaaggaaatagagacacaaaatacccttcaaaaaatcaatgcatccaggagctggttttttgaaaggaccaacaaaattgatagacctctagcaagactaataaagaagaaaagagagaagaatcaaatagatgcaataaaaaatgataaaggggatatcaccactgatcccacagaaatacaaactaccatcagagaatactataaacacctctacgcaaataaactagaaaatctagaagaaatggataaattcctcgacacatacaccctcccaagactaaaccaggaagaagttgaatctctgaatagaccaataacaggcgctgaaattgaggcaataattaatagcttaccaaccaaaaaaagtccaggaccagatggattcacagccgaattctaccagaggtacaaggaggagctggaatgcagctcctcaccagcaatggaacaaagctggacggagaatgactttgacgacttgagagaagaaggcttcagacgatcaaacttctctgagctaaaggaggaagttcaaacgcatcgcaaagaagctaaaaaccttgaaaaaagattagaaaaatggctaactagcaataaccaatgtagagaagtccttaaattacctgagagagctgaaaaccatggcacgagaactatgtga

SEQ ID NO: 14073 - DNA, 972 bp, Homo sapiens
  SIMILAR (7)..(969): 761254mologous to Homo sapiens putative p150,accession number U93563,Smith-Waterman Score=1187.
atgggcttagaaatcccattgattaatacaaagagtaaacctggcttcactttggaatgcagctccgcaccagcaatggaacaaagctggatggagaatgactttgatgagttgagagaagaaggcttcagacgatcaaacatctccaagctaaaggaggaagttcaaacctattgcaaagaagtgtgtagagggaaatttaaagcactaaatgcccacaagagaaagcaggaaacatctaaaattgacaccctaacatcacaattaaaagaactagagaagcaagaggaaacacattcaaaagctagcagaaggcaagaaataactaagatcagagcagaactgaaggagatagagacacaaaaaacccttcaaaaaatcaatgaatccaggagctggttttttgaaaagatcaacaaaattcatagaccgcttgcaagactaataaagaagaaaacagagaagaatcaaataaatgcaataaaaaatgataaatgggatatcaccaacaatctcacagaaatacaagctaccatcagagaatactataagcacctctatgcaaataaactagaaaatctagaagaaatggataaattcctggacacatacaccctcccaagactaaaccaggaagaagttgaacccgtgaatagaccaataacaggctctgaaattgaggcaatcactaatagcctaccaacaaataaaagtccaggatcagatggattcacagtcgaattctaccagaggcacaaggaggagctggtaccattccttctgaaactattccaatcaatagaaaaagagggaatcctccctaactcattttatgaggccaacatcatcctgataccaaagccttgcagagacacaacaaaaaaagagaattttagaccaatatccctgatgaacatcgatgcacaaatcctcaataaaatactggcaaacggaatccagcagcacatctaa

SEQ ID NO: 14074 - DNA, 690 bp, Homo sapiens
  SIMILAR (1597)..(5070): 871254mologous to Homo sapiens putative p150,accession number U93565,Smith-Waterman Score=5146.
atggagagtctgagatcctctgtggacctgggccctggactgacccttcagaagctgggcaaggtggtggtggagctcctgccacatgatctcagtccacaactcactgtccacaaactccaggtggagacactggtgtgtttgcctctcatcgggttattgcctaactgggaggcatcccccagtaggggcagactgacacctcacacggccgcgtacccctctgagataaaacttccagaggaacgatcaaacagcaacatttgctgttcagcaatattcgctgttctgcagcctctgctgctgatacccaggcaaacaggatctggagtggacctccagcaaactccaacagacctgcagctgagggtcctgactgttagaaggaaaactaacaaacagaaaggacatccacaccaaaaccccatctgtatgccaccatcatcaaagaccaaagaacacagctcctcaccagcaatggagcaaagctggatggagaatgactttcatgagttgagagaagaaggcttcagacgatcaaacttctccaagctaaaggaggaagttcgcacccatcgcaaagaagttgaaaaccttgaaaaaagattagacgaatggctaactagaataaccaaagtagagaaggccttaaatgacctgatggagctaaaaaccatggcacgagaatga

SEQ ID NO: 14075 - DNA, 714 bp, Homo sapiens
  SIMILAR (268)..(1215): 721254mologous to multiple sclerosis associated retrovirus polyprotein,accession number AF009668,Smith-Waterman Score=1180.
atggctataattcaaagagataatacggccttggccaatcttccttttatgaatgaggagataagtgctaaggattttagtacagtgctcctggctgtcatatttctaaaaaaatcaagtcagcagctggtggcaaataaaccagtgctctctctttcactacctgtaacttgggtcctggaaccaatgtcctatgggtaccaaggaatggctgaattgagactttcaagggactatgagtctatgcagatgtgtacttttagagggagtttaagcaatgaacaatgcctagaccaagagttgcattcaccatttgcaaggaaagagaaagaacccaagaagagaaacaagcaggcaagcagagaagaatcagaaaaagagaagaaaagggagccggagaggcatttgacaacaactgagcggtgtgattttcccgtaagaaaagtgaagatacagaggacagctatagaaaggcttaacaaacggcacaccaggagattatatcctgcacctggcttggaaggtcctacgcccacggagcctcgctcattgctagcacagcagtctgagatcaaactgcaaggcagcagtgaggctggggaacgcagctcctcaccagcaacggaacaaagctggacagagaatgactttgacaagttgagagaagaaggcttcagaagatcaaactactctgagctaaaggaagaagtttga

SEQ ID NO: 14076 - DNA, 834 bp, Homo sapiens
  SIMILAR (166)..(357): 731254mologous to multiple sclerosis associated retrovirus polyprotein,accession number AF009668,Smith-Waterman Score=226.
  misc_feature (1)...(834): n = a,t,c or g
atgggaaaaagacagagcagaaaaactggaaactctaaaaatcagagtgcctctcctcctccaaaggaatgcagctcctcaccagcaatggaacaaagctggatggagaatgactttgatgagttcagagaagaaggcttcagacgatcaaactactctgagctacaggaggaaattcgaaccaacggcaaagaagttaaaagctttgaaaaaaaattagacgaatggataactagaataaccaatgcagagaagtccttaaaggacctgatggagctgaaaaccaaggctcgagagctacatgatgaatgcacaagccntcagagctggttttttgaaaagatcaacaaaattgatagactgctagcaagactaataaagaagaaaagagagaagaatcaaatagatgtaatgaaaaatgataaaggggatatcaccaccgatcccacagaaatacaaactaccatcagagaatactataaacacctctatgcaaataaactagaaaatctagaagaaatgcataaattcctcgacacatacatcctcccaagactaaaccaggaagaagttgaatctctgaatagaccaataacaggctctgaaaatgaggcaataatcaatagcttaccaaccaaaaaaagtccaggaccagatggattcacagccgaattcaacaagagagggcaagatgagctagtggatgattacaaaccaagagatactgtaggaaaattagaagaaaaaaatcaaaaaccaactttagagaagaaaaaatttgaccgaggaggagagaccgaggcaagttttagaacgggagtgaaagcttactga

SEQ ID NO: 14077 - DNA, 747 bp, Homo sapiens
  SIMILAR (357)..(211): 481254mologous to Homo sapiens Human secreted protein, SEQ ID NO: 4473,accession number G00392,Smith-Waterman Score=116.
atgagagaaaagacatcactacagattcgtccgggaattattaggattatagggggatattatgaacaactttatgtcactaaaaatgatagtacagagcgggggtccccagcctccaggccacagactgataccagtccatggcctgttaggaaccggaccgcacagcaggaggaagagtgtaacttgagcaaagagattctgcagctgagtcacaccctgaagaagctgacagctatatccagtctgctgactgctctctccagagctgagcagtatggcaaaagcaaagtccctgaatgtgtcattagaagtgatggggattacctttccctgacagtcaatccaggcagtttcagtcgtgttgatatcactctaagctccaggggtgggcatgtgaccgaagcctggccaatcacagatgtttcttccagtggccacagagattggttcagggattggcacaggatcaaattcaagccagaatgcagctcctcaccagcaatggaacaaagctggatggagaatgactttgatgagttgagagaagaaggcttcagaagatcaaacttctccaagctaaaggaggcagttcgaacccatggcaaagaagttaaaaaccttgaaaaaagattagacaaatggctaactagaataatcaatgaaaagaagtccttaaaggacctgatgcagctgaaaaccatggcacaagaactacgtgacaaatgcacaagcttcagtagctga

SEQ ID NO: 14078 - DNA, 1479 bp, Homo sapiens; identical to SEQ ID NO: 3801
  SIMILAR (1)..(342): 861254mologous to Mus musculus Pro-Pol-dUTPase polyprotein,accession number Y12713,Smith-Waterman Score=514.

SEQ ID NO: 14079 - DNA, 813 bp, Homo sapiens
  SIMILAR (445)..(1140): 781254mologous to Mus musculus Pro-Pol-dUTPase polyprotein,accession number Y12713,Smith-Waterman Score=939.
atggggaaaaaacagagcagaaaaactggaaactctaaaaagcagagcacctctcttcttccaaaggatcgcagttcctcaccagcaatggaacacagctggacggagaatgactttgatgagttgagagaagaaggcttcagaagatcaaactacgagctacaggaggaaattcaaaccaaaggcaaagaagttaaaaactttgaaaaaaatttagacgaatgtacaactagaataaccaatacagagaagggcttaaaggagctgatggagctgaaagccaaggctcgagaactacaaatacaaactaccatcagagaatactacaaacacctctatgcaaataaactagaaaatctagaagaaatggataaattcctccacacatatactctcccaagactaaaccaggaagaagttgaatctctgaatagaccaataacaggagctgaaattgtggcaataatcaatagcttatcaaccaaagagtccaggaccagatggattcacagccgaattctaccagagggcttgcgtttcaagaaagcccatgtaacacatcctgaactgaaagccaccttttgcctaccaatacttggtgtaaagaagaatccctcatccccactgtatacaactttgggtgttattaccaaaggtactgtcattgaagtaaatgtgagcgaattgggccttgtgacacaaggaggcaaagttatttggggtatacattcaaaagaaatgaaagcagagactcaaacaggtatctgtacaccaacattcattgaagcattattcacaatagccaaaaggtag

SEQ ID NO: 14080 - DNA, 651 bp, Homo sapiens
  SIMILAR (183)..(650): 611254mologous to Homo sapiens p40,accession number U93570,Smith-Waterman Score=429.
aaacaggtgtccctaagggcaagaatactgtgaatgctgttgttcctctgggtctagatgcccagtgtggctgccatactctaggctgctgcttggaatgcctgcaaggaatccagagatatggcctgtcctcaagtctcccagcagtgggtaccagtaccagctctgatgggggtggcaggaaagtgacacagactgaacgcagctcctcaccagcaatggaacaaagctggaaggagaatgactttgacgtgttgagagaagaaggcttcagaagatcaaactactctgagctaaaggagaaagttcgaaccaatggcaaagaagttaaaaaccttgaaaaaaaagtagacgaatggctaactagaataaccaatgcagagaagtccttaaaggagctgagaccaagtctacgtctgattggtgtacctgaaagtgatggggagaatggaaccaagttggaaaacactctgcaggatattatccaggagaacttccccaatctagcaaggcaggccaacattcagattcaggaaatacagagaacgccacaaagatgctcctcgagaagagcaactccaacacacgtaattgtcagattcaccaaagttgaaatgaaggacaaaatgttaagggcagccagagagaaag

SEQ ID NO: 14081 - DNA, 1069 bp, Homo sapiens
  SIMILAR (523)..(912): 771254mologous to Mus musculus Pro-Pol-dUTPase polyprotein,accession number Y12713,Smith-Waterman Score=510.
tgtagatgggcactggggtacagtgagcggtcctggcaaagaaggagaggagagcggctggatgagcattcagagagcccttcggaaacgacctttttccaaatccaaaagaaaaacaggctcaggcagagaccgggcgttgagtaagagctccccagttcgtgcctgggaaattaacagggaatggcacatcaatcgcgggctagcccccaacctccccggagtccgcagctccggctttctcttctctgctaagtgctgcgagactgtggaccatactttaagaaatgctcccctagatcctcaactggttagatcaagatcacatggcttgcctggcactgtgcctctaaggagccactacatcctggccaagataatcagccccatgaatttcaagtgggcagagctgaagctacaagctcctaaatgcactggactctccaacaccctgtgctgcatcctgaacatgatggaacgcagttcctcaccagcaacggaacaaagctggacggagaatgactttgatgagttgagagaagaaggcttcagacgatcaaactactccgagctacaggaggaaattcaaaccaaaggcaaagaagttaaaaactttgaaaaaaatttagacgaatgtataactagaataaccaatacagagaagtgcttaaaggagctgatggagctgaaagccaaggctcgagaactacctgaagaatgcagaagcctcaggagccgatgcaatcaactggaagaaagggtatcagtgatggaagatgaaatgaatgaaataaagcgagaagggaagtttagagacaaaagaataaaaagaaacaaacaaggcctccaagaaatatgggactatgtgaaaagaccaaatctatgtctgattggtgcacctgaaagtgacggggagaatggaaccaagttagaaaacactctccaggatattatccaggagaacttccccaatctagcaaggcaggccaacattcagattcaggaaatacagagaatgccacaaagatactcctcgagaagagcaactccaagacacataattgtctga

SEQ ID NO: 14082 - DNA, 2065 bp, Homo sapiens
  SIMILAR (102)..(200): 841254mologous to Mus musculus Pro-Pol-dUTPase polyprotein,accession number Y12713,Smith-Waterman Score=140.
gaagcttcattcttctggatcatctggaaagggacaagaggtggccggttggtacgaactcataaacaacctttttcagcacaacctggttgaatgtggagtcggttcgtctggccagaaaactgcacagcttgaccaacagcctcaggtagatatcctggctcttgggctccttgcgccgaacctttcggtccttgttgtggcagatgtcagctcccatgatggcgtctcctgctcggccagaacatgctgcaccttctctgatctccctgccagcgtcttgataattaatatagaaaatgatacatttttctcatcaaatgcaccaatgcatttttcactggaatatgaacctggtttgcaaaatggggctagtctggggcaaattcgcgactgccgcctgggttccaaagaccaggctgactcaggaggaatattactcaaggtaaaaacctgtgaacaatttctggttaagggcttttcagagaaagtaactttgttcctttttaggccaatgccttacactactggtgtggatcctcctgaacactctacctttctcttgatgatcacggagtctgaactagctatcagagatgccgagaaagcagggcgactaccgcacccggatatggaaattcgaggacgggttgagcaacgtgttggttatacaattgaacaaattaatcatatgcgtgatgtgtttggtacgcgattgcgacgtgctgaagacgtatttccaccggtgatcggggttgctgcccataaaggtggcgtttacaaaacctcagtttctgttcatcttgctcaggatctggctctgaaggggctacgtgttttgctcgtggaaggtaacgacccccagggaacagcctcaatgtatcacggatgggtaccagatcttcatattcatgcagaagacactctcctgcctttctatcttggggaaaaggacgatgtcacttatgcaataaagcccacttgctggccggggcttgacattattccttcctgtctggctctgcaccgtattgaaactgagttaatgggcaaatttgatgaaggtaaactgcccaccgatccacacctgatgctccgactggccattgattctgttgctcatccctatgatgtcatagttattgacagcgcgcctaacctggacctgcatctgagggtcctctctcttagaaggaaaactaacaaacagaaaggacatccacaccaaaaacccttctgtacatcaccatcatcaaaggccaaaatagataaaaccacaaagatggggaaaaaaccgaacagaaaaactggaaactctaaaaatcagagcgcctctcctcctccaaaggaacgcagctcctcaccagcaatggaacaaagctggacggagaatgactttgacgagctgagagaagaaggcttcagacgatcaaattactctgagctacgggaggacattcaaaccaaaggcaaagaagttgaaaactttgaaaaaaatttagaagaatgtataactagaataaccaatacagagaagtgcttaaaggagctgaggacactacaccacacctattccaaaactgaccacatacttggaagtaaagctctcctcagcaaatgtaaaagaacacaaattataacaaactatctctcagaccacagtgcaatcaaactagaactcaggattaagaatctcactcaaaacttctcaactacatggaaactgaacaacctactcctgaatgactactgggtacataacgaaatgaaggcatccttgatgaacattgatgcaaaaatcctcaataaaatactggcaaaccgaatccagcagcacatcaaaaagcttatccaccatgatcaagtgggcttcatccctgggatgcaagcctggttcaatatacgcaaatcaataaatctaatccagcatataaacagagccaaagacaaaaaccacatgattatctcaatagatgcagaaaaggcctttgacaaaattcaacaacctttcatgctaaaaactctcaataaattaagtactgatgggacatatatttcaaaataa

SEQ ID NO: 14083 - DNA, 1639 bp, Homo sapiens
  SIMILAR (271)..(633): 801254mologous to Mus musculus Pro-Pol-dUTPase polyprotein,accession number Y12713,Smith-Waterman Score=536.
atggacacctttcttcaggctgaaagaaaggactatatggaggcctacgagttgattgagcaggaagaacagggggtgaaggagctcaacagacccctcactgctccaagtgccttgcatcccagggatgaagcccacttgatcatggtggataagctgtttgatgtgctgctggattcggtttgccagtattttattgaggatttttgcatcgatgttcatcacattaattcaagatggattaaagacttaaatgttagacctaaaaccataaaaaccctagaagaaaacctaggcaataccattcaggacataggcatgggcaaggacttcctgtctaaaacaccaaaagcaatggcaacaaaagccaaaattgacaaatgggatctaattaaactaaataacttctgcacagcaaaagaaactaccatcagactgcccgttccaaacccttgcggaccagtagctgaaacaccgctatcccgtgtgtttgtcttgcgggaagcccgaaagacgctgaagccacatcaatctacatgtttatcaaaaggtcgcgacaactcaatcgacagctggaaaaccgcggcccgtgtcttaaagacagcgataagttcgacgccaacgatcccgatcctgaaagatcagacgcaagaatggtcggtttctgcaacctttacatctgacggaaaaatccgtttattctacactgactattccggtaaacattacggcaaacaaagcctgacaacagcgcaggtaaatgtgtcaaaatctgatgacacactcaaaatcaacggagtggaagatcacaaaacgatttttgacggagacggaaaaacatatcagaacgttcagcagtttatcgatgaaggcaattatacatccggcgacaaccatacgctgagagaccctcactacgttgaagacaaaggccataaataccttgtattcgaagccaacacgggaacagaaaacggataccaaggcgaagaatctttatttaacaaagcgtactacggcggcggcacgaacttcttccgtaaagaaagccagaagcttcagcagagcgctaaaaaacgcgatgctgagttagcgaacggcgccctcggtatcatagagttaaataatgattacacattgaaaaaagtaatgaagccgctgatcacttcaaacacggtaactgatgaaatcgagcgcgcgaatgttttcaaaatgaacggcaaatggtacttgggagagttgggctggaggagggagtggagcagtggggacaggaagtccctcgctagactcagcaaaacagggacccttggcttggctgctctgacctacaaatgcacacgagaccagtggacggtatattgccgggtcatccgagaaaagaacctctgccaggacatgcggtggtaccagcgctgctgccagacctgcagggacttctatgcaaacaagatgtcgccagccaccgccgagctcgtgacacgcagtcccaagggtcgctcaaagctcagactcaggtctgaaagccacccacccgcaagcctaccagccttgtggccacacccccacccggctgccacaagaatccaactgcatagaacatgagcgtggacttggaaaaaaaaaaaaaaaaaaaaaa

SEQ ID NO: 14084 - DNA, 622 bp, Homo sapiens
  SIMILAR (424)..(1242): 731254mologous to Mus musculus Pro-Pol-dUTPase polyprotein,accession number Y12713,Smith-Waterman Score=1039.
atgactcttggctatggtcagagaggagctaataaagatttaagaactggtttcgacccagacttgtgcaccatggacaattttgctgagggagatttcactgtggcggattatgccttgttagaagattgccctcacgtggatgattgtgtctttgctgctgaatttatgagcaatgattatgttcgtgtgactcagctttactgtgatggggtgaatgattcattccttattggaggcttattgagaattggttgtaaaatagaaaatgaacgcagctcctcaccagcaatggaacaaagctggacggagaatgactttgacgagttgagagaggaaggcttcagaagatcaaactactccgagctaaaggaggaagttcgttaccaatggcaaagaagttagaaactttgaaaaaaaattagatgaatggataactagaataaccaatgcagagaagtccttaaaggacctgatggagctgaaaaccacggcacgagaactatgtgacaaatgcacaaacctcagtaaccgatgcgatcaactggaagaaagggtatcagcgatggaagatgaaatgaatgaaatgaagcatgaagataagtttagagaaaaagaataa

SEQ ID NO: 14085 - DNA, 930 bp, Homo sapiens
  SIMILAR (22)..(642): 821254mologous to Mus musculus Pro-Pol-dUTPase polyprotein,accession number Y12713,Smith-Waterman Score=879.
atggggaaaaaacagaacagaaaaactgaaaattctaaaaatcagagaacctcttcttctccaaaggaacgcagctcctcaccagcagcggaacaaagctggatggagaatgactttgatgagttgagagaagaaggcttcagacgatcaaacttctccgagctaaaggaggaagttcgaacccatggcaaagaagtcaaaaaccttgaaaaaagattagacaaatggctaactagaataactaatacacagaagtccttaaaggacctgatggagctgaaaaccacggcacgagaactacatgatgaatgcacaagcctcactaaccaattcgatcaactggaagaaaggatcaacaacattgacagaccactagcaagactaataaagaagaaaagagagaagaatcaaatagatgcaataaaaaatgataaaggggatatcaccactgatcccacagaaatacaaactaccatcagagaatactataaacacctctatgcaaataaactagaaaatctagaagaaatggataaattcctggacacatacaccctcccaagactaaaccaggaagaagttgaatctctgaatagaccaataacaggctctgaaattgaggcaataattaatagcttaccaaccaaaaaaagtccaggaccagacagattcacagccaaattctaccagaggtacaaggaggagctggtaccattccttctgaaactattccaatcaatagaaaaagagggaatcttctctaactcattttatgaggccagcatcatcctgataccaaagcctggcagagacacaacagaaaaagagaattttagaccaatatccctgatgaacatcgatgcaaaaatcatcaataaaatactggcaaaccgaatccagcaaacacatcaaaaagcttatccaccatga

SEQ ID NO: 14086 - DNA, 366 bp, Homo sapiens
  SIMILAR (271)..(330): 851254mologous to Homo sapiens PRO2221,accession number AF116695,Smith-Waterman Score=92.
atggacacctttcttcaggctgaaagaaaggactatatggaggcctacgagttgattgagcaggaagaacagggggaaagggagccagtggctgttaacaatatattaagtacggaagcactaatggcaaacgccaagtccacgctcatgttctatgcagttggattcttgtggcagccgggtggggggcgtggccacaaggctgcctctaaccctggtgttaccagagatgttgtaggttctctttcatccttgacctttttgcgtggggaacgcagctcctcaccagcaatggaacaaagctggacggataatgactttgatgagttggagagaagaaggcttcagatgatcaaacttctctga

SEQ ID NO: 14087 - DNA, 1029 bp, Homo sapiens
  SIMILAR (358)..(855): 771254mologous to Homo sapiens p40,accession number U93564,Smith-Waterman Score=670.
atgggaaagaagcaaagaggagggggaagacattaccggaggaggaaggaactgtgcgtgagggtccttgcttcacagaaaggaagctccatttggaatctgtccaacagagtggaatcttggcactgggaaggagagaaagatggtgaagacagagataatgatgatggggatgacagcgatggtggggatgacaatggggaagaggatgatggtgacaacagcaacgctgatgtaaacactgacaattgtgatgatggtgaagacagggatgatgcttcctttcactcgaacacaccagaaacacgagatgtaggtacgcgtgagcaaagaccaaaggtagataaaaccacaaagatagggaaaaaacagagcagaaaagctgaaaattctaaaaatcagagcacctctccccctccaaaggaacgcagctcctcaccagcaacagaacaaagctggacagagaatgactttgacgagttgagagaagaaggcttcagacgatcaaacttctccaagctaaaggaggaagttcgaacccacagcaaagaagttaaaaacattgcaaaaagattagacgaatggctaactagaataaccaatgcagagaagtccttaaaggacctgatggagctgaaaaccacggcacgagaactacgtgacgaatgcacaagcctcagtagccgatttgatcaactggaagaaagggtatcagtgatggaagatcaaatgaatgaaatgaagcgagaagagaagtttagaggaaaaagaataaaaagaaatgaaaaaagcctccaagaaatatgggactatgtgaaaagaccaaatctacgtctgattggtgtacctgaaacgggccccaacttccctatctaccacgagaccacaccatgtaaactcaacacgaagaaccaaaaaggacccactgatgaccaacacgtgcatattgggtacttccagaagtatgaattcagtgatgcaaaggacaggcgggctgcagcagcaaagagtttttgtaaagaaggctga

SEQ ID NO: 14088 - DNA, 3906 bp, Homo sapiens
  SIMILAR (1)..(363): 781254mologous to Mus musculus Pro-Pol-dUTPase polyprotein,accession number Y12713,Smith-Waterman Score=507.
atggggaaaaaacagagcagaaaaactggaaactctaaaaatcagagcgcctctcctcctccaaaggaacgcagctcctcaccagcaatggaacaaagctggatggagaatgactttgatgacttgagagaagaaggcttcagacaatcaaactactctgagctaaaggaggaagttcgaacccatggcaaagaagttaaaaaccttgaaaaaaaattagacgaatggctaactagaataaccaatgcagagaagtccttaaaggacctgatggagctgaaaaccacagcccgagaactacatgatgaatgcacaagcctcaaaagggtatcagtgacggaagatcaaatgaatgaaatgaagcgagaagagaagtttagagaaaaaagaataaaaagaaatgaacaaagcctccaagaaatatgggactatgtgaaaagaccaaatctacacctgattggtgtacctgaaagtgacagggagaatggaaccaagttggaaaacactctgcaggatattatccaagagaacttccccaatctagtaaggcaggccaacattcaaattcaggaaatacagagaacgccacaaagatactcctcgagaagagcaactccaagacacataattgtcagattcaccaaagttgaaatgaaggaaaaaatgttaagggcagccagagagaaaggtcgggttacccacaaagggaagcccatcagactaacagctgatctcttggcagaaactctacaagccagaagagagtgggggccaatattcaacattcttaaagaaaagaattttcaacccagaatttcatatccagccaaactaagcttcatagacagatcaacgagacagaaagttaacaaggatacccaggaattgaactcagctctgcaccaagcggacctaatagacatctacagaactctccaccccaaatcaacagaatatacattcttttcagcaccacaccacacctattccaaaattgaccacatagttggaagtaaagcactcctcagcaaatgtaaaagaacagaaattataacaaactgtctctcagaccacagcgcaatcaaactagaactcaggattaagaaactcactcgaaaccactcaactacatggaaactgaacaacctgcttctgaatgactactgggtacataatgaaatgaaggcagaaataaagatgttctttgaaaccaacgagaacaaagacaaaacataccagaatctctgggacacattcaaaacagtgtgtagagggaaatttatagcactaaatgcccacaagagaaagcaggaaagatctaaaattgacaccctaacatcacaattaaaaggacttgagaagcaagagcaaacacattcaaaagctagcagaaggcaagaaataactaagatcagagcagaactgaaggaaatagagacacaaaaaacccttcaaaaaatcaacgaatccaggagctggttttttgaaaagatcaacaaaattgatagaccgctagcaagactaataaagaataaaagagaggagaatcaaatagacgcaataaaaaatgataaaggggatatcaccactgatcccacagaaatacaaactgccatcagcgaatactataaacacctctacgcaaataaactggaaaatctagaagaaatggataaattcctcgacacctacaccctcccaagactaaaccaggaagaagttgaatctctgaatagaccaataacaggctctgaaattgaggcaataattaatagcttaccaaccaaaaaaagtccaggaccagatggattcatggccgaattctaccagagggacaaggaggagctggtaccattccttctgaaactgttccaatcaatagaaaaagagggaatcctccctaactcattttatgaggccagcatcatgctgataccaaagcctggcagagacacaacaaaaaaagagaattttagaccaatatccctgatgaacatcgatgcaaaaatcctcaataaaatactggcaaaccgaatccagcagcacatcaaaaagcttatccaccatgatcaagtgggcttcatccctgggatgcaaggctggttcaacttacgcaaatcactaaacgtaatccagcatataaacagaaccaatgacaaaaaccacatgattatctcaatagatgcagaaaaggcctttgacaaaattcaacagcccttcatgctaaaaactctcaataaattaggtattgatgggatgtatctcaaaataataagagctatctatgacagacccacagccaatatcatactgaatgggcaaaaactggaagcattccctttgaaaactggcacaagacagggatgccctctctcaccactcctattcaatatagtgttggaagttctggccagggcaatcaggcaggagaaggaaataaagggtattcaattaggaaaagaggaagtcaaattgtccctgtttgcagatgacatgactgtatatttagaaaacgccatcgtctcagccccaaatctccttaagctgataggcaacttcagcaaagtctcaggatacaaaatcaatgtgcaaaaatcacaagcattcttatacactaataacagacaaacagagagccaaatcatgagtgaactcccattcagaattgcttcaaagagaataaaatacctaggaatccaacttacaagggatgtgaaggacctcttcaagcagaactacaaaccactgctcaatgaaataaaagaggatacaaacaaatggaagaacattccatgctcatgggtaggaagaatcaatatcgtgaaaatggccatactgcccaaggtaatttatagatacaatgccatccccatcaagctaccaatgactttcttcacagaattggaaaaaactactttaaagttcatatggaaccaaaaaagagcctacatcaccaagtcaatcctaagccaaaaggacaaagctggaggcatcacgctacctgacttcaaactacactacaaggctacacagggtactccaacagacctgcagctgagggtcctctctgttagaaggaaaactaacacaaaggacatccacaccaaaaacccatctgtacaacaccatcatcaaagaccaaaagtagataaaaccacaaagatggggaaaaaacagaacagaaaaactggaaactctaaaaagcagagcgcctctcctcctccaaaggaacgcagttcctcaccagcaatggaacaaagctggatggagaatgactttgatgagttgagagaagaaggcttcagacgatcaaattactctgagctacgggaggacattcaaaccaaaggcaaagaagttgaaaactttgaaaaaaatttagaagaatgtataactagaataaccaatacagagaagtgcttaaaggagctgatggagctgaaaaccaaggctcgagaactacatgaagaatgcagaagcctcaggaggcgatgcgatcaactggaagaaagggtatcagtgatggaagatgaaatgaatgaaatgaagatcaacaaaattgatagaccactagcaagactagtaaagaagaaaagagagaagaatcaaatagatgcaataaaaaatgataaaggggatatcaccaccgatcccacagaaatacaaactaccatcagaaaatactacaaacacctctatgcaaataaactagaaaatctagaagaaatggataaattcctcgacacatacaccctcccaagactaaaccaggaagaagttgactctctgaatagaccaataacaggctctgaaattgtggcaatagtcaatagcttaccaaccaaaaagagtccaggaccagatggattcacagccaaattctaccagaggtacaaggaggaactg

SEQ ID NO: 14089 - DNA, 2738 bp, Homo sapiens
  SIMILAR (1030)..(1296): 961254mologous to Cloning vector pZC320 SopA,accession number U26464,Smith-Waterman Score=440.
atgaatgaaatgaagcaagaacagaagtttagagaaaaacgagtaaaaaatgaacaaagcctccaagaaatatgggactatgtgaaaagaccaaatctacatctgattggtgtacctgaaagtgacggtgagaatggaatcaagttggaaaacactcttcaggatattatccaggagaacttcaagaacctagcgaggcaggccaacattcaaattcaggaactacagagaatgctgcaaagatattcctcgagaagagcaattctaagagacataattatgagattcaccaaaattgaaataaaggaaaacaatgtcaagggcagacagagagaaagctcagagaagtttgatcatctgaagccttcttctctcaactcgtcaaagtcattctccatccagctttgttccattgctgttgaggagctgcgttcctttggagggggagagcgtagaccatcagctgcaggattgtttgagtttgctggaggtccactccagaccctgtttgccttggtatcagcaacgaaagctgtggaacaacgaatattgctgaacagcaaatgttgctgcctgatcattcctctggaagcttcatctcagagggcctcgctgtcaccttgcagtttgatctcagactgctatgctagcaatgagtgtggctccatgggtgtaggaccctctgagccaggtgcaggatataatctcctggtgtgccctttgctaagaccattggaaaagtgcagtattatggtgggagtgacccgattttcaagggacatggatgaagctgcaaaccatcattctcagcaaaataacagaagaacagaaaaccaaacaccacatgttctcactcggatggccctatatttgtcactgagagcagaagggttgagaacttagatcctgacaggaggcccacctttattggagaaatggctctgcaacttaggccacagaacttcttaccacttggaagcaaaatagttgctttaatggtaaccaaatgccctccttcaagacagtatttcaagaaggaggagtatacgtatattatacaaacatatccaatccctttagaagataattatcaatatcatgcagggaagctggaacacacacacaaaatcgagtactatctagaagatcaagccacaaatctcaagagaagcaagacttttgttggaaaacaaaacaaaatcttgagacatgaaggatctgtaatggacacctgtcgattgtgtctgttcagcagctcctctcccacctgtcttccagtacaacaccttatttcattggagagaaaggttctacctcttctccttaaggttttagtggacagccaaaccagtcttcagtctacagggggcagactgacacctcacacggccgggtacccctctgagacgaaacttccagaggaacgatcagacagcaacatttgctgttcagcaatattcgctgttctgcagcctctgctgctgatacccaggcaaacagagtctggagtagacctccagcaaactccaacagacctgcagctgaggggtcctgtctgttagaagaaaaactaacaaacagaaaggacatccacaccaaaaacccatctgtacatcacccttcatcaaaggcccaaaagtagataaaacccacaaagatggggaaaaaacagagcagaaaaactggaaactctgaaaagcagagcacctctcctcctccaaaggaacgcagctcctcaccagcaatggaacaaagctggatggagaatgactttgacgagttgacaggagcaggttttagaaggttggtaattacagacttctcagagctaaaggaggatgttcaaacccatcacaaggaagctaaaaaccttgaaaaaagattagacaaatgtagaacgaatggctaactagaatggatgaatggctaactagaataaccaatgcagagaagtccttaaaggacctgatggagctgaaaaccaaggcacgagaactacatgacgaatgcacaagcctcaggagccgattcgatcaactggaagaaagggtatcagtgatggaagatcaaaagaaaaatgaatgaaatgaagcgagaagggaagtttagagaaaaaagagtaaaaagaaacgagcaaagcctccaagaaatatgggactatgtgaaaagaccaaatctacgtctgattggtgtacctgaaagtgatggggagaatggaaccaagttggaaaacactctgcaggatattatccaggagaacttccccaatctagcaaggcaggccaacgttcagattcaggaaatacagagaacgccacaaagatactcctcgagaagagcaactccaagacacataattgtcagattcaccaaagttgaaatgaaggaaaaaatgttaagggcagccagagagaaaggtcaggttaccctcaaagggaagcacatcagactaacagtggatctctcagcagaaaccctacaagccagaagagagtgggggccaatattcaacattcttaaagaaaagaattttcaacccagaatttcatatccaggcaaactaagcttcataagtgaaggagaaataaaatactttacagacaagcaaatgctgagagattttgtcaccaccaggcctgccctaaaagagctcctaaaggaagtgctaaacatggaaaggaacaaccggtaccagccgctgcaaaatcatgccaaaatgtaaagaccatcaaggctag

SEQ ID NO: 14090 - DNA, 898 bp, Homo sapiens
  SIMILAR (745)..(1074): 641254mologous to Escherichia coli phosphotransferase system trehalose permease,accession number U14003,Smith-Waterman Score= 301.
atgctgaggcggccgcgtagggccctgtgcagctttcgcctcgccttgccgcccgctccagccgcttcggctacttccgccgctggcttcggctacttccggccgccgccggcgttcgccacctcctacctaatcaagcctccggcagccctccccgccccgccgggctccgccccctcacccgcccgcccgcccgcgagcttgcccctccccccgagcctggctccgaagcgcctcggctatctccggatactggacgaaggcgaagcaggcggccgcttcggctgcttccgaaaacacccgaacgcgcggcagacggatcatctggcattacttccgggagcagatgatctggcgttactgccccctggcggcccaacggaacgctcctgatcactgccgccacggccagccacccggtgttggcgatccctgcccatctatgctccccacggtgcccgagcttcttaacgacagtgacatgttcagggccccagcatcatgcagccaggggcagggtcccgtttcactgcatgaatgtggcaagagcttccgctaccgctcagacctgcggcgccactttcccggcacacagcgctcaagccccacgcatgtccgcgctgcggcaagggttcaagcacagcttcaacctagccaaccacctgcgctcgcacaccgggggcggccctaccgctgctctgcctgccccaaggggttccgcgactccaccgcctgctgcaccaccaggttaaaacaattacaacataaccagatttggggggtgcttggtcagcaatattgtggggagttactccagaccaccctggccatgcacccggggtccccgaaggcccctggggtctccgagcccggcccccgggagcgtgtgcctttgtga

SEQ ID NO: 14091 - DNA, 551 bp, Homo sapiens
  SIMILAR (235)..(444): 871254mologous to Escherichia coli glycine-tRNA synthetase, beta subunit,accession number U00039,Smith-Waterman Score=314.
ccagcaccgcccgccgctgccgcccccagggtcccgtttcactgcagtgaatgtggcaagagcttccgctaccgctcagacctgcggcgccactttgcccggcacacagcgctcaagccccacgcatgtccgcgctgcggcaagggtttcaagcacagcttcaacctagccaaccacctgcgctcgcacaccggggagcggccctaccgctgctctgcctgccccaaggggttccgcgactccaccggcctgctgcaccaccaggtcgtccacactggtgagaaaccctactgctgcctggtctgcgagctccgcttctcctcacgctccagcctgggccgccacctcaagcgccagcaccgtggggttctcccctctcccctgcagcccggccctggcctgcccgccttgagtgcgccctgctccgtctgctgcaatgtggggccctgctcggtgtgcgggggctcaggggccggcggcggagagggccccgagggggcaggcgcgggtctgggcagctgggggctggcagaggcggcagctgcggccgc

SEQ ID NO: 14092 - DNA, 3789 bp, Homo sapiens
  SIMILAR (286)..(1191): 901254mologous to Homo sapiens ORF2 contains a reverse transcriptase domain,accession number M80344,Smith-Waterman Score= 1404.
ttaatttgatataggtaaggctcttcggtgatccaagagcagcccctttgggatttctgggcaatatggcacaacatcgtttctggcattttggtgtactgaagaatttatctccaacacaccactggagtcagacagctccctttcaaatggactttcaattagtctcccttcctggggtgaggccttccaccactcagtgctatcagctgagaagcccagcatttccagttgagaattatcttcgttctttgggaacgaagctttgggagatatttgccatgcaacatctcctgttgtccctgtttctggagaagatctcttctccttctccactgctgtaatctgcatttcagtctctgttaatggtgagaaagtccagggatcagggctgctttgttgattgtcacagaatgggtttgacttattctcattctctgctggctctgagctgtctaggtagtcataaatattttcagacttaggatcagcaccgacacgttcatcatcagaacatgagcttgttgaaatgaccctggcatcctctggctgcacagttgcagaaatgtcatgttcatttttctcttggccatcagtggtaattagttcagattcttggtgattctgttcactccagttgccttggttttcttcttgatacccagaactgggttgctggccccaggaggacagtgcaactgaagagtcatttaactcaggacttgatgcacttgaatgagtatactcactagaaatagtatctctgtcaaaatttccagacgaaccggctcctggaaggctattttcagaccccttaacgtcaagatttttggttatctcagaacgtgtgctgctgacatgcacatcactgtctatagggacgtccccaaagtcaagacttcggggaactctgtgaggtggccctccacccacgttctctggctctagaaagttacattcttcagttttctcaagatccttttcaggtacagatacatattttgtgaaattcatcccatctgaagtctcagtagtttcacctgaatttctttgactcatgaggtgtttttcatgggtatcttttggctgcaggttatctgcggacatccctgtttgcacatcacgggagtctagattgtaagacccctcctcatactctaaaacttcctctggttcctcggtttgaggactgaaagtgacagcaagagagctgattttgcctgatttaatgcagatttcctgatgttcagatgcaaccagagaagacagttcctggtcactctgccctttttcagaaatccctgaggcattctccacaccagaggcgatcacctcctcttcatcaaggtgccccctgtcagtggctccctgggcttccttctcactttcactttgtccatcgccatgacctttccatggatctgggtgtggaaaataccctggattctcaagcctagtcgccaaggatgctgcatcactttgcagggtttccctctctgtgtcctgcttgtcaagatgagatataagtgctttggcaatacatgtgcacaaacatgagatgctgctgtgcaaaagtgtgagttgtcggtttgtttcattgtacagttgcatcatgctggggtcgtcgtaactggactggctgctttccccgacgtcatcctccatggagatattcttaccatctgtgtgctctgtcttgagttcattttcatccaggttgtgagtggtatttatttcagaactgttatctgtatgaggtgaagcccacatgtctaggttcccaggacctgaactgattcgatttcgagatgactgttgcagtgactgttgcagtgactgaggaggaatgtcagtctcctctgccatggagttaccatcttttgactcaaaaccttcctctttagcaaatggcttgtgttcagtttccttttcgtctccagcaaatgttggtgatgtgtaagagtctgaggtggaataattggtatctaagggggaaggcaccgaatcttctcctaggttggatgcactgtaatcagaacatttgtaagataagaaggaatcttcccaaggaactaggacatctgaccctcctttcttcatattctcctcaaaaaggttccaggaatctaccttttcatataccttgcccctagttttaggatccactaaaccattctgatcttcttttggtggcttagaattagtccatgtgtgatccagatcagaactgggatttccaggtgcaaagatgtgatccctggagtcattgtttttcttgccccagatttctggagctgcttcattgtttatctcactgggtgaattgtccagtagttctgaagaagaaaaggcaaacccactttttgccatggcccactcattcgggtccctaacagaaggtgtcttgctgcttgttgggtgcaaatcccaggtattttttaaagcttcatcatgatcttctttaccaaatgcactccaggctgggaatggcgccacagctgctggttcaccatcatctgtaggatttccccagggctcgggcatggctgtgggagagcgaccagaatgccacaaagaagcaaagtcttctatcaggtggtttgttccttggggagatgtatttggcaaaggtgacttctccatgggcaggttctggaacggcaagctttcctcatttttgtcttgaatatcattgctacccagttcaggctgaccaaattcagactcccagggacctgactttgtaaattcgaggctctttggttgaaatacagaatctgaggctctcctatcaatggagcttggcttatgctctttccatgattcagggctctggaaaacagattcctgttcactggaactccacgcatctgcaatatttttggagtcaatttccaaaccaccccaccagctgctgcaccgtgcatgggtctgaggtggccccatgtgacctgtgtcagttgctttttgggtcatatcttctgtatagagtgaggctggttcttcagtggatggcgagctttctactaaactattcatgggtgttggtgggatcctctttccagtattttttagcctttctggggaaggggattcatctcccacaaaatctgtcaggctcaaatttctttcagagttatctctgggactgtcttgtctctggacaaactcctcatcatgttccacaaggctatctttgccagcccctgacaaaagtgaactggatgaataattagacatgttcgttcccatgccatcaagtccttcaggcccagcggggagctgtccttctgacaggtcgctgttggggaagaagtcatctgctggggagtagtctgcagaatgagaagattgctgggactgcccagaagccatgggtgctgggtcaaaattgaagaggtcgaagtgctcaccgtgttctccagaccatgcatgttcctccgccaccgccccttcagggatggggctgtaggagtcaagccctgggagaagggtgtggtgaggcccagcaccttctcccacggggctgtcgtcactgaggaaaacagagctctccttggatgagcggctgctcctaatggtagccagtccgccctgccctgaagctgggtgttctctttctatagcaactgcccaggaagtaagagcctgaccagaggaaaacgtcaccatcctcttcacaccccatcccaataggtacacctcagtagatacagaggtctgcagacctgccctcttggcaacaaagaaagtgtagtcatagagaccattgtccaacaccaggaccat

SEQ ID NO: 14093 - DNA, 3957 bp, Homo sapiens
  SIMILAR (735)..(10): 781254mologous to Homo sapiens putative p150,accession number U93565,Smith-Waterman Score=934.
atggttttaaagccatgtggctgggtaagatcatcaaggagaaagtggaaagagagaagagaaaggggacaggaaacaaagttgggtgtgaatatttggaggcttaataaggaagagcaaccagcaaaggcaactgaagggcagtcggtgaatccggagaaaaacaagagcctcacagaccttgagattcaactcagcagaattacagagtacgggtatgatggctttttgaagtggctgaattgtctatttcacagcaatattaccagtgacttgaaagcatttacagacaagtttggttttgatgtcctcatcctgttctccagctatctgtcagaggagcagcagccgagacgacagattgctgtgtactcagaaaacatggagctgtgcagtcagatttgctgtgagctggaagagtgtcagaacccttgcctagaactggagccctttgactgtggctgtgatgagatcctggtgtaccaacaagaggacccttcagtgacttgtgatcaggtggttctcgttgtcaaggaagtcatcaacaggaggtgtccagagatggtctccaatagccggacatcctcaacagaagccgtggcaggcagtgcccccctctcccaggggtcttctgggattatggaattgtatggttctgacatagagccacaacccagctctgtgaatttcatagagaaccctccagatctcaatgattctaaccaggctcaggtggatgccaatgtagaccttgttagcccagacagcggactggctaccattaggagcagccgctcatccaaggagagctctgttttcctcagtgacgacagccccgtgggagaaggtgctgggcctcaccacacccttctcccagggcttgactcctacagccccatccctgaaggggcggtggcggaggaacatgcatggtctggagaacacggtgagcacttcgacctcttcaattttgacccagcacccatggcttctgggcagtcccagcaatcttctcattctgcagactactccccagcagatgacttcttccccaacagcgacctgtcagaaggacagctccccgctgggcctgaaggacttgatggcatgggaacgaacatgtctaattattcatccagttcacttttgtcaggggctggcaaagatagccttgtggaacatgatgaggagtttgtccagagacaagacagtcccagagataactctgaaagaaatttgagcctgacagattttgtgggagatgaatccccttccccagaaaggctaaaaaatactggaaagaggatcccaccaacacccatgaatagtttagtagaaagctcgccatccactgaagaaccagcctcactctatacagaagatatgacccaaaaagcaactgacacaggtcacatggggccacctcagacccatgcacggtgcagcagctggtggggtggtttggaaattgactccaaaaatattgcagatgcgtggagttccagtgaacaggaatctgttttccagagccctgaatcatggaaagagcataagccaagctccattgataggagagcctcagattctgtatttcaaccaaagagcctcgaatttacaaagtcaggtccctgggagtctgaatttggtcagcctgaactgggtagcaatgatattcaagacaaaaatgaggaaagcttgccgttccagaacctgcccatggagaagtcacctttgccaaatacatctccccaaggaacaaaccacctgatagaagactttgcttctttgtggcattctggtcgctctcccacagccatgcccgagccctggggaaatcctacagatgatggtgaaccagcagctgtggcgccattcccagcctggagtgcatttggtaaagaagatcatgatgaagctttaaaaaatacctgggatttgcacccaacaagcagcaagacaccttctgttagggacccgaatgagtgggccatggcaaaaagtgggtttgccttttcttcttcagaactactggacaattcacccagtgagataaacaatgaagcagctccagaaatctggggcaagaaaaacaatgactccagggatcacatctttgcacctggaaatcccagttctgatctggatcacacatggactaattctaagccaccaaaagaagatcagaatggtttagtggatcctaaaactaggggcaaggtatatgaaaaggtagattcctggaacctttttgaggagaatatgaagaaaggagggtcagatgtcctagttccttgggaagattccttcttatcttacaaatgttctgattacagtgcatccaacctaggagaagattcggtgccttcccccttagataccaattattccacctcagactcttacacatcaccaacatttgctggagacgaaaaggaaactgaacacaagccatttgctaaagaggaaggttttgagtcaaaagatggtaactccatggcagaggagactgacattcctcctcagtcactgcaacagtcactgcaacagtcatctcgaaatcgaatcagttcaggtcctgggaacctagacatgtgggcttcacctcatacagataacagttctgaaataaataccactcacaacctggatgaaaatgaactcaagacagagcacacagatggtaagaatatctccatggaggatgacgtcggggaaagcagccagtccagttacgacgaccccagcatgatgcaactgtacaatgaaacaaaccgacaactcacacttttgcacagcagcaccaactcccggcagacggcccctgacagtctcgacttgtggaacagagtgattttggaggatactcagtccactgcaacgatctcagatatggacaatgatttggactgggatgactgcagtgggggtgcggcaatccccagtgatggtcaaacagaaggatacatggctgaaggttccgagccggaaacccgatttacagtgagacagctggaaccctggggcttggagtatcaggaagcaaatcaggtagattgggagctccctgcctctgatgagcataccaaggacagtgctcccagtgaacatcacacattgaatgagaaaagtgggcagctaattgcaaacagtatttgggattctgtcatgagagataaagacatgtcatcattcatgttaccaggctcctcacatatcacagattcagagcaaagggaattgcctcctgaaatccccagccattcagcaaatgttaaagacactcattccccagatgcgccagcagcctctggaaccagtgaatcagaggcacttatatctcatcttgacaagcaggacacagagagggaaaccctgcaaagtgatgcagcatccttggcgactaggcttgagaatccagggtattttccacacccacccactccctacttagcttacaaacttactcagagcactcaaaacaattgggaagcctggcgacagcacgagactgtgtctcaaaaacaacaacaacaacaacaaaaactcaacaataagaaaatgggcaaaagacctggacaggtacctcacaaagaagatatacaggtgacagaatggcccaaatccaaaaccctgacaccaaatgctggtgagaatgcaaagcgacaggaactcgcattcattgctggtgggaatgcaaaatggtccagccactttggaagagtttggcagtttcttacaaaattaagcatactcttaccttacaatctagccatcatactccttggtaattacccaaatgcactgaaaatgtatgcccacacaaaaggcttcacatgtatgtttatagcagcttcattcataattgccaaaacttggaagcagccaagacgtccttcagtaggtgaatggaaaataacctgtgacttgtccagacaatggaatattattcagcattaa

SEQ ID NO: 14094 - DNA, 933 bp, Homo sapiens
  SIMILAR (192)..(79): 941254mologous to Homo sapiens similar to rat olfactory receptor OR18; similar to S29710 (PID:g423702),accession number AC004908,Smith-Waterman Score=174.
tctgccagccctacccacggccccggccccgcaccgggacacatggaagctgccagccccccagccaaggatcagctgagccctagggctgatgcttgcctacgttgctgagaatggcactgaaggcccagccaacaaaggttaaccccaggacactcctggacagtgatcctgatgtctgttgtgagctgcacactcaagggtgttgataaccagccccagtcgggcgccatggcgtctgccgagcccctgacggcgctgtcccgctggtacctgtatgccatccacggctacttctgcgaggtgatgttcacagcggcctgggagttcgtggtgaacttgaactggaagttccctggggtcacaagcctgcgggccctcttcatctacggcaccaccatcctcatcgtggagcgcatgtacctgcggctgcgcggccgctgcccgctgctcctgcgctgcctcatctacacgctctggacctacctgtgggagttcaccaccggcttcatcctgcgccagttcaacgcctgcccctgggactactcccagttcgactttgacttcatgggcctcatcaccctggagtacgccgtgccctggttctgcggggccctcatcatggagcagttcatcatccgcaacaccctccgcctccgcttcgacaaggacgctgagcccggggagcccagcggcgccctagccctggccaacggcactgtcaagactgactgagcaggaagcggtgtggggggcctgggggatctctcatgggaactcatgggacaaagagaccaagctggtgaggttgccccatccatgcagcaaaagcccttgcttccggccaagccttcagccctatagggcacacagagccccctaacgtccgcgggggccggtgttggggggccgtggtcaggtgttgggggatgg

SEQ ID NO: 14095 - DNA, 455 bp, Homo sapiens
  SIMILAR (121)..(393): 1001254mologous to Homo sapiens cytokeratin 18 (424 AA),accession number X12883,Smith-Waterman Score=447.
agtctgctgaggttggagctgctgagacgacgctcacagagctgagacgtacagtccagtccttggagatcgacctggactccatgagaaatctgaaggccagcttggagaacagcctgagggatcctgctgcaccttgagtcagagctggcacagacccgggcagagggacagcgccaggcccaggagtatgaggccctgctgaacatcaaggtcaagctggaggctgagatcgccacctaccgccgcctgctggaagatggcgaggactttaatcttggtgatgccttggacagcagcaactccatgcaaaccatccaaaagaccaccacccgccggatagtggatggcaaagtggtgtctgagaccaatgacaccaaagttctgaggcattaagccagcagaagcagggtaccctttggggagcaggaggccaataaaaagttcagagttca

SEQ ID NO: 14096 - DNA, 1044 bp, Homo sapiens
  SIMILAR (587)..(958): 591254mologous to Mus musculus cytokeratin,accession number M22832,Smith-Waterman Score=332.
ggcaaagacttcttcccaaatgccaagtccacaagaaggaatgtgtggcaaagcttgcacaccagccctctctcaggctgacagcctttgccctttgctcaggttggcttcagaggtggagggatattcacttcctgcttgtgcagagccttatgttcagtcagagtgtctctctcatctgtcagtgtggtctctccagcatgcactctcctccctggctagcatgagcttcaccacttgctccgccttcaccaactactggtccccgggttctgtccaggtgcccagctatggcacccagcctgtcagccacgcagccagcgtctatgcaggcctggggggctctggttcccggatctccgtgtcccacttcaccaatggccgggggtctggcaggaatgggaggcatccagaacgagaaggagaccatgcaaagcctgagagaccgcctggcctcctacctggacagggtgaggggcctggagaccgagaattggaagctggagagcaaaatccaggagcacctaaatgtcactcggctgtagctggagacagagatcgaggctctcaagaaggagctgctcttcatgaagaagaacaacgaagaggaagcaaaaggcctacaagcccagattgccagctctgggttgaccgtggaggtagatgcccccaaatctcagaccttgccaagaacatggcagactcccgggcccaatatgacaagcttgctcggaagaaccgagaggagctggacaagtactggtctcagcaaatcgaggagagcaccagagtggttaccacacagtccgccaaggttggagctgctgagatgacgctcacagagctgagacatagagtccagtccttagagatcgacctggactccacgagaaatctgaaggccagcttggagaacagcctgagggaggtggaggcccgctatgccctgcagatggagccatcattgttattttcaaagattatctttgggagagtttgggagatatcatacttacatgtctttgagggcaagcaagttgttgt

SEQ ID NO: 14097 - DNA, 2040 bp, Homo sapiens
  SIMILAR (832)..(2844): 941254mologous to Homo sapiens putative p150,accession number U93569,Smith-Waterman Score=3249.
atgcctgttccccagctcccgccgcccgtatcccgcttggccgccaccgccgccgcctcagtcacagagccaggcccaaacccggaagccgtccgcagtgcctcggccgagccggaagtgaaggagggctttccctctcaaaaccacagtgtgggacactccaaccttatcccatcaggaggctctgtggctccaagctctgggcgcagccattacggatacgcctcggaggatgggacctgctcgaagctgcgagtgcggcctcggctggcggcggcaccagccgccccctttgcctttgtggccgaccttgcttcatgctgccaaggattgagtttctttgaggggatactgctcgttcgggggccctacagaaggctgagggccacagttgtaagggatcttgtggctgtcaggatggcagaggagcaggagttcacccagctctgcaagttgcctgcacagccctcacacccacactgcgtgaacaacacctaccgcagcgcacagcactcccaggctctgctccgagggctgctggctctccgggacagcggaatcctcttcgatgttgtgctggtggtggagggcagacacatcgaggcccatcgcatcctgctggctgcgtcctgcgattacttcagcatgagcttcaccactcgctctaccttctccaccaactactggtccctgggctctgtccttgcgaccacctacggcgcccggctggtcagcagcacagccagagtctatgcaggcgccgggggctctggttcccggatctctgtgtcccgctccaccagcttccagggcggcttggagtccgggggcctggccgcggggatggccgggggtctggcaggaatgggaggcatccagaacgagaaggagaccatgcaaagcctgaacgaccgcctggcctcttacctggacagagtgaggagcctggagaccgagaaccggaggctggagagcaaaatccgggagcacttggagaagaagggaccccaagtcagagactggagccattacttcaagatcatcgaggacctgagggctcagatcttcgcaaatactgtggacaatgcccgcatcgttctgcagattgacaatgcccgtcttgctgctgatgactttagagtcaagtatgagacagagctggccatgcgccagtctgtggagaacgacatccatgggctccgcaaggtcattgatgacaccaatatcacacgactgcagctggagacagagatcgaggctctcaagtaggagctgctcttcatgaagaagacccccgaagaggaagtaaaaggcctacaagcccagattgccagctctgggtttgaccgtggaggtaagatgcccccaaatctcaggacctcgccaagatcatggcagacatccggggcccaatatgacgagctggctcggaaagaaccgagaggagctagacaagtactggtctcagcagattgaggagagcaccacagtggtcaccacacagtctgctgaggttggagctgctgagacgcacgctcacagagctgagacgtacagtccaggtctttggagattcgacctggacttccatgagaaatctgaaggccaagcttggagaacagccttgagggaggtggaggcccgctacgcccttacagatggagcagctccaacgggatcctgctgcaccttgagtcacagctgggacagacaccgcgcacagaggcacagcgccaggcccaggaagtatgaggccctgcttgaacatcaaggtcaagcttggaagctgagatctgccaccttacccggccgccttcttggaagattggcgaggactttaatctttggtgattcctttggacgaacgcaactccatgcaaaccatccaaaagaccaccacccgccggataagttggattgggcaaagtggtgtcttgagaccaattgacaccaaagttcttgaggcattaagccagcaagaagccagtggtacccttttggggaagcaggaggccaataaaaagtttcagagtttcaaaa

SEQ ID NO: 14098 - DNA, 594 bp, Homo sapiens
  SIMILAR (328)..(492): 401254mologous to Homo sapiens IEX-1=radiation-inducible immediate-early gene,accession number S81914,Smith-Waterman Score= 74.
cgggacccagaaaaataagagtgtcgatggtgggtgtgtattagcctggtggtaaaatggtcgataaaaacatcaacacgataggctttgttgacatagttggaaaactgctctctcatttttaaaactttatttccacttccccagctttgaagatttctatgttaggaaaagccaaactaaatatactggctatggtgttgtaacaatgctggtttctggaatggtgccatgtcctccccctccctctcctccaactcctttaaaaatatgactatttttgaaatgcagcccgaggagggagcaatcaagggttcagaacaataagcgcccttcacacattcaagttcccagacaccaggtgaacgagcgagctccttgtcgggggcggggccggctgtcctcaccgaattcgcagcgccatcttcctcccgggaccgggccggcttcccttctggccagcgagggagactcccaagcaaaaggcgggtgggggtggcgttcgcttcccacggtggaaagaaccggaggcaaacactgtctggcttagcccgcagcctggaacacaatgtcaggagaccttggggctggaga

SEQ ID NO: 14099 - DNA, 1435 bp, Homo sapiens
  SIMILAR (138)..(830): 631254mologous to Plasmodium lophurae histidine-rich protein,accession number X01469,Smith-Waterman Score=1143.
atgacccatggccaccagaagctggagagaaccatgaaacagattctcccccagaggtccaagaaggcagaagccctgcccacaccacgatttcagacttctggcctccagaactgtgaaaaatacatttctgttggccactcagtttgtgataatttgtgttttaataaaggtactagagctgttcggagactggaatcatgcttagaagacctgcggctgcttttaactccacagaggattccatcccaggatatccagaggacaagaggctggccaactgcaggattagcctatgctcccgtgctggatataggctacacgcaagagaaagcttggctcagaccccctgggcagacacttgcactgagaagtgaaaggtgggaagaaataaagtgcgtgtgctgttgggagttgagagatgttttacaaagtcatcatgggtatgatctccctagatctgctcacccccttgcagaatctgaaatctacagtggacttggaagtgagcaaagagctgttcccagacaccaggtgaacgagcgagctccttgtcgggggcggggccggctgtcctcaccgaattcgcagcgccatcttcctcccgggaccgggccggcttcccttctgccagcgagggagactcgcaggcaaaggcgggtggggggggcgttcgcttcccacggtggaaagaaccggaggcaaacactgtctggcttagcccgcagcctggaacacaatgtcaggagacctggggctggagagctggaaaagtcccgggcagcctcaggataaacccgaaatccagaagtgctgtcttggggaaattattcccaagtgcccaagggacaggctcgttttcttggaaaatcctgcgatgtggggacgcatccacagaggaagttgacctgtgccctgtagagaccagttctcgccttccgaccggttctgtgtgcgcacgctcggggcggtgatggtcccttttaagaagagggttgttttcgaagtcgggccaacaagtcactggccatggactcgcggggaaggccatgtcctttctcctctcaagccctttccccgttcccggtttacatctcaaggggaaagcgcacgcggggtctcccagcaccgtcaccaccgctagtgctgtcacgccatgcgctcgcagcggcgccctttcgaccaaaggggcagaaacctgagacttcctgccgctggcttggggatgcgggggtgcagcccgggcccgggccaccggcggcggacgcgcgtggcggggcggggcagaggttgagaaccgctgactgcgaagtccgggtgcggggaagggaagggagcgaggtgcgggggaggcagaggggccggcagcccctaggcggctactccttgtcgtccacgaggtcggcgagctcctggagcactcgcaggcggccgc

SEQ ID NO: 14100 - DNA, 1417 bp, Homo sapiens
  SIMILAR (1079)..(1291): 561254mologous to Xenopus laevis egg-specific protein,accession number M76720,Smith-Waterman Score=223.
atgggcactcagtgtgatttattggcaaaatctttggaggattgtcctgtggatgaagttgaagatgcatttcagggcctgggaaaagaagatgaggaaattgaacaattcagtgataagacattcgggtcaggtgcaattgatgatgactggcgggaagcacatgagtgcctggctgaactggaagtaaagcaaccagtggcagttattgaacaaacaggcaatggagagagggatgaaatggacttgttggatgaccatgaggagaatctggcagaaaggctcagtaagatggtgattgaaaatgaactagaagatccagctattatgagggcagtgcagaccaggccagttttacaaccccaaccaggaagtctgaattccagtatctgggatggatctgaagttctgaggcgaatccgaggaccactgcttgctcaggaaatgcctacagtgtctgtattagaatatgctttgcctcagaggcccccccagggtccagaagatgatcgggacctttctgaacgagcattaccaaggcggtcaacttcacctatcattggcagtcctcctgttagagctgtccccataggcaccccacctaaacagatggctgtacccagcttcacccaacagattctgtgtccgaagcctgtccatgttcggcccccaatgccacctcgttatcctgctccctatggtgagaggatgtctccaaaccagctctgcagtgtcccgaactcttccctcctgggtcacccttttcctcctagtgttcctcctgttctcagccccctccagagagcacagcttcttggaggagcacagctacagcctggacggatgtctcccagccagtttgcacgggtccctggatttgttggtagtccacttgctgccatgaatcccaaatctcaggccccaatgtttagaccggacacaactcacctccatccacagcaccgtcgactcttgcatcagagacagcaacagaatagaagtcagcatcggaatctcaatggtgcgggagatagaggaagtcaccggagcagtcatcaagatcatctccgaaaggatcccatatgccaatctcatgttgcagcgggaaaaggattgggtctctaaaatccagatgatgcaactgcaaagcactgatccctacctggatgatttttattaccagaattactttgaaaaactggagaaactgtcagctgctgaagaaatacaaggtgatggccctaagaaggagcgcaccaagcttatcacccctcaggtggccaaactggagcacgcctataagccagagacaatcatatgtcaggcactttgccgagcacttcacatcaattatctgacaaaagcctttcaacaagcctttgaagtatctgctagtatcattaccatttacagataa

SEQ ID NO: 14101 - DNA, 560 bp, Homo sapiens
  SIMILAR (619)..(1170): 441254mologous to Homo sapiens BC85722_1,accession number AC006486,Smith-Waterman Score=319.
tcaacacagcctctgcaggttccaaccaggagatgaagccaggcactggtgtggcaagagcaccgaggcacgcttcctgagaggcacagtcacatccgtggctgtcgcggccatcgggctgccgctgccaccgctgtggaagctctcggaggccctgagacgggagaacatggtgagagcgtcagggaagttggggggtgtagcaggggtattggcgggggtgcacatcatctggtggtgatggtggctgtaggggatgttggtctcctggaaaaaggcgctgagggctgtctcgaactgccagtgggccgcctgcagcagttgcttcgcctggtcggccgcgcagcccgccgtcagcacgaactggttgatcatgacctggtgcttgagctcgtccatgttcacggacatggcgccgccgcgctgcccgctccggcctccctccgccgcccgcgcctccgcctcacgcgtccaccattagcgagccggctccggctaatacaaatatttactgtgcggctctgactcaccgcgccacgaaatcgtcgacccgggaattc

SEQ ID NO: 14102 - DNA, 1695 bp, Homo sapiens
  SIMILAR (876)..(1055): 411254mologous to Nephila madagascariensis flagelliform silk protein,accession number AF218624,Smith-Waterman Score=102.
ctaataccagggtccacagagcactgtgagaaaccctgggtaggagctggcaggataagacatgccctggtggccggttctgccctggatcaaagactcttcaccttcttctctggagatgaatcctgacaacacctcagggctgaggcagaagtcggtggaggccgagccgtgctcattgtggatggtgcaccgatacacaccgcagtctacgggggaggcctgcacgatggccaaggccgccggcccctcatcccctgcgctcctgcccacctcgcccactgggcgctgatccttggcccatgtcaagactgagtcactaagaatgttgaaaaactggcaccacagcttcaggctaccggaggcatcaggaaactgctccacccgaatcttccggatcacctgtggggctttcagcaggtctttggctttcctgggcttggccagtgtctcctgcttgccttcatccagggccacctctgtgtccagaccgccggccttggggctggggcccaggtctcctgccgccagctcctcctctgcccgaggcacctccagcatgctcgcctttctgcccttagggagaaatctcttcctccgggcccctagagccagttcctcaggtgtagctgccgggagacctgtcagagcctcccctgggaacttctcctcttgggagggctcctgggctatgctctctgctgagggcccctgtccaggggctgcctgcccacccgcctcccccagtcgaccagccatgctgctctcctgagaggcccccaggaggccaggcccctcaggggaaacctctccttcaccctcactggctccttctgaggccagcccagggtcctcctcgtctaccacaatggcagggacagtgagggagctgggaccaggaccccaggagcctcgggcagcagcaagggcctggcggccagcctgcacctcacggtccaggaggccggtgaggcggcgggaggtacaggggctcagcagcagggtctgtgcactctgcaccaggtggttgttctccacacgctccaggatgcgcctcgatgtccggggactaagcccagccacttccacagtgggtgtcagagtggctgagggcaccagacctccggtggctgcccccacctgggactctccccctgctccacttgtctctgtgctggacagcttcagcagcagaagcaggtagttcttcagggaatctatgaggccagggtcacagctccggggacctggggtccgcccctccacatctggtacctgggcgcaggccccctcactgctggtggccatggtttctggtgggtgactctgagtgggggtccccagccccaggtgcagtgttggggcagaactcatcaggacctgatcctcagagggcaggaaggtggctgtgctcccgtgctgagaagtcggggtgctacacggccccgcctttgggctagctgtcagcccagttccaggaagagaaggcatcgtgggtacctcctggctcaggccagctagaggacagccaccctgatccatacacggcactccccctggccgctcctccttggggcactggaacgggctgtcctcctgcttggcctcgactgggcctgatgactgtggccctcggcatctctctcctcccacctgctccacactcccctcatggggcggctgtgctgggagcat

SEQ ID NO: 14103 - DNA, 643 bp, Homo sapiens
  SIMILAR (564)..(421): 1001254mologous to Homo sapiens Human colon tumour protein CT607, SEQ ID NO:203,accession number B11903,Smith-Waterman Score= 232.
atgactaacctatctattaaaagcgtaattaccattcaatcagggactgaacagtgcatcaaacccaggacatttggaaatcacaaggggctagcaggctgggtttctgaccacgtgtctgttgactgtgactttgggtcaccaccctgtggggttttgtctttacgactaagccgattccctctgcctcgctggggaatcaaacttcccagtgacaacgacagcggccagcacgggacgtccaccagcccggcagggcttgacgctgtctcagacccggggaagggaggagtcgccagggccgccgaagccgaactggcagaggaaaagcagaggaaggcggcgcgcgaactcgccagcaaaggagggctgcgctgctcccggagcggagcgcctcgcagcccggaccgcgggactcaccgcgctggcggcggcggcgccagacgacgcggggccgggcacgtcctgcctcctcaggcgggacttgaggctcttcatggctaactcttgcctggcccccgcgcgaaccttaaaggctgcggagtgccagcgcgcaaggagtagacggcagcggctgcagcagaggcggcgcgggctgtaccagccccaccggcctgccacctgcgggccccgggcagcagac

SEQ ID NO: 14104 - DNA, 1040 bp, Homo sapiens
  SIMILAR (420)..(989): 271254mologous to Arabidopsis thaliana contains similarity to phytocyanin/early nodulin-like protein~gene_id:K19P17.3,accession number AB007644,Smith-Waterman Score=103.
tcagaaactcaaaagcagcccaagggcaggtcctgcaaagggctgctgcgcattgactggcagccactcctgggccaggtatgtgctggtggtgagcagcagaggccgcgtgacagagccagcggctccgtcccctagctgacactccccggaggagcaatcggccgtgctctgctgcaggcctcctgtttcctcagtcattctggtctcaggaactgagtcagggagcatttctgctgcctccttcatcaccatgcctgcactgcctacctggtacagccgcagcctctcgccatcagagaagtcccaggacacggccttctgtccaggagagaagggagacgcatggtctctgtgctcataggtgtgagtggagggctggttcacctgcacatggaccctgagctcataggtttgtgtcaagggctggttcacctgcacatggaccctgagctcataggtgtatatcaagggctggtacacctgcacgtggaccctattctcgtagatgagtgtcagaggctggttcacctgcactgtggtctctgcaccgtgctccttgagctcgtaggcgtgtgtcacaggctggttcacctgcgcacagtccctgagctcataggtgtgcatcgagggctgcttcacccgaacatacatcaagggaggatgcagaacaggctccatgaatgcaaggactttgtcctgttcaccaggaacaacctccatcccgaaagtcagtcgtgacttcacctcacattccgccagaaaccgactgcagattgttaccaaagaatccttgtgcaaacaaacaccagccaactgcgactggaggtagagccgttcctccagaggttcagcatgttcctccacgcagcggcatgactctcggatctcaccagcctcttgcccttcagtttcaaatgcaggccacggacgctgcacgactcggtctctctccacagggccagggctcccctccaggacctcgaagcaccctactgttggggtgcttgtctctgtttcagttgtccctcttaaggtaa

SEQ ID NO: 14105 - DNA, 1657 bp, Homo sapiens
  SIMILAR (1864)..(1238): 811254mologous to Homo sapiens unknown protein,accession number M22333,Smith-Waterman Score=836.
atgatcatctatgtagaaaatcctaaacaatctaccagcaaatgtgtaagagcttatacatttagcaaagttgctggacataaggcgattgaaaaacggctggaaaaactggcggttgatccacatcgcgaccgtgcgcagatgctgaaagtcgaaaacgtccagcaggcgtggcagcaatggatcaacaaactgccgcccgcacgtcgtgaggatgaagacgtgaaagagatccgttggatgatagaagagttgcgcgttagttacttcgctcaacaacttgatcacacgggcgtggaccgtggtcagccgggagcgtccacgtggtcagccagcctgatgtgttcggtgactcagccaaagcttaaaacacggaagccggggtttcttctggggctgggggagcgcaactgcttttccgtctatggtgctggccgaagctggggccggggccttggcagctgtggattttggctgcccccgcggacccggatccgagctgctgatgtctgcttggcccgctggggctggcgagctcaccgtgtgcgggtgctggcaggcaagaactctcgggcagaatccatgctgtggtccttccataaagcggctatagaagcggcacgcaccaatatcattcaggcgcaaacccgcgtcgaagcggcacaagccactgaacggcgcattgccgcagatatcgatgacagcgaactgaaagccccgcgtgacggacgcgtgcagtatcgggttgccaagccaggcgaagtgctggcggcaggcggtcgggtgctgaatatggtcgatctcagcgacgtctatatgactttcttcctgccaaccgaacaggcgggcacgctgaaactgggcggtgaagcccggctgatcctcgatgccgcgccagatctgcgtattcctgcaaccatcagttttgtcgccagtgtcgcccagttcacgccaaaaaccgtcgaaaccagcgatgaacggctgaaactgatgttccgcgtcaaagcgcgtatcccaccggaattactccagcagcatctggaatatgtcaaaaccggtttgccgggcgtagcgtggtcattcctgtattccatcaaccagacaatctgcttgcggttggatagcattgaagccaaattgcaagccctggaggctacttgtaaatccttagaagaaaagctggatctggtcacgaacaagcagcacagccccatccaggttcccatggttgccggctcccctctcaggacaacccagatgtgcaacaaagtgcgatggtgaacccgtgagcaactgtggtacctccacctgtcccacaacctacaactcagcagtaccaagggctggacgctggtgccaccacacgggtcccgcgaagcctgctgcgaagtgaaggaagccagacacaaaagtctccatcctgcgggagtcactcacaggacaattctggaggacgcaaagctgtaggagcgaggagagacaggtggtggttgggggccgggaaggggcctgactgcagaggggcaaaatgtgggctgcctctgtcggggcagaagtgccccactctagacccttaccaagtcgtcggctgtacatcgaaaacgggtgagccttatgtgtgtacgtgataccgcaataaacctgacttgtaaaagca

SEQ ID NO: 14106 - DNA, 1010 bp, Homo sapiens
  SIMILAR (381)..(253): 371254mologous to Macaca fascicularis hypothetical protein,accession number AB047946,Smith-Waterman Score=65.
ctggactgcaaactcagcttgtgcctctctccagccctgtggcctcgctggacaatttttctaatctctttggagctgatcttcatgttgaaaaaggacaagtcccatcttcagatcaacacctgtcccagcgctgccattttcccaaggctcctccttggagtgtttgtaaggcacttttgccacgaagtaacccagccaccagcctcagtggaacctccaagcctaattctggaggagactttaactcggtgacaaaaagccagccccactgtgagttgaactctttcgtgttgaccgggcactctcctgtgctctggatgatgtcggaacacgacctggccgatgtggttcagattgcagtggaagacctgagccctgaccacccaggtacagagctgtgggacagtagttgttttggagaatcatgtagtgacagatgaagacgaacctgctttgaaacgccagcgactagaaatcaattgccaggatccatctataaagtcattcctgtattccatcaaccagacaatctgcttgcggttggatagcattgaagccaaattgcaagccctggaggctacttgtaaatccttagaagaaaagctggatctggtcacgaacaagcagcacagccccatccaggtccccatggtggccggctcccctctcggggcaacccagacgtgcaacaaagtgcgatgcgtcgtcccccagactacagtaatactcaacaatgatcggcagaacgccattgtagccaagatggaagaccccttgagcaacagggcaccggattccctgggaaaatgtcattagcaagtcagtagcacggcaccaaccccacctttccctgccactgtgcggagtcccatgagaataagtcaacgtccctaagccagggcacagtccagcacacgcttcatctctgtggtcacagggttgagcctggcaggcaccgccccagctctctgaggtcggggagggcaggctgggcgatgctgaatgcc

SEQ ID NO: 14107 - DNA, 1713 bp, Homo sapiens; identical to SEQ ID NO: 6415
  SIMILAR (780)..(1196): 551254mologous to Homo sapiens secretogranin III,accession number AF078851,Smith-Waterman Score=317.

SEQ ID NO: 14108 - DNA, 457 bp, Homo sapiens; identical to SEQ ID NO: 6192
  SIMILAR (101)..(427): 671254mologous to Homo sapiens hypothetical protein,accession number AL162044,Smith-Waterman Score=356.

SEQ ID NO: 14109 - DNA, 838 bp, Homo sapiens
  SIMILAR (525)..(25): 301254mologous to Haliotis rufescens lustrin A,accession number AF023459,Smith-Waterman Score=109.
atgccatacccgaatgctctccttggtgcccgaggaaaggcaaagaaatccactcttctggaagtcgggggatggggagcccttcggcctgctgctgcactgtgggagcccctttctgggctggccaaggctggagcccactccctcagcttgcaggaaggtgtggagggagaggcgcgagcaggaaccggagctgcctgcggcgcttgcgggccagctggagttccccgtgggcgtgggtttggcgggccctgcactcggagcagccggccagccctgctggccgcgggcaatgagagacttagcacccgggccagtggctgcggagggtgtactgggtcccccagcagtgccagcccactggcgctgcgctcgatttctcaccgagccttagctgccttcccgtggggcagggctctggacctgcagcccgccatgcctcagcctcccacccactccatgggctcctgtgcggcccgagcctccccaaagagcaccaccccctgctccatggcgcccagtcccatcgatcacccaagggctgaggaatgcaagcgcatggcgtgggactggcaggcagctccacctgcagccctggtgcgggttccactaggtgaagccagctgggctcctgagtctgcgcccagtcccatcgaccacccaagggctgaggaatgcgagcgcaccgcgcaggactggcaggcagctccacttgcagccctggtgcgggatccactaggtgaagccagctgggctcctgagtctggtggggatgtggagagtatatctagctcagggattgtaaacacaccaatcagcaccctgtgcctagctcaag

SEQ ID NO: 14110 - DNA, 669 bp, Homo sapiens
  SIMILAR (261)..(4): 631254mologous to Homo sapiens CHRAC17,accession number AF226077,Smith-Waterman Score=250.
atgatgaatgaggggtctggtatctccttgtctggatgtgatctgggtacagccctgcagctgctttcacaggctattgttgagtgcctgaagcttttccagatgctcaatagatctaccattctgggatctggaggacaacagccctcttctcacagctctaccaagctgcgccccgactcaggagcccagctggcttcacctagtggatcctgcactggggctgcaggtggagctgcctgccagtcccgcaccgtgtgctcgcactcctcagcccttgggtggtcgatgggactgggagccgtggagcagggggtggtgctcgttggggaggctcaggccgcacaggagcccatggagggggtgggaggctcaggcatggcgggctgcaggtcccgagccctgccccacgggaaggcagctaaggcccggcgagcaatcgagcacagcaccggtgggctggcactgctgggggacccagtacactctccgcagccactggcccgggtgctaagtccctcattgcccagggccagcagggctggctggctgctccgagtgcgggcccaccaagcccacacccacccggaactccagctggcccacaagcgccgcacgcagccccggttcccgctcgcgcctctccctccacacctccctgcaagctga

SEQ ID NO: 14111 - DNA, 621 bp, Homo sapiens
  SIMILAR (376)..(489): 651254mologous to Mus musculus T-box 1,accession number AF326960,Smith-Waterman Score=124.
atgtgcatagaaaaatccaaaggattctacaaaaaagctactagaaccactgacttcatcgagatgcagtcttgtgtccggaattggtgggttcttggtctcactgacttcaagaatgaagcggtggaccctcgcgactcaggagcccagctggcttcacctagtggatcctgcactggggctgcaggtggagctgcctgccagtcctgtgccgggcgctcgcattcctcagcccttgcgtggtcgatgggactgggcgccgtggagcagggggtggtgctcgtcggggaggctcaggccgcacaggagcccatggattgggtaggaggctcaggcatggcgggctgcaggtcccgagccctgccccgtgggaaggcagccaaggcccagcgagaaatcgagcgcagcgccggtgggccagcactgctgggggactcagtacaccctccgcagccactggcccaggtgctaagtcccccattgcccggggccagcagggctggctggctgctcttggcattaatggagcaggtgagcgtctgttcatgaaggtggctttctctcttaagacatgctctctctcctgctcctaccttaggctcactctgagcagaggtgggt

SEQ ID NO: 14112 - DNA, 3594 bp, Homo sapiens; identical to SEQ ID NO: 2758
  SIMILAR (392)..(1297): 931254mologous to Homo sapiens CGI-89 protein,accession number AF151847,Smith-Waterman Score=1480.

SEQ ID NO: 14113 - DNA, 1616 bp, Homo sapiens
  SIMILAR (677)..(345): 1001254mologous to Homo sapiens CHRAC17,accession number AF226077,Smith-Waterman Score=557.
atgcccgccgccgcgccgcccgcgtccgcgtgctccgccacaccatcgtccgcccgccgcaggggctcggacagccgctgccggggaccggagccggcacgggcccgcgagccgtgttggaacagggcctggacagcaaatgaggaagacttattgcagaaattcagagcctagtgacctggaccagggtggaggcagcagaggaggacccaggaggcagtccaaatgtgtccggaattggtgggttcttggtctcactgacttcaagaatgaagccgcggaccctcacgactcaggagcccagctggcttcacccagtggattccgcactagggctgcaggtggagctgcctgccagtcccgcgccatgcgctcgtactcctcagcccttgggtggtcgatgggactgggcgccgtggagcagggggtggtgctcgtcggggaggctcaggccgcacaggagcccatggagtgggtgggaggctcaggcatggtgggctgcaggtcccgagccccacccgcgggaaggcagctaaggccggacaagaaattgagcacagcgccagtgggccggcaccgctggagacccagcacaccctccgcagccactggcctgggtgctaagtccctcattgcccggggccagcagggccggctggctgctccgaacaaaacagacttcaaagcaagagcagttaaaaaagacaaagagggacattatataatgataaaaggccttgtccaaaaggaaagtatcacaatcataaatatatatgcacctaacactggagctcccaaatttacaaaacaattaccactagacctaagaaataagacagacagcaacacaataatagtggggtatttcagtactccactgacagcactaaacaggtcatcaagacagaaagtcaacaaagaaacaatggatttaaactataccctggaacaaatggacttaacagatatttacagaacattctacccaacaaccgctgaatatatattctattcatcagagcatggaactttctccaagacagaccgtatgataggacacaaaacaagtcttaataaatttaagaaaattgaaattataccaagtactctccctgaccacagtggaataaaactagaaatcaactccaaaaagaaccttcaaaaccagacaaatacatggaaattaaataacctgctcctgagtgatcattgggtcaacaatgaaatcaagatggaaattttaaaattcttcaaaccaaatgataatagtgacacaacctatcaaaacctctgggatacagcaaaggcagtgctaacaggaaagttcatagccttaaatgcctatatcaaaaagtctgaaagagctcaagtggacaatctaaggtcacacctcaaggaactagagaaatgagaacaaaccaaacccaagcccagcagaagaaaagaaataatgaagatcagagcagaactaaatgaaattaaaacaaaaaaatacaaaagataaataaatcacaaagctggttctgtgaaaagataaacaaaattggtagaccattagcaagattaagcaagaaaggaagagagaagatccaaataagctcgattagaaaaaaaaa

SEQ ID NO: 14114 - DNA, 1686 bp, Homo sapiens
  SIMILAR (91)..(378): 331254mologous to Aspergillus fumigatus CGRA,accession number AY008837,Smith-Waterman Score=74.
tgtttgaatcagcaacactgtataattgggagaaaatgtcatatgttctacaggtctttcaatctcaagaaaatcctcgatcatgtaacttctatctttaataataaaagaatacacaaagccatcaattccagaagccagcacgccctccttctgatataccaaggttactggactgataaaatttcttctgtcttccaatggcgattcctcttctatcttattaagtacagtcacttgcaaggtgtctccattaatcattaaaagatgaccctcttcacagccaatgtacaagtcacttgttggagtccagcaatgcatagtcgggtgaagcaaaggatatagatcatctttcggccggaaagtctctgcctctttgcctaccagcccggcaatggctgacagtggcagcacgggaccatagatgagatctttcggcaacgactgggggaaaacgacatccgtttcattaaaaaatgacccatcttctagaggtaatttcaccgaccttgctctgaaacaatgctcctggttacttctttcaatggtccacacgctcactgtacttggacttgataagcacagctggcgccagttcatggggttaaaagacatttggttcacatccattccaggctgtgatttcttacacaaaatgatactcgattcccagttccaaagggccagttcaaattctgggagagaggagtaactagccaggtaggtgccacagtaactgaatgaaagtaaagtgtagtccaggagaatgttgcctttcaatttggtccttctggtcaatcctggaaagctgtatacgtagatgagaggttttagcttccggtcagaaaaagccacaacttcacaggggatgttagttgccatgacgcccacaattccattactacactgcagtacagtctttttcttggtttcaatattaataaatattacataattcccacaagggtagcaaatggtgttgtcgttgacaaaatgaacattctgcttagggaatccttgcacccatctttccgccgccgcggggctgcgggccgcgacgccgctgctgtgtacacccgtatcccggagaccgtaagccccgcgcccattggctctgcgctttggcccgctcccttcaaactcaggagcccagctggcttcacccagtggatcctgcacagggctgcaggtggagctgcctgccaattcctgcactgtgcgttggcaggtctcagcccttgggtggtcgatgggaccaggcgccctggagcggggggcagtgctgatcagggaggctcgggtggcacaggagcccacggcggagtggggaggtttaggcatggcggggctgcaggtccggagccctgccccatgggggaggtggctaaggccccagcgagaaatcgagcgcagcgccagtgggctggcactgctgggggaccctgtgcgtcctccacagctgctgacctgggtgctaagccccttactgcccggggtggtggggccagccggccgctccgagtgcagggccgccgagcccacgcccacccagaactcgcgctggcccgcaagcaccgtgggcagccccggttcccgcccacgcctctccctccacacctccccgcaagctgagggagcccgctccggcctggcatccaaggctccaagacatatcagaagtcccat

SEQ ID NO: 14115 - DNA, 1498 bp, Homo sapiens
  SIMILAR (149)..(3): 571254mologous to Homo sapiens Human secreted protein, SEQ ID NO: 7083,accession number G03002,Smith-Waterman Score=112.
atgggagttacctgtttaaatagaactgggtcaaagagaaattctgtgacaaatgccgtggtgataatgggtgcttttgttgagaaagagctcggagactcaaggtcggtgaaattacctctagaagatgggtcattttttaatgaaacggatgtcgttttcccccagtcgttgccgaaagatctcatctatggtcccgtgctgccactgtcagccattgccgggctggatatcatttacaaggtaaaaactgttttcaataatgagtttgacgctgcatataaacaaaaagagtttgaaattgcacgcgtgaaggaaagaaatgttcgaattcgagaaattattttagatctggaattggaagaagcagtctggcaaccagaatttgaagactgtgagaagccagagagaacgcttgttgtgcaagatgaggaggcactacctaccttccccaatcccaaatgcagtcattctaatgttgggtgggaagctgcctctggagccacctggaatgtcaggtctctgtctcagtattcctctctgattctggctctttcccaggatgccagtacaagactccgagctctgatggacatgatgggaggagttctggaagtcaagaaggaagatattttgagaatggtgattcctcaacctgctttcatggcaaaacctgatgctgtgtggactgaagaagaaaagaaaacaattcaaagattatgagaaaaaagtaaaggagttaaatgaagaaagagataagtatagaaagggatctgtttatatctacacttttggtaaggagccaaccttaaataaagtcctagatgcttgtgatgggaaatttcaggcaattgactttatcacacctggaacccaatacttcatgggctgcaggtggagctgcctgccagtcctgcactgtgcgctggcaggtctcagcccttgggtggtcgatgggaccaggcgccctggagcagtgggcagtgctggtcggggaggctcgggtggcacaggagcccacggcggagtggggaggtttaggcatggcgggctgcaggtccggagccctgcccatggggaggtgctaaggcccagcgagaaatcgagcgcagcccagtgggctggcactgctgggggaccctgtgcgtcctccacagctgctgacctgggtgctaagccccttactgcccggggtggtgggccagccggccgctccgagtgcagggccgccgagcccacgcccacccagaactcgcgctggcccgcaagcaccgtgggcagccccggttcccgcccacgcctctccctccacacctccccgcaagctgagggagcccgctccggccttggccagcccagaaaagggctcccacagtgcagcggcgggctgaagggctggctcctcaagcaccgccagagtgggtgcccaggcagaggaggagcccagagcgagcgagggctgcgagggctgccagcacgctgtcacctctcacgatga

SEQ ID NO: 14116 - DNA, 560 bp, Homo sapiens
  SIMILAR (355)..(450): 871254mologous to Homo sapiens leukotriene B4 omega- hydroxylase,accession number D26480,Smith-Waterman Score=152.
atggctgccctgctgctggtcggggcctcctggctcctggcccgtgtcctggcctggcgtacgccttctatgacaactgccaccgcctccagtgtttccagcagccccaaaacggaactgcttttgaggtcacctgagcctgtgcggggcaatgaggaggacatgaggctgatggaggatctgggccactattccgtgatgtccaactctggtggcttgggtctttctaccctgtcctgctctcgtccaccctacgttcactgcccctgtgctccaggcttcaggaggctagcctgggttcactaccaccatgggcctgagtttcaagagagccaaatggcaacgcctggcttggagggcagtgtccgtctggaaatgtttgagcacatcagcctcatgaccttggacagtctacagaaatgcatcttcagctttgacagccattgtcagatggtctctcctgggtcctgtacaacctcgcgaggacccagaataccaggagcactgccgacaggaggtgcaagagctcctgaaaacggtgatcctaaagagattgaatg

SEQ ID NO: 14117 - DNA, 2225 bp, Homo sapiens
  SIMILAR (992)..(2218): 321254mologous to Nephila clavipes minor ampullate silk protein MiSp1,accession number AF027735,Smith-Waterman Score=306.
ttttttttttcctggataatttttgtatttttagtagagacgggatttcaccatgttggccaggctggtcttggacttctgacctcgtgatccacctgtctctgcctcccaaagtgctgggactacaggcgtgacacgcgccgagccaagttccctttttttgtttgtttttgacgctggtcatcagtttcctttgcttctgggatgccttctgcaccttgctgttgggggcatcctcaatgcccatctgcagctcagcccacaggcccgtcctgggcagggtgccggggcctcaccatgcccaatgggcaggcaagccctgcttcctaggtacccccgggggctttcccgtttctttgcatcaaacagcccctttgggagaatctgatgacaggtgtggggaagttttcccgagaggcagccactttagagggtccgacgctccccactagagagtcggcccgcagtgcagacaaatcgcagatcttcctttagagagaacagaaggctggagaggagacgcggaacccggtccgtggagtccgccagaaaaggaaacagctggtcgctggggaaactgcagcctccctgctcccctgccaggcgtcgggcgagagctgttctgttccctgacaagcgcgtgggccgccagtgctattcctgccacagtgtgggaaggcgctgggctaagggctgtgcttcccggagctgcttctagcctgatttccggccaagccacgcagtccctggtgcccgggaaggcgccggcctcgccgccgctccaaagcgagtggcgcgtctctcgccggctgtgcctccggcctgctgtgcggctgcagggagggagcagctctgcggcccaagctctgtgacctcaactctctgggccgcggctcccacgtgagaaatgaggtgcgcttgttggagagggggcccccgttgctgcccacagaattccgccccagaaacgcttgagtacgtggagcctcgggggacgggtgctccgggaaccacgcataccggcctccccagcccgtcgcagggttgcagaggcgccgagggctgggggggctgccggggctgccgggccctcgtgcaggctcctccccgcagcctcgcggccgggcctggagaccgcgtgcccggacgccgccgccagcctcgtgggccgcaaaggggcgggggcggcccctggcggcgggaggactcgcccgcccgagggaccccgggccaggctccggggtcgccccggctgggtctctgcggccccacagctctgggcggggatgggggcgccggcgcctacgcgcgaggccaaccgggggaaaccgaggcagtgaatggcccaggccccgcccggttatcccggagccaggccgggagcgcccagtgtcccgcgaccgcagccgccgcagcctgaactcgtcccctcccagtaggatgcggagcgcggcccttccatcctgtccctgccaccgttgcttccccacgccgggccgccgtcgggatgggcagacggcgcggccggtacccgaggcctgcgagcgcgaggcccgcggggcgctgcggagccgggagcgcggagccggggcgggggacagacaaaggcggggacggcggcgaggggaagacaaagcgcggaggggggtcggcggcggcgccggggccccgaaggcggctccgggcgcggcggagccaatgggcgggcgcggggcgggggccggcgggggcggtgcagcgataaggcggtggcggcggcggtggctcggggaccactggtagcggcagcagctcgcgcccgcgccctcctcgtacccgtgcgcccccggagaccgatcccgccccgcggcccaggccgggcctggtgagagccgcggggggaggggccgcgtccggctccggaaccgggagaggcgccgaggggtgtggggtgagggccgcccgtggggtcccggcgagtctgcgagccgctctcgcccggggcgcacaggctcgagtcctcgtttcagggccggcccccggctgggcggagccgagacccgctggcggggctcgcggcgtcggggtctggggtccggtcctcgcggggccaggtcgggggccgaggggcggggccgggcggggacctcgggcgctgtccaggggctgcgcagcctaggcctggacgcccgggcgcggcgcagggcagcgagggccggggtcaggtcggggcagcggcttctcat

SEQ ID NO: 14118 - DNA, 2853 bp, Homo sapiens
  SIMILAR (2285)..(2386): 501254mologous to Homo sapiens codes for truncated alpha Ig mRNA of alpha heavy chain disease patient HAR,accession number Z14962,Smith-Waterman Score=79.
atgcatccccaagaaaggacggcagctgccacaaatgctgccatcattattactgatggagcagccacccagatgggggtcacttcaactcctgctccaggccatcccagagatggctattaccagggaaaggatgtttccctgctggcacacacacactcattcaagatctcagcagccatagaagctaaaacaacatgggttgggatgtgcaggtggggttgtaaggttgctcttgatgtgactttcgatgtccaccaaggaaaacctgagggtgcaggaaggaataaacaaatccccttcatccaggacttcccatttgccctcaggagtgagaaacgtccctcccttcctgcaactatttcagggaagacgctgccactcaacacaaaaacctgtccccaattgcttcaatgcaaaagagaaggacattccctccaatgcctgatctggctgcaaatggtcccccaattaggacgcctggctgtaggcggctgccattcaaatgcttggttcccatccaagaaagcagtcatctgggaaaagtttaagcataatctctccggactagtttctgataaaggagggaagaggacagggaaaggacttggggagtgcttactgatgatgaggaagatgagccctgctttggaagcactgacaacttttgacagcagcctgcagcatcattttccaagaactttcccagtttctgcactggaagccctgaatcctggcaaaccacgacagctggtcaccccagcaccagcccaggctctggcgggggcttcactgagctcctggagaaggaccttaaaaatcctctatccaccctggacacctaggttacttctgaaacaaccgctccaccttcacgacctcctcaacaggcgtctactgcctttggaattggatgctattaatacaaagagaaaaatgcaaaatggcaagcaatcaaccatcctaaaacctcctttaatgatgtcactagtgagacagcagaaagagagagatgggacttcaacttcacaggctgttcttagatgcccaggcagacaagcaaaggaaatgccggcttccacatggagaggaatacaagaacctgcaaactgctcttcctatcccactcacgaagctctccaaaccgttcttcctcccaatagcagtgacactcctggaacaaaaatccagtcacaccagtgcctgcactggcctccctttaatcctggaataaaatccaaattcgttgagatggcccaccaggcctacctgaagagcatctcaattctattcctccaaccttacctgcagctactttccacttgctgttccctggcctcactggtcttcctacagctctttgaacaagccacacgttctcccagcccagagcctttgcacgtgctatgccctccacctggagacctccccacttttcacatgaccaagagaaggaggtaccttctcttccaccaggtctcagtttacatatcgtctccccagagaatctgtcccaactaccgtatatcaagtccacagttgaagactatctgcattaagcacttgaggttcatccacaatatagctgggatcactatgtccttgcaagtttgggcccctggccagttagagatgtcgagtcagagagcagcacagagtacagagctgatagccagacttttctcaacctcctcagacccactaagaaatggggacatcggaatcattgcacctggaaattttctccttctgcaacagttaagccatgacctgacgatacatgcaacagtttgcctatcagacagctctgccagcctacaagttccagaaaggcaagcacagcatgttatccacatcttcagcagtaagtgctacatagaagatgctcagtcaacgggaaatgagacagtcagtgttgttaagagtacaggtgacagcaacaacggtcaggactatgcactggccaagaagtcaaggcttggggaacagatctcaatacactatgtcacacgagctgtcacagccgcttgcccatccatttcccccagagaccaaaagtcagaagcaggcctgtgtctgtttggtcgctgcatctgcaacagaagaagaggaaaagacacagacacgtggaaaagaaggccagaccaggtggagatcaaggcagagagggcaatgatgcggccacaaagaacgctgacagccaccagaagttggaagagacaaggaactgattgtcccctagagcctccaaggaagtgcagccctgctgacaccttgatttcagactgtggaccccagaactgctgttattcaaaccatcgcagcagcctcctcattgccctcgctgccttcagcctcgccctctccaagcccacccccgctaccagatgtcaggaagaaattccaaaactcaaaccaaaggctgatacgttcttgccctacacttcactcaatgctggcaacccaatgagggacatcaggataaaatcgagaatgcgcgaacaaccaaaacccagtgaaaatgctggtgcaagtcagaagagggggacctgggttctaagagcagccagacggttaaggcagtctaagttacaggatgagataggaggtcggcacaagatacaggtcataaagaccatcctgataaaacaggttgcagtaaagaagcccgctaaatcccaccaaaacaaagatggccacgagagtgacctctggtcatcctcactgctacactcccgccagcgccatgacagtttacgaatgccatggcaacgtcaggaagttaccctatatggtctaaaaggggaaggcattaataatctatcccttgttcagcatatcatcaagaaataa

SEQ ID NO: 14119 - DNA, 2487 bp, Homo sapiens
  SIMILAR (1837)..(3297): 351254mologous to Rattus norvegicus proline-rich protein,accession number M86526,Smith-Waterman Score=654.
atgcaaagtgccactagtgatgctggaagtgctcccaagaagcagaaaaaagtcatgaccttacaagaaaaaagtggaattgcttggtatttcttcacagcagcgcaagaatggcctaacacacctcccaaactgagaacctgcactgagagcatgggctgctgtcttctagactgctgctgcactgggcagggggattggacaagggttaccctctattgcagatatcctttcatcctgtttgggacaaacgcttgggtggcaaattttgaaagacctcgaatgaatgcgaattctctgcttgcaagccctactggacttagtccttatctccgatttggttgtttgtcatgtcgactgttttacttcaaactaacagatctctacaaaaagactacattagggtcacttcctgacgctgccatggcatttgtaaactgtcatggcgctggtgggactgtagcagtgaggacgagcagaggtcactctcgttgccattttggttttggtgtgtctggaactcggtactaccaccttactccccaggtggtctgggagaggcagcaacagaaagtagacagtttattagggacccagcagatgctggaagcccagggaagggagtttcagggccctgcatccccctacctgtccccacaaatgcaccagctgctaagaccacacctcagcctccttcaccggacctctaaccccccaactatctcttcctgtgtgtggatggacaccgtccaatttgttgagagcctaaacagaacaaaagtgactccttcaccagccaagcatagagccaagatggatgatattgtggttgtagctcagggctcccaggcctcacggaacgtcagcaacgatcccgatgtcatcaagttgcaagagattccaaccttccagccccttttgaaagggccttatcacttccgtttcttggaagagaggcctctggcctcacgtccctcaatccatccctcctgtggcagttattggttaagactagggtgtgtagctgttggccgtacaggcctagacttaacttgcaattgcatagcgcttcaggtctgcaagctctttcaaaacagaggtgaagatactgtcaaagcgctggggccgggagcccggagcctccgcggggagggacgcgctaatgttgccgggaagcagctccgggttgcagggcaggaacgtgcccttcccccgcggcaaacttgccgtcgctgcgacggaagcaggaacttgctaaccacaaaacccgccaggccggtgcgggagctgcggagcatccgctgcggtcctcgccgagacccccgcgcggattcgccggtccttcccgcgggcgcgacagagctgtcctcgcacctggatggcagcaggggcgccggggtcctctcgacgccaggggacaaagcatgtaacttgatgatcttcgacactcgaaaaacagctagacaacccaactgctacctatttttctgtcccaacgaggaagcctgtccattgaaaccagcaaaaggacttatgagttacaggataattacagattttccatctttgaccagaaatttgccaagccaagagttaccccaggaagattctctcttacatggccaattttcacaagcagtcactcccctagcccatcatcacacagattattcaaagcccaccgatatctcatggagagacacactttctcagaagtttggatcctcagatcacttggagaaactatttaagatggatgaagcaagtgcccagctccttgcttataaggaaaaaggccattctcagagttcacaattttcctctgatcaagaaatagctcatctgctgcctgaaaatgtgagtgcgctcccagctacggtggcagttgcttctccacataccacctcggctactccaaagcccgccacccttctacccaccaatgcttcagtgacaccttctgggacttcccagccacagctggccaccacagctccacctgtaaccactgtcacttctcagcctcccacgaccctcatttctacagtttttacacgggctgcggctacactccaagcaatggctacaacagcagttctgactaccacctttcaggcacctacggactcgaaaggcagcttagaaaccataccgtttacagaaatctccaacctaactttgaacacagggaatgtgtataaccctactgcactttctatgtcaaatgtggagtcttccactatgaataaaactgcttcctgggaaggtagggaggccagtccaggcagttcctcccagggcagtgttccagaaaatcagtacggccttccatttgaaaaatggcttcttatcgggtccctgctctttggtgtcctgttcctggtgataggcctcgtcctcctgggtagaatcctctcggaatcactccgcaggaaacgttactcaagactggattatttgatcaatgggatctatgtggacatctaa

SEQ ID NO: 14120 - DNA, 459 bp, Homo sapiens
  SIMILAR (1)..(114): 1001254mologous to Homo sapiens dJ1191N16.1 (A novel protein (translation of the cDNA DKFZp566A0946, Em:AL050069)),accession number AL118501,Smith-Waterman Score=197.
atgaagatgagtgagcgggccgcctcgctgagcaccatggtgcccctgcctcgcagcgcctactggcagcacatcacacggcagcacagcacgggacagctctaccgcttgcaaggtaagcgtggggctacctgtgtccagggtgtgggccaggcctgggagtactggggagggggctcagctcaactcgcagctgctgcatgccagctggttagtgcccttcctccaaagacacctgtgaaaagtcaggtggtagaacccaaccagtgcctccattcgaatgggctgcccaagacgcttcccttgtcaggagatgcagaattctggcacacagaccatgcaggggaacttcctgacattaccatggattttgtaaactgtcatggtgctggtgggagtgtagcagtgaggacgaccacaggtcactctcatcgccaccttggttttgatgagtcttag

SEQ ID NO: 14121 - DNA, 661 bp, Homo sapiens
  SIMILAR (70)..(129): 701254mologous to Homo sapiens alternative HHLA3 protein,accession number AF126164,Smith-Waterman Score=74.
  misc_feature (1)...(661): n = a,t,c or g
ccatgtattcaccaccattcctccataactacgggaaggtatctatcagaaagaccctcagtgttacaggaaaagggtcccgatccagactccaagagaggattcttggatctcacggaagaaagaattcagggtgagtcaatagtaaagtgaaatcaagttgaatgagaaagtagaggaatgaaagaatggctactccatagacaagagcagcgcctagaggctcngtgatgcccacttttatggttatttcttgcttatttgctaaacaagggggggattattcattcctcccccttttgggacatatcgggtaacttcctgatgttgccatggcatttgtaaactgtcatggtgctgtcaggagtgtagcagtgaggacgaccagaggtcactctcgtggccaacttggttttggtgggatttggttggcttctttactgcaatctgttttatcagcaaagtctttatgacctgtatcttgtacggacctcctgtctcatcctgtgacttagaatgccttcaccatctctgctgggatctgttcctggacaatctgttcctggacaatctgttctgaattattggcatcttgatgctcacatctgcttggcattgtgaaataggttttgaatgaatattctttgaaggtgaatgcact

SEQ ID NO: 14122 - DNA, 1114 bp, Homo sapiens
  SIMILAR (217)..(327): 831254mologous to Homo sapiens Human secreted protein, SEQ ID NO: 5576,accession number G01495,Smith-Waterman Score=154.
atggccatgagagtgacctctggtcgtcctcactgctacactcccaccagcgccatgacagtttacaaatgccacggacccaaggttccgatccgcgccaaggcgttccggtcagcagcagccccgcggctcctcgggccccgccgcgctggcaagccccagtccccgccagcccaatcgtgctggcgctttaaggacgggcggggcgggctgggcgacagcgctggacacctggagctgcccgaggacgcggaggagagctcccatgggatcatgcctttgagcagccgcacagcaatgtgtgacgggagccacttggcctccaccctccgctattgcatgacagtcagcggcacagtggttctggtggccgggacgctctgcttcgcttggtggagcgaaggggatgcaaccgcccagcctggccagctggccccacccacggagtatccggtgcctgagggccccagccccctgctcaggtccgtcagcttcgtctgctgcggtgcaggtggcctgctgctgctcattggcctgctgtggtccgtcaaggccagcatcccagggccacctcgatgggacccctatcacctctccagagacctgtactacctcactgtggagtcctcagagaaggagagctgcaggaccccccaaagtggttgacatccccgactaacgaggaagccgtgagcttcccagtggccgaggggcccccaacaccacctgcataccctacggaggaagccctggagccaagtggatcgagggatgccctgctcagcacccagcccgcctggcctccacccagctatgagagcatcagccttgctcttgatgccgtttctgcagagacgacaccgaagtgccacacggctcctgctcaggcctggttcagactgcacggggaagaaagtaaaggcttcctagcaggtcctgaaaccaaaagacaaaaaaggctgtgcccttctcccaaaaccttaggccgggcgctgggacaacaggaggcccttcctgcaaacgttcgttgttgaaggctgttctatttatctattgctgtataacaaaccaccccagaatttagtggcttaaaataaatcccattttattatga

SEQ ID NO: 14123 - DNA, 489 bp, Homo sapiens
  SIMILAR (24)..(89): 901254mologous to Homo sapiens unknown,accession number AF132732,Smith-Waterman Score=104.
agtgtgagcgaactccgctggccatggcctccaactttaacgacatagtcaagcagggctacgtgaaaatccgcagcaggaagcttgggccattgaagatccctacatatcacctgtattttctgtctggagtctgtcttgcacccagcactgtcagtctatgctctggggacaactagaccctcaccatagtggctcgctggcagaccaatcccatgtccttgctaggtcatatgcagggatttttgaatcccttcaatgttacaatgttgctgagggaaagagactctaaaccactatttcatgttctttctcaaccaaataatctatgtaatgattttaaatggctttgaccacatgtcttgctatggaatccactggagggaaactgtctcctacgattacaaatagaagcaggatacgttccttctgtgctgtccctcttgcttttagcttcctatccaccctatctgggtttttctatcacag

SEQ ID NO: 14124 - DNA, 1637 bp, Homo sapiens
  SIMILAR (299)..(418): 851254mologous to Homo sapiens Human secreted protein, SEQ ID NO: 5210,accession number G01129,Smith-Waterman Score=179.
tttttatatgaatacttttttattgttttctatgaaggctgcactttacaaaggcaaagctctaaacagtgaacacagcaaaagaggctttgtaagtgtaaatatacatttgcacacatcgttaggcagaaatggcgttcaagatgacatttcaaacgctgtgaatgccatagttacccaagaagcaatcaatgcactttccttgggccctatgttataattgggttacatactcagtttttgttgtgtgaaatcctggaggggcttggatggggtggaggggaatcctatagactccagggccaagtgcgcaggaaggggatgctcaggctacattcttcagtctcattttcatatgcaggtgactcgtgtgaaccgcagacatacatcgttgtctgggacttaactcatccattagtttatatagtctgaggcatcagatacaattgcgatttcaagaagatcaaaggccgagaaaaatgatcaagcatccagtcgtaaagcaaagggcttcaaaggtcaagctaagaagacgactcccttccacctccagctctgcacctcccttggctgacagctgtgtggtgacagacttgagcattccgtcccggctgcgaggaacaaccagactcctggagaaccgcagcttttcccgtgggttcgtccttatatgcctggaaaagaatgaggcgctttcttctacccaagaaaagcccttgaaacctggccgaggatctgactctggcgcctgctctctctcgccttggtggggctcacggcagcgcacgttggctccaggctggaggaaggggggcgttgctgtcacccagctccgcactcgctcttgcagcctcccagcctactacagagctgctgaagttccagaatgggcccctgttgtccttggggtacagtctgcacctttaatgcgaaacccagcagaggcagcaccaagagtcaagtctgcctttcccgtcctcctgtccccaacacctggcgccgccaactcccgacaaagcgactcctgcagttccacccgaaaggcgcacacttttgagaacagaccatcgtggatagcaccgcaaagaaacctcctccaaggcacgttcctcgttggaactgacaacccctttcgtctactgacttccccgcacggtcgaagacagcccggtgcactcgaggatggggactcaggcgctcctggagtccccaggtccgtctgcggagccccccggcaggtgtgggcccccacctggccaagcaacaagcgggccatccgcctaagggccgggtccctctctgccctgtacccgcacgggtcacctctccctgcccccccccaggcagccagccgggccgaacgagcgccggggaaggagcaagccgagcgagccactcaccccaagcttcctgctgcggattttcacgtagccctgcttgactatgtcgttaaagttggaggccatggccagcgcgatcgggctcctgcgccccgcgatccgctctccggagtcgagagccgccgtccgccgccgggtctgcgcgggtctcgcatccagccggccgccgccagcagcagcgccgccgcccgctcttccccgagctcccgccgaaatctccatctagagcccgtgtaa

SEQ ID NO: 14125 - DNA, 420 bp, Homo sapiens
  SIMILAR (544)..(488): 571254mologous to Homo sapiens PNAS-146,accession number AF279900,Smith-Waterman Score=53.
caagtcctccttgtggcgctccgcctcctccagtcttctgcgcacccgctccgcgcgctcccgcgccgcctcgcgcgcctccccttgcagaggctgcgctgcctggcttcgcctccgcagcaggctccgctcccgctcgctcaggtcctgcaggcgctggttgaggctctcgctctcggcctcgagcccgcgcatcagcttctctagctcctgcttccgctggcgaccatctcggttatccttctgcaactgcagcagcagctcctgcgtcgcggccatggctgtggagaccgagcctaaatgccgcccgcctcggggacccagcctgcggctggcaggcgtcacaatgggcggcagggagcgcctagcgggctggatcacaatgggcggcaggggaagcccgagcgtagcccgacacat

SEQ ID NO: 14126 - DNA, 1284 bp, Homo sapiens
  SIMILAR (659)..(537): 461254mologous to Drosophila melanogaster CG12907 gene product,accession number AE003830,Smith-Waterman Score=95.
ttttttttttttcatcccttgaggagtttattaggcgaccttggtctacactctcaggagaggagtgcaccagaaataaagccaggtgccctggagtccacctggagccaggcgcggggcgctgcacttaggttggcagaagcccgttagcgcgcagctccagcagcggggacagcgtgtagcgcaggcggcgcagcgtcgtctccgaggtgaggctccagagccacgcggagacggcgccggggtccaacagcaccgtccagagcagcgacagccccaggaagaggagcggcagcgtcagcagcacctgcagcgcgcccagcacgcaccgccctgatggccagcgcgcgagggccgccgaacagccgcgtctcccgcgcaggcgctcactcggtccgcccctggccatctccctcccatgagcgaactcggtgctgtaactgcactctgcgaaagctgccccgtcacaccgcccccaggtctgggggaggagaggcgggaggcaccttggcgtctgagtggggccgcacctgcaggaactacggtctgctcctggaatatggcccaggcctccgctgtctgcagcgcgtcctgctgcagcttctcctcctgcaaggcgcatttggtctccgccagctccagttcattctgcagcgtcaccaattgggctgcgagttgctgctccgtgctcttctggctctgcggttcccctccgtagtagaagagcaagtcctccttgtggcgctccgcctcctccagtcttctgcgcacccgctgcgcgcgctcccgcgccgcctcgcgcacctccccttgcagaagcagcgcttcctggcttcgcctccgcagcagcctgcagagggaaactgaggttggcgctacaaggcggactgggtcgctcaggatcccgcagtcgccaggaaggaccagccgcaggctcatgattgaggactgggaagtcctggccgagtcccccacctgggtccgctccgctcccgctcgctcaggtcctgcaggcgctggttgaggcaggctctcgctctcggcctcgagcccgcgcatcagcttctctagctcctgcttccgctggcgaccatctcggttatccttctgcaactgcagcagcagctcctgcgtcgcggccatggctgtggagaccgagcctaaatgccgcccgcctcggggacccagcctgcggctggcaggcgtcacaatgggcggcagggagcgcctagcgggctggatcacaatgggcggcaggggaagcccgagggtagcccgacacat

SEQ ID NO: 14127 - DNA, 2464 bp, Homo sapiens
  SIMILAR (640)..(1017): 281254mologous to Glomerella cingulata ubiquitin conjugating enzyme UBC1,accession number AF030296,Smith-Waterman Score=98.
agcggtaccgctccggaatttccgggtcgacgatctcgtgttggagtacgagtctgtgctgtgtgtgaagccagacgtcagcgtctaccggattccgccccgggcctccaaccgcggttacagggcctctgactggaaattagaccagcctgattggactggtcgcctccgaatcacttcaaaagggaagactgcctatatcaaactcgaggataaagtttcaggggagctctttgctcaggcaccagtagaacaatatcctggtattgctgtggagacggtgacagattctagccgctactttgtaatccggatccaggatggtactggtgggtaaagcaggaatctgagatttccaaggaatctcaagaaatggatgctcgtcctaagttggatctgggcttcaaggaaggacaaaccatcaagttgtgtatcgggaacattacaaacaagaaaggaggtgcttctaagcccaggactgcaaggggtgggggtctgagcttactcccacccccgccaggaggcaaagtcactattcccccaccatcctcctcagttgccatcagcaatcatgtcaccccaccacccattccgaaatctaaccatggaggcagtgatgcaagatatccttttaagatttggattctcctgctcctgtcacgacaccagcaccaactccagtttctgtaagcaatgacttgtggggagacttcagcactgcctccagctctgttcccaaaccaggcaccacagccatccaactgggtccagttctgaatggcattggcaggacattaaggacagacttgaggaataaaaatgaccttgagggcaccaatctgtgagggaagttaggaacccatttcctccccagaaccagaatgactggacaatctttttcatagcttctccatcacattcaagctggtttatgtcactcccctgtgttgttacttgtacagccaagaaagtatctgttatctcctgcgtagtaccaaggtagggggactagttggatcttattatagttttggctgactatgcagggcttaaaaaggccagcgtctgtttgaggggggaatgacctcttaacatctgttaaaatttgtcttcatcttttaattttctttaacttatttcaaaattcatctcatgacccttgtgtgcctctttgtgaagccctatttagcaatttcaggggagtcaaaaaccttgcaacttccttctccactaacccaggactaaaaatggacaggctgacctcagtgtttacaaattcagaattttgataggggtagatatggagaaagacctatttcctgggtctctgctgtgtagtctccttcaggcttattgtgctcagtgaacatccagtgctgggtgcagctccatcaccctcttgtgtgtttacatgtctctttctatgataagagggttgtgttggtggcacctccactactcttttctgtttgttgagtttgaattgtgtaacatctttgatcagtgggtgtatctgtaatgaaggaggttcaagaggctgtgctttccaagtgatagtctataggagtgtttaatttcttgcagctccatctggttgctgcatttgaagcatggcattaatttgtatttgccctgttctttgacctaaagttgaagggtttagagtttttaacctgatctgtagagcagagaggttgaaagcacttaactcttgtttagtatcctcattgccttgctgcctgggtatctggcccctttccataaacatttcttttcagttcatgtagttctttaatagaaagctgctattatgtatattgtcatttgtgaaggaagttggagagtcacagctttactgtgacaggttttgcccaaggctttgatacctgtcacccagggtatcttaaaagcaagttgttctcccactactttcctttccctctgccctgccattcctattacaatgctgtgaaaaaagttctgcttcttaggtgaatgggtactttctattttgtttctaaacgagcaattttgaggatgaaatgggaagatatcattgcttcctttttgcacctattgggtatgtacactctggccgaagggagtccttatgtttagtttcaaaatatattactttcctggattctcttcttcactttttctgactttgggtccattttcttttcattgcctccttttccaggcagctctattcttgcagagccatagcaggacatgttaaaattccaatagaaaacactaaagggaaagtctgtggaatcactagtgactaaatactgggaacctattttctcaatcttcctccatgttgtgttctttgtattcttgagatgataatatattatgtatttgaattcctgaaaaatggaaaatgtttaagatatatgtatataaagtgtatgctgtattggtgcaataatggtaattaaaaatatgaaaaaag

SEQ ID NO: 14128 - DNA, 1065 bp, Homo sapiens
  SIMILAR (64)..(879): 781254mologous to Homo sapiens putative p150,accession number U93574,Smith-Waterman Score=1058.
atggttggaatatataagactggagtcttttgggttggctgtgatggaaagacaaagaggaaaggaaacttaaggatgctggcaagagaactgttgaaacaaggagatgggaggaataaagagaaggctaacaatgtgcagaacatgaagaagaacaggaattgggttgatcccacgtatagtctatttaacaggatcaaattttccaaaaagataatcggaatacacgccgaaagtgtggcaaaacattttaacaggtgtcgtcctgaaaaatcggagataaagagtgtttcaatatggctccccgcgtcaccgaaaaggttaatctcagaaactaacttgaactcgcgcggaagtgacgcaacagaagttgtcgcgctttgcatctccgcctcccgtgctccgcctccggtcttacgtttcgcccccggcagcgccgacagcggacccaagatggcgaccgagttggagtacgagtctgcgctgggtagtgaagcctaacgtcagcgcctaccggattccgccccgggcctccaaccgcggttacagggcctctgactggaaattagactatgcctgattggactggtcgcctccgaatcacttcaaaagggaagactgcctatatcaaactcgaggataaagtttcaggggagctctttgctcaggcaccagtagaacaatatcctggtattgctgtggagacggtgacagattctagccgctactttgtaatcctggatctcggatggtactgggcgcagtgctttcattggcattggcttcacagatcggggagatgccttcgactttaatgtctccttgcaggatcacttcaagtgggtaaagcaggaatctgagatttccaaggaatctcaagaaatggatgctcgtcctaagttggatctgggcttcaaggaaggacaaaccatcaagttgtgtatcgggctctgttccaaaccaggcaccacagccatccaactgggtccagttctgaatggcattggcaggacattaaggacagacttgaggaataaaaatgaccttgagggcaccaatctgtga

SEQ ID NO: 14129 - DNA, 1017 bp, Homo sapiens
  SIMILAR (43)..(669): 841254mologous to Homo sapiens putative p150,accession number U93572,Smith-Waterman Score=885.
atggcagaaggtgaagggaagcaaggcaccttcatcacaagccagcaggaaggagaagtgcccagcgaaggggttagagcccagtataaaaccaccagatctcactgggaggttccagggggtcctaacagcatctgccgttggtcccgaaacaagcctcggagcacaggtccaacaccagcgaccccagcggagcacaggcccaacagagctggtgatcccgctctcagccttaacaacgtgttaccagaacagcccagtggagggaacggtgttatgctgatggaggcagtggtttgcataagctccttccagacgcccttcccagacttgaagtcatttaatgtagatgccagccctgcgaggtgggactgccatcatgcccgttatacagacaaggaaagtgagaccagaggggactctctcaggcagcagcctgctagagccggtgtggaaggcctgagcccgctgtcctgggacccagacaccatgcacagtgtggcctgtgaggcttgtgggctctggttggcatcagatccacgatttgatctcaggacccttcccacttatgaacggaccaaggggtggggtcaccccactgccccagattccagcaggggccaccccgctcccccagattccagcagcggtcaccccactccccagattccagcaggggtcaccccactcccccagattccagcaggggtcaccccacaccccagattccagcagcggtcaccctactccccagattacagcagcggtcaccccactcccccacatcccagcaggggatcccgtgttgagatggtcatggatggctgccctgtgggcctgtgttcctctggagtgaggcccctcacctcaacccagggcttggagtgtggggccagccacgagcaccagcgctgcctggaaactcggcagaaagcaaactttggccacacgacagacctgccaggccagaaactccaggagccggcacagcctgggcccatcaggccctccgagtga

SEQ ID NO: 14130 - DNA, 841 bp, Homo sapiens
  SIMILAR (481)..(696): 871254mologous to Homo sapiens Gene product with similarity to Multidrug resistance protein MRP1,accession number U91318,Smith- Waterman Score=337.
acaagaggagaaactctgggggtttatttaacaaaattaaattcacatttctgagcccatcatagtgcatccaatgtccaccaatctggaaagctgcagaataatgatgttcctctttgttaaataatgtggcaccttccaacaaatacttgtgatcagacaaatccaagtaatagggtacatacgccagatcttcagatttccaatgttgcatatttaagacaacaaaagggggtgccccatggcagaaaattcgttgggaaaattctcttaagccaccacacccatgctcttcacacagttcaatcttggaacagaataactcattcacagccagtcttatcaagtttccatgtggaatttcttggggaggatttatattaattgtgcgctgctgatcctcctgcactcgagttgggcatcgccagttggaacagtaactctcttgaatggtagacatgagatttccaagattttttgtaaaattatcatgctcattcccaaacaaatcaattattaatgaagctttatggacttcagatttgtattgctgtttttccatcttgtcccaaatccaaagtagcttcacagttgtaaaactgtaggtgtccattaagtaaagaaaacagtctacaaactctctaccaaaatgaagagagagttccctagggaagttttcattttcattaagaatgacatataataacatcaagaatccatctatggtgcaggtatttttcagtcttatttcaacatagagtggtgtacaggatactgctttgcggccagctttgatagtaaaaacacccccccaaggaagaacaggcctacaaaatgatcg

SEQ ID NO: 14131 - DNA, 927 bp, Homo sapiens
  SIMILAR (138)..(287): 781254mologous to Homo sapiens NAG13,accession number AF194537,Smith-Waterman Score=188.
gccacaagatatattttattccaacataaaatatgctcatataaaaataactcaggaaatataaaaaaattacaaacatttttgcacagatcctctatataaaacatttacctggggttaaacactgaaaatacacttctgaaactagtatgagttgaactattttcttcggataccaagtatacacaaaataaaagcccttcatctgggagagcatgggcaggagggaaaacaacttttagcatcaatctatatttatttctctgttgctcgaatataaaccaatgatgacaagaggagaaactctgggggtttatttaacaaaattaaattcacatttctgagcccatcatagtgcatccaatgtccaccaatctggaaagctgcagaataatgatgttcctctttgttaaataatgtggcaccttccaacaaatacttgtgatcagacaaatccaagtaatagggtacatacgccagatcttcagatttccaatgttgcatatttaagacaacaaaagggggtgccccatggcagaaaattcgttgggaaaattctcttaagccaccacactttatattaattgtgcgctgctgatcctcctgcactcgagttgggcatcgccagttggaacagtaactctcttgaatggtagacatgagattttcaagattttttgtaaaattatcatgctcattcccaaacaaatcaattattaatgaagctttatggacttcagatttgtattgctgtttttccatcttgtcccaaatccaaagtagcggccagtctccgtccaccaggaagcaaactcctcgtacctccctggggaccgaaaactgccggtgccgccgcacccgtcgccgccgccgcctgctcatggagagcccgggctgccgccgccgccgccgccgccgctgcctcat

SEQ ID NO: 14132 - DNA, 960 bp, Homo sapiens
  SIMILAR (599)..(504): 811254mologous to Homo sapiens Human secreted protein encoded by gene 89,accession number Y76212,Smith-Waterman Score=140.
ttatgcagaagacaggtcaggccactgaattctctcacagacaccaatgagaacagaggcatcacctggcagggctagggtctgggacagggccatggcaggccagggccacaaccaggtctgtgctatggccaggtccaacacagtgcccaggtaaggcactgccagctcagggccaggaaaaggccagtgcagagccaggatagggtctgggtctgggtcagggctaggaacaaggcagagcagggccagggccatggcagagtcagggcaggtccttgacaggaccaggttccaggccagggccagggcagcagaaggggcagggcccgcggcaaggcaagtcgtggtgtcacaggctataggtgtctcctcctcctcctggcatggagcagctgggcgggcaaagccagaaaagcccctaatgtaggcaatgacaccctggatagcgcccccaacccaccccacactgcgaaaggtgcagccctggttagcccgtcctaccactctggtcgtgctgcagtctctgtcaccgccaccaccaaccacagtgaggcaagccagtgggttgcaggctctagcacccggcagccaggcacggagcagctctctccaatggtctgctcctaccactctgaccacgctgctgtctccgtggccatcttctttgacctgacgcctttctacactctggctggctgcagcgtccaccgctgccacccacctcagagcctcgcggtgctctcggggtctgtgctgaggataactcagctccgccctcgcaaaggcagacagcgcaggcgccgacagcgacagctcagacagcgctggcgcggcggacaggcgcacagaagacctcaggctcaggttccactccccagcacctgctttgacattgattcccaggtgcatgagttgctcctctgtttttagaccacatttgtttttatccctccgcat

SEQ ID NO: 14133 - DNA, 486 bp, Homo sapiens
  SIMILAR (349)..(254): 781254mologous to Homo sapiens Human secreted protein encoded by gene 89,accession number Y76212,Smith-Waterman Score=127.
atggcagggccagggccacaaccaggtctgtgctatggccaggtccaacacagtgcccagtgccctaacctgtcctcctccatgggcattgcagccccagaaagtgcccataacccaccctccctgccatgggcagtgcagccctgtacagtgctaccaaccagtagccctaatgcaggcaatgacaacctggatagcgcccccaacccaccccacactgtgaaaggtgcagccctggataccccctgtcataccactctggtcatgctgcagtctctgtcactgccaccaccaactacagtgaggcaagccagtgggccgcaggctctagctcccagcagccaggcatggagcagctctcgctgatggccggctcctaccacactgaccatgctgctgtctgtctccgtggcaatcttctttcacccaatgcctttctacactctggctggctgcagtgtccatcgctgccaccccacgcgtccg

SEQ ID NO: 14134 - DNA, 1182 bp, Homo sapiens; identical to SEQ ID NO: 4617
  SIMILAR (1225)..(2475): 951254mologous to Homo sapiens putative p150,accession number U93563,Smith-Waterman Score=2086.

SEQ ID NO: 14135 - DNA, 1998 bp, Homo sapiens
  SIMILAR (766)..(2145): 961254mologous to Homo sapiens putative p150,accession number U93563,Smith-Waterman Score=2329.
atggaggcgacagcgtgggcagagcaagagcacagccatggaagggaggtcctcccagctagccttcaggaggcccatggccagcctcagggcaggaggaaagaatgtggaccaaaagcggaacgtccagccaggggaggccccagcaatggctgtatcagggctgagtgtgatcacaggaaaagccacccaaggattgaaatcgagtggagtcaagactacgtggaagcctacctctccatgatggcaactttggaagaacgtgtgaccttgcggaagtgcacagaaggcactgctggcctgaatgggtccttgggccctgttccacttaacagttttcaactttatagtgatgcaaaagccatccacagtcagcagaaaccctcgtttgagtcccacacggcaactcggtttttcactttcagtacagtagtcaatgattacatgaggtatccgacacttgactacaaaacaggcttcgtgttgatgcttctgcccaccgcaggctcagggcagtgttctcagcaggccaagcagcggcatgggcctgagactgaccgcactggccacagccctaggcgaggctgctgggagccgggagccgccgcgctccgcggtagcgagtctgcggcgccacctcatggctactgcgtggaactcctcgtggtgcgggccgggaaggccgggtccccacaaagccggagcccgagcacagcgcacgcactcgcgcacactcacacgtgcgtgtgtgcatcctcgggtaccctgacgcgttcacacgcacgcacacgcgtgtgcacaagcaccgtctttcacaagcgtatgacgcgttcacacaagagtgtgacgcgttcacacgcacgcacactccctctccctcgagcctggaaggcgcactgggctcatggtggaaacctctaccgcggcagaggcaccgcgccagggccaggatgtgcgcttttatttcagacgcgaaaaccgaggcccgaaagagacagccggtgtccaaacctgtccaacgactctgctgatcgcgcctcctatccttctaaaagagctcagagcctgacttgtctcactcgttcattttctgctctccaaacttcccaccaagttcatcacttaagcgcccgcatgttccagtccagtatcctggcctgcgttttctgcataactgctgattccagccgcgctccctgcgtcctgagggtatgtgacggatttgccggtcttacccgctcatctgctccctcctccaaggaaaaaccttgcggtttttccctcccagagttcactcccctggctgtctcgtttcctcaggccgctctctgttccctggggacggtcagctgccttcgtcctaggccccagttgacaccttcctgggaatgccccgtccttctagctggtgctgtctgtccagggctgccctgtgctgcaattggctgtccttgggctggggaggagggctgcccaggggctaccagccagcttgaccaggtgtcatggccatcactccaggaggctcctgaggtgctctggccttgcctggattcctggggctggttctgggctccatcaactgtcatccctttgatggcatctccaaggtttggattcatgggaaggagccagcagcctgtattaattaatcacctcataaaggaaccaaaagccaaattttcaaacaaaaatcatagcattagatgctgtcaggggcagaggaaatggagacgtggaaacgctgctggaatgtgctgtcagccccagattccgggaaagggagaggtgaagacagagttccaaccagtctccaacagatctgtcaattatggctgcacaatgcacttccaggaaacactctggacaccaaggcttggcctgggcgatggagactccaacaacaacaacaataacaacaacaacaacagaataacagcaaatcctggcaaggaagcagagaaaccagagcacccacacttgctggtgaaaatgtaa

SEQ ID NO: 14136 - DNA, 1026 bp, Homo sapiens
  SIMILAR (627)..(797): 561254mologous to Homo sapiens mariner transposase,accession number U49974,Smith-Waterman Score=175.
atgctgcagaggagacggatgcccacagaggcccctgagcagacacaatgctcactaagtggggagactgatcaacctcacaagagtcatacgatttatggggagacagagagaaagaggagacactccaggaagacctgcaggtgggagtaccaggttgaaaccaaggacacattcctggaggagctgctgtttgagccagctctgagaacaggaattcaaagtaagcaaggaggtccactgctccagttgactgcaaataattacaaccttgagcccaagcagcactttgggtcctggtttgggaccatgaagcggctcggtgagactgagagaggtttccacccctatgagcccagtgcgccttccaggctcgagggagagggagtgtgcgtgcgtgtgaacgcgtcacactcttgtgtgaacgcgtcatacgcttgtgaaagactgtgcgtgtgcacacgcgtgtacgtgcatgtgaacgcatcagggtgcccgaggatgcacacatgcacgtgtgagtgtgcgcgaaatgaggacaagaagggggagatgggccacagggatgagggtgcctgctccctgcagcagtgtgcacaccacggctgtgcagaggcagcaggtggcagatcagttgcaaacaacagcagagctttcaatggaaatttaaacagtgggatcaagatcctgaagcatttgttcgaaaagttgcaacaagttatgaaacatggatttcgtagtactatcctgaagacaaagcacaatcaaagcaatggctaccaagaagtggaagtggtgcaaccctgtacagtgctaccaaccagtacccctaatgcaggcaatgacaccctggatagcgccctcaacccaccccacactgcgaaaggtgcagccctggatagcccctgtcctaccactctggtcgtcctgcagtctctgtcaccaccaccaccaaccacagtgaggcaagccagtgggccacaggctctaggacccagcagccaggcatggagcagctctcgctga

SEQ ID NO: 14137 - DNA, 367 bp, Homo sapiens
  SIMILAR (91)..(11): 441254mologous to Homo sapiens MHC class II antigen,accession number U33547,Smith-Waterman Score=62.
acctggacatgactgcccacagcattccttctggcggcagacagagtttgtcagttcgccaacatcctgctttcatgagaacagtttgctgtttctcacagagcctccagtggtatactgagttggtcacgaccctcattccttcggcctccaacatctccccttttgtttttgcattaattgaataaaggtaatttcaggctgtgcagctttcaattgccggttggtggttcacccgatcctatagacttatattctccgccggcagactctcccgtccaggggttcgtagttcgtctgatcagtttcactttctctgctctggcagaccttcctcgttcaggtcctggtcgggcaccacttgtca

SEQ ID NO: 14138 - DNA, 2212 bp, Homo sapiens
  SIMILAR (1087)..(2478): 961254mologous to Homo sapiens unknown,accession number AF148856,Smith-Waterman Score=2341.
aatacatggggtctctatttctgctactggaggggacagtacaggccagttctcatcctccctctcctgtttatcattttcaatgggcgctgctggtgagacaaaagattctttcaatttttgagattcagaacatagcacctgctgtctggcagaataagaagaggacaatggcaggaggacagtacagaccaaaccccaagcagagaaaatagaaggatccactttaagaactttctgatgagctcgtttcaatctttctcctactcagtctcaattttccacagcaagagtacctgtctgcagaaaccatgggttatgtgtaataacctcctgcagaagcttaatgtttgagaactaacccgagcaccagattgtttaagtaaaactttaagcagctgcacataatgttgctcctcaacagacagattctgccccatgttaccctgattcagaaacctcccgctcccgataccttctcagggaactgaccttatattctccgccggcagactctcccgtccaggggttcgtagttcgtctgatcagtttcactttctctgctctggcagaccttcctcgttcaggtccctggtcgggcaccacttgtcacggttgcttctggaccaaacgaaggagaacgaaggcagaaatgaagacaaagacaaaaggatctgtttgaaagaaggggagatggacaaacccgtgtgggtgccctccaggtgtgtgtgaccatggaacgggagaccggagggatccatggtattcaaccgtgggcctgttacctccaagtacgagccatgaagccagcggaaatctgaatgcaaacgacacgaacaagggcccgaccggagttcacaatgacatccaaccccataaacatggggacagatcaaagaaaacgacacaaagaagcttgagaaactacttgaagcgccagggtccaggcaaaaaacccttgacttccatgtttctttggccatgctaactgttagtgtcctgtgcgatccttttgtctgtctcatttctgcattcgtcgtccttcgttcggtccagaagcaaccgcgacagtcctgcatgtgttgatgccacctatcgggggtgctcctgccaaggagagggtgtatgtggggaggcctgcagctgtttcccagaccttaatcagccacaaggagtccacgctggggagggtgtactgccatgtagtgggtgggaagatacctttggcaagaacacgtgccttgtgagctatcagcagattcccaacaaaaggagaccctgtacgtgcgaagagtgtggcaaggcctttggacagagaagtcaccttgttcagcacaccagtgagaagctgtatgcatgccaggaatgtgggtgtaccttcagcaacaattcatctctagtcaagcactggcacgtccacacaggcgagaagccctacatgtgtggccactgtggcaagtgcttccgagagagctcatcccttgccaagcaccagcgtgtgcacacaggtgagaagccatacgtgtgtgcgagagcacacaccttgtacagcactggtgattccacaccggggaaaagccatttgcctgccaagagcagcaaagcctttgctgacttctcggccctccttgcatgccacggaacctacacgggtgagaggccctacgagtgccgggtatgctgcaaggcattcagccccagcttgtccctggctgagcacatacgctgccacacgggagagaagctgtatgcgtgtcaggaatgtgggaaagctttcagccacagctcatccctcagcaagcaccagcaggtacacacagaatgtggaaaggccttcagccaggggtcctacctgacccagcacctcaagatccacagcggtgagaagccgtacatacgtggcgagcatccttatgcatgtggaaaatgtgggaagactttcagccacagcaagtttctcacccagcatgagcaagtccgcatgggagagaagcccttcatgtgtggtgactgtggaagagccttcatgcaaacctcatccctcgccctccatcagaggactcacaatggggagaagccctacaagtggaatgagtgtggcaagtcctgcatccagatgtcacacctcaccgagtattaccagaatctccctgaaaaggggtctaaggatccccacactgatgccactgtccattcacccgttatggactga

SEQ ID NO: 14139 - DNA, 483 bp, Homo sapiens
  SIMILAR (121)..(44): 421254mologous to Homo sapiens Human gene 43-encoded protein fragment, SEQ ID NO:361,accession number Y86446,Smith-Waterman Score=43.
cctccattcaggaagcagcaagctcagcacagaaataaaactgtcctggtgagtcgctcacagcctgtcccagtaactgttccggagcgtcagcctgacgcagcacccctgaaggaccacgccgtgcgggctgcgatcctcgcccttaaccatgcccagcaggaccagagctgccagcacaaatgaaggtcctggccattgaacaacttctgagcctgcactttaagaaggcgctcttgttttgaatacgtagtctgtcctgttctttcaaagtagatcctggtcaagaatgtctccaaaactggattaagccagtgtacttgaatgggaatatagacaaccaggacagacttggaatgttttttaatgtattggcccagcaaagctagaaatcctccactttacctaacagaagataattagaattaaaaatggcactaactgaaaacgtacttgttaaattgcctgtgcttatagaaaaaa

SEQ ID NO: 14140 - DNA, 999 bp, Homo sapiens
  SIMILAR (865)..(2298): 941254mologous to Homo sapiens putative p150,accession number U93563,Smith-Waterman Score=2346.
tcatggttttacttttggtgacagcccaggtttacagtcatcacagctcacatttactgggcaccatgaatcatggtttgtgccgaatgagctccccatgagctcctctcctgagaggtaggtatgatcattgtccccatttgatgtacgagggaactgggtcatggagggttgagtggctgctctgaagtctcccagtgggtaactgaggagcattgattcccactgaggtctgcctgtctgagctggagtccatccactgggccctgtgctgctcgggtaatactcagccaatcctgatgtgaggcttttctcacatccttcatctagacacatcctgggtctagaacgtatcaggagacagaggtgtagaaccacagccagcttccctaaacttccactaatctccggcttgcttttggttataatgttgtgcagatataaattgacaaagtcatgagaagcctctcttctaactctgcagtttgtcatctctccctcctcctcctcctcctcctccttttcctcctcctcctcctcctcctcctcctccttttcctcctccttctcctgtccctcttcccccatctccccgttctcctcctgtttcccctccccctcctcatagttttcagggtcggagtcctccatcagaactcgggtcatctgcggagccttggctgcggcccggtacctgggtgtgactccgccactaacattttcccagcaggaagcagcaagctcagcacagaaataaaactgtcctggtgagtcgctcacagcctgtcccagtaactgttccggagcgtcagcctgacgcagcacccaatcattcgttacttctcccagggcagcaatgcttctggtgtcagggaccccaccccccttactggatgggccctgtggatgcttcctcctctggctttctctcccagtcattttattgaggtttgcctctccttgagggttgttggtagtgatgatgacggtgatgaccat

SEQ ID NO: 14141 - DNA, 1437 bp, Homo sapiens
  SIMILAR (253)..(786): 501254mologous to Homo sapiens capping protein alpha subunit isoform 1,accession number U56637,Smith-Waterman Score=380.
ccatcaccacgccagggtaatttttgtatttttagtagggaaggtgtttcaccatgttggccagtctggtctcgaactcctgacctcgtgatccacccgcctcagcctcccaaagtgctgggattacatgtgtgagccaccacgcccggccccaaacgggtagatttcttttgtttttgttttttttttttgagacagagtcttgctctgttgcccaggctggagtgcagtggcacaatcttggctcactgcaagctccgcctccggggttcatgccattctcctgcctcagcctaccgagtagctgggactacaggcacctgccaccatgcccggctaatttttttgtatttttagtagagatggggtttcactgtgttagccaggatggtctcgatctcctgacctcatgatccgcccacctcggcctcccaaagtgctgggattacaggtctgattggggccctggtcctgtctgtgggcatctatgcagaggttgagcggcagaaatataaaacccttgaaagtgccttcctggctccagccatcatcctcatcctcctgggcgtcgtcatgttcatggtctccttcattggtgtgctggcgtccctccgtgacaacctgtaccttctccaagcattcatgtacatccttgggatctgcctcatcatggagctcattggtggcgtggtggccttgaccttccggaaccagcagttgctcttaaggcagcaggtgctgtcccacaccctgggttgtgcagacctctcagatggcccaggatctggccctgtgaaaatgttcatgggagtgcctgtgattccagcccagccaccagagctcctggccagcctgcggctttccaggggctacgggttagtgctttcctggctggagcccaggtatgagaagatgatcagtggtatgtacctgggtgaaatcgtccgcaacatcttaatcgacttcaccaagaagggattcctcttccgagggcagatctctgagacgctgaagacccggggcatctttgagaccaagtttctctctcagatcgagagtgaccgattagcactgctccaggtccgggctatcctccagcagctaggtctgaatagcacctgcgatgacagtatcctcgtcaagacagtgtgcggggtggtgtccaggagggccgcacagctgtgtggcgcaggcatggctgcggttgtggataagatccgcgagaacagaggactggaccgtctgaatgtgactgtgggagtggacgggacactctacaagcttcatccacacttctccagaatcatgcaccagacggtgaaggaactgtcaccaaaatgtaacgtgtccttcctcctgtctgaggatggcagcggcaagggggccgccctcatcacggccgtgggcgtgcggttacgcacagaggcaagcagctaa

SEQ ID NO: 14142 - DNA, 2866 bp, Homo sapiens
  SIMILAR (1198)..(2865): 891254mologous to Homo sapiens putative p150,accession number U93563,Smith-Waterman Score=2651.
ggttttaccatgttggccagtctggtctcgaactcctgacctcgtgatccacctgcctcagcctccctaagtgctgggattacaggtgtgagccactatgcccggctgccccatcctttttcttgatattatagttagtggtgaaaacatgtaaatgataatactccatgcagtatgtatgctgaagtgactaccctgaagacattttttaagtcctattttcttttctttctaggatatgataatcattttctgtttgtattaatacatgcttgaaagggaattagtaaagcgattccatccttgtcagcagcttgggaacaaagctgtgggatctgggggttgtgtaggaactcattttgacatcagtagttacttgtgtcttttatgcctcaggtcaaggtgtgcgtgtttttttctttctccttttagcttcacgagggctggacattgtggtcctaggctcaccttcctcttgcattgacccatgaagcacatccttggagccccagagtcatctcagaacagtatgaaaatcaccactagatgcagaaactgttgtaggattggtcctgctatttgatggcattttgccaagttatccaggaatactcaagaccacaccaggcccactttgggggcagcccaagcagtgcccgcaacagggcagccagcagccccgggtccagcaggagccggcccagagtgggttccttttctagctgtttacaaggagcaattggttagaaatgacagtgtactgaaagtcttttttttccctccaattttttacagggaaggttgggtgtgttgctctgtagtcgaatcacacttgcaggagggttttgtgtggctgttttcactccagttgtgaccacctaagctgagaagccttttctctctttcgtattgtctttcccctcagtgacattgagatttcaagaggacaaactccaaaagctgtggatgtccttgccaaggagattggattgcttgcagatgaaattgaaatctatggcaaaattctggtgtcttcggctggttttgcataggttgtctgggaaatattataaaattcactttctccccccgaactcaggatcacacccacccctcttggagaagggaagagcacagtcaccatcgggcttgtgcaggctgtgtcccttggcctgtgtccatcgtggcagctgtacttggtgacccctgcactccagcctgggcaacaaagcgagaccctatttctgaaaataaataaatagaaagatatcttatttctctagttcaaccttcacttgactggagacatccacgttgtcatatcctgtgaattgtccaagttcatggacaactaacttttgtgtggtctcatttttgttttgtgtttttttagagggataattttggtgaccctttgctttctgtttcttctcaaacttctcaccttttttcttcttaatcattagaaactgggaataaataagactgatcccatcagaacaatgccagacacacaccaggtggctggtccatatttgtcgactgaatgactaatctgttctctttcagtgaagtccagctccttgtgggaatggccatcccactggcactgtcgctgaccactacctgtgtttgggctggttcaggcgcagtttgacatcgcagtggccagcgagatcatggcggtgctggccctgacggacagcctcgggagagaagtgccaaggggttaaccattgcctggatgatattttgtcaggaatctaatgtttttctctcatttgccccaaattgatcttggtttccatgcttctgtttgtcttttgggattttgatttgctttttcacttctctaggggacacctgtgttcgtgcatgcgggcccttttgctgctgacagagatctctgcccataccagttcttactttgtcaaacacatatttataaaatacatgttatcatggcagaatactttcaaagatataaactgatgatgtatgcaaagcaaacgagccctctgtgtgaccttgaacaagccattagcctctctgggtgtgtcccctgtagacattctcatctgaaaaatgagaagttttcctgtacaggttgctagcagtatttacccaaattgtcccttcccaactcagacccactgacccttcctttctcagctgattacgggtttaagtttgaatcaaaccatgcgaatcatagtggtgattgccaaaacctacctttgtttttagaagataatagcacatattccacttgcttccccacagtgaccgaagctggctttggtgctgacatcggaatggagaaattcttcaacatcaagtgccgagatgttgttctttctttcagatcggttgtgtaagcatttttattgctggcagtttagcttggcaggtttggtgggagacaatacacaggggtctgggttttgcttttttcttttttacagaacatccagctggtggcagacggcgtataaatggtgagtctttctttgaaaacatagctaaatggatacagatgcaaaaccacaaacattttcttcactaggaccgacacccgcgctgagattgacttggtgtgtgagcttgcaaagcgggctggtgcctttgatgcagtcccctgctatcactggtccgttggtggaaaaggatcggtggacttggctcgggctgtgagagaggctgcgagtaaaagaagccgattccagttcctgtatgatgttcaggttccaattgtggacaagataaggaccattgctcaggctgtctatggagccaaagatattgaactctctcctgaggcacaagccaaaatagatcgttacactcaacagggttttggaaattt

SEQ ID NO: 14143 - DNA, 1460 bp, Homo sapiens; identical to SEQ ID NO: 7718
  SIMILAR (342)..(563): 641254mologous to Mus musculus Pro-Pol-dUTPase polyprotein,accession number Y12713,Smith-Waterman Score=241.

SEQ ID NO: 14144 - DNA, 2286 bp, Homo sapiens; identical to SEQ ID NO: 3628
  SIMILAR (670)..(2502): 961254mologous to Homo sapiens putative p150,accession number U93567,Smith-Waterman Score=3104.

SEQ ID NO: 14145 - DNA, 531 bp, Homo sapiens
  SIMILAR (154)..(702): 671254mologous to Homo sapiens putative p150,accession number U93572,Smith-Waterman Score=600.
tcagtaagttgatcttaatctctgatatcctttcttccactgatcaattcggctatcgatgtgtgaaagaactcctgcagctagctcggtgtctgcctgaacagctgcccagtttgtttttgaaacccagagccctgggggtgtaggcacatgagggaatctctggtctgtggatttacggccgggtactcctctgagacaaaacttccgaggaacaatcagacagcagcattcgcggttcacgaaaaaccactgttcgcagacaccgctgctgatacccaggcaaacagggtctggagtggacctcagcaaactccaacagacctgcagctgagggtcctgtctggtgtgcaccattgacttggcaaatgcctttttctccattcctgtccacaaggcccacagaagcaatttgccttcagctggcaagtatacctttactgtcctaccaaggctgacctggctacagccgtgctgagtgcccaatttgccagcagcagagaccaacactgagccctcaaatggcaccat

SEQ ID NO: 14146 - DNA, 942 bp, Homo sapiens; identical to SEQ ID NO: 7567
  SIMILAR (484)..(744): 661254mologous to Homo sapiens p40,accession number U93567,Smith-Waterman Score=303.
  misc_feature (1)...(942): n = a,t,c or g

SEQ ID NO: 14147 - DNA, 1143 bp, Homo sapiens
  SIMILAR (256)..(717): 701254mologous to Homo sapiens NAALADase II protein,accession number AJ012370,Smith-Waterman Score=515.
atggagaacactgatactgcttggcatgaactgtttagagagttatgcaaaataaatgcatttgacactcctgatttatcgctcatgagaggcaaggaatttagtgactctgtacataatacctttgaccatatgtggagaagcaaggaacataatgaagttggttgtttgctcctaagttcagtggacaaagtgatggaagaaaatgatgaactcagggattttaactcccatcttcagaaacagatactgaccctcaaatctgctaatatcaccttgagtgagagtcttatctcctgtagagaaagagctgaaattgtggaaaaacacacacaagctcttatcatatccaacagtgggagctgcagtcactcaactacaaaatttaactgcaatgggagtaattggatcccatggtgccaggggccaagtagtggcactcaaccgtcaaaggcaaggagacctccaaccttttaccagggtaactgtgcactggggaaaagggaaatgcagatatttgggggactactggacactggctctgagctgacattgattccaggggacccaaaacatcattgtggtcctccagttaaagtaggggcttatggaggtcaggtaattaatggagttttagctcaggtccaaattacagtgggtccccagactcatcctgtggttatttccccagtgccagaatgcataattggcatagacatacttagcagctggcagaacccccacattggctccctgactggtattatggtgggaaaggccaaatggaaacaattagagctgcctctacctagaaaaatagtaaatcaaaaaccatattgtatccctggagggactgtggagattagtgccaccatcaaggacttgaaagatgcaggggtggtgattttcaccacatccctgttcaactctcccatttggcctgtgcagaagacagatggatcttggagaatgacagtgggttatcgtaggcttaaccaagtggtgactccaattgcagctgctgtaccagatgtggtttcattgcttgagcaaattaacacatctcctggtacctggtatgcagccattgacatggcaaatgcctttttctccattcctgtccataaggcccaccggaagtaa

SEQ ID NO: 14148 - DNA, 1914 bp, Homo sapiens
  SIMILAR (1)..(300): 811254mologous to Homo sapiens p40,accession number U93564,Smith-Waterman Score=410.
atggacggttctagctgtgtcttcattgactgtctgtggctgatacaagctgcagagccctccaagatggaagaaactgctcatgggaaactgccttccaaatcctcagtgctagttccttattgggagtggagttggcggtcccctgctgctgttgctgtctcctggcctcaccaggtgtctactgttagaatgagggcattgattggaaaagaatgggaccctgcaacttggaatggggacatgtgggaggaccctgatgaagctggggacactgagttaataaactctgatgaacatttttggccagaagtaacagcttccccatccccagtagtggcaacgtcctctcccccacccatgctgctatcagcctttccacctttgtctgaagagataaaccctgcgctgcctgaggcagttgccaggcaaaataatgttgattctcctcagaagccacccccaacacctctgtttgcttctaggcctataactagactaaaggcttggtgggcccctagagtgtcagaatgcataattggtatagacatatttagcagctggcagaacccctgcattggctccctgactggtagggtgagggctactgttgtgggaaaggccaaatggaagccattggagctgccatcacctagaaaaattgcaaatcaaaaagaataccacatccctggagggattgtggagattactgccaccatcaaggacttaaaagatgcaggggtggcgattcccaccacatcctcattcagctctcccatttggcctgtgcagaagacagatggagcttggagaatgacagtggattattgtaagcttaaccaagtggtgactccaattacagctgctgtaccagatgtggtttcattgcttgaaactcacatcaataatgcagaagctagcagacaacagatcagtgctttcaaagttcaggtggagatgtctttgaaccttaaatcttatacttggctaaaagatcaattgactgtgagagaaaataaagacatctttggagatttaaagactgaaaaagttttttacacagaagaaagctgttggaaaagaaaatctattagagcagggagaatggcaaggagaagagccccgggatcgggccacagtggtgtgcctggagggcggtggagggaccccacagggtttcattttagttctggagaatggcaaacttctggagggacaacgctgcagaaaaaaatgaaaaggaggctccacaggagaaacagggtgattgaatggctggagacacctgaaaacgtggtcactcctgtgttagcacatgatttaatcctcacagcagccatatttcgtacatatcatgtcaaatttagagacgcacatgctgaaatgcacatgctgacacccagagacctgggatgtcatagccagccaagaccagtgggagaatggaccccaggcatcatctaccagttggacttactcagcctgcagctctcaacccctcatgggaggaggagcacacaggtgagtgggtgcaggggctgggatgagtgcttctgggcgctagcaggagctgaactctgtgtggccttggggcagcaggaagaatcaggtgacatgaacgtattgaagatggtaaatgtgggggattttattgccaataaaagtggctgtcagtgggatgaagagctggaaaggggatggagtgggaaggtccttttatatgtcagtggatgtggggcatctttgattaatggggtggtgtttccctgcatttgcaggcacacctgcaccttctatccactgcagtgctctttcccaagacagctgatggctcaactctacatctgggtctgtgctctgacatcagcttttccaagtccttctctgatctccacatctaggaaagcagcttga

SEQ ID NO: 14149 - DNA, 202 bp, Homo sapiens
  SIMILAR (434)..(1066): 861254mologous to Homo sapiens p40,accession number U93570,Smith-Waterman Score=930.
gggacccaaaatatcaatgtgatcctccagttaaagtaggtgctaatggaggtcagataattaatgaagttttagctcaggtccaacttacagtgggtccaaagacaaatggatattggagaatgacagtggattatcataagcttaaccaagatgtgactccaattgtagctgctgtaccagatgtggtttcattgcttga

SEQ ID NO: 14150 - DNA, 367 bp, Homo sapiens
  SIMILAR (2)..(229): 811254mologous to Mus musculus Pro-Pol-dUTPase polyprotein,accession number Y12713,Smith-Waterman Score=329.
ctggtatgcagccattgatttggcaagtgcctttgtctccattcctgtccataaggcccacgagaagcaatttgccttcagctggcaaggccagcaatataccttcactgtcctgcctcaggggtatatcaactctctggctttgtgtcattatttggttggcagagatcttgatcgtttttcccttccacaagatatcatactggtccattacattgatgacattatgcaagctgacctggctacagctactgctgagtgcccaatttgccagcagcagagaccaatactgagccctcgatatggcagcattcctcagggtgatcagccagctacctggaggcaggttgactatattgaacctctt

SEQ ID NO: 14151 - DNA, 553 bp, Homo sapiens; identical to SEQ ID NO: 6681
  SIMILAR (1)..(399): 781254mologous to Mus musculus Pro-Pol-dUTPase polyprotein,accession number Y12713,Smith-Waterman Score=515.

SEQ ID NO: 14152 - DNA, 728 bp, Homo sapiens; identical to SEQ ID NO: 7714
  SIMILAR (3)..(656): 541254mologous to Mus musculus Pro-Pol-dUTPase polyprotein,accession number Y12713,Smith-Waterman Score=540.

SEQ ID NO: 14153 - DNA, 635 bp, Homo sapiens; identical to SEQ ID NO: 5071
  SIMILAR (566)..(1168): 941254mologous to Cloning vector pZC320 SopA,accession number U26464,Smith-Waterman Score=1006.

SEQ ID NO: 14154 - DNA, 266 bp, Homo sapiens; identical to SEQ ID NO: 3627
  SIMILAR (3)..(137): 861254mologous to Mus musculus Pro-Pol-dUTPase polyprotein,accession number Y12713,Smith-Waterman Score=211.

SEQ ID NO: 14155 - DNA, 1248 bp, Homo sapiens
  SIMILAR (328)..(1233): 751254mologous to Cloning vector pSacBII SacB,accession number U09128,Smith-Waterman Score=1133.
aagacagatggatcttggggaatgacagtggattatcataagcttaaccaagtggtgactccaattgcagctgctgtaccagaagtgattttattgcttgagcaaattaacacatctcctggtacctggtatgcagccattgacttggcaaatgcctttttctccatttctctccataaggcacaccagaagcaatttgtcttcagctggcaaggccagcaatatacctttactgtcctacctcagggctatctcaactctccagctttttgtcacaatcttattcagaaataccttgatcatttttcgcctccacaagatatcacactggtccattacattgatgacattatgctgattggatccagtgagcagtcttgcaaacacaccggacttattgccataaagtgggtcatggcacagcagcagcattgtatcatcagatggaagtgctgtatatgtgatcgggctcaggcaggtcctgaaggcacaagtaagttacgtgaggaagtggctcaaatgcccatggtctccactcctgtcaccctgtcttctcaaccccagcctgcactaatgatagcctcatggagagttccctatgattggttgatagaggaagagaagactagggcctggtttacagattgttctgcacgatatgcaggcagcaccagaaagtggacagctgcagcactacagtccctttctaggacatccctgaaggacagcagtgaaggcaaatcttcccaatgggcagaacttcgagaagtgcaccgtgttgtgcactttgcatggaagaagaaatggccagatgtgcgattatatactgattcatgggccgtagccaatgatttggctggatggtcagggacctggaagaagcttgattggaaaactggtgacaaagaaatttggcgaagaggtatgtggattgacctctctgagtggtcaaaaactatgaagatatttgtatcacgtgtgagtgctcagcaatgggtgaccttagcagaggaggagtttaataatcaagtgtatagaatgacctgttctgtggacaccactcagcctctttcaccagccacccttgtcatcacccaatgggtccatgaacaaagtgaccatgttggcagggatggaggttactcatgggctcagcaacatggacttccactcaccaaggctgacctggctacagctactgctgagtgcccaatttgccagcagcagagaccaacacagagcctttga

SEQ ID NO: 14156 - DNA, 837 bp, Homo sapiens; identical to SEQ ID NO: 7716
  SIMILAR (371)..(616): 711254mologous to Homo sapiens p40,accession number U93564,Smith-Waterman Score=294.

SEQ ID NO: 14157 - DNA, 533 bp, Homo sapiens
  SIMILAR (133)..(531): 741254mologous to Mus musculus Pro-Pol-dUTPase polyprotein,accession number Y12713,Smith-Waterman Score=527.
atgtatacactaaagtccctgcaagcccttagaggtgaggttgagagtgtgacccatgaggaggtgcacacactaaaaaaaaactgttttgagttctctaatttatatgaacagccaatctggagaacaggtgctgtaccagatgtggtttcattgcttgagcaaattaacacatctcctgctacctggtatgcagccattgacttgggaaatgcctttttctcgattcctgtccataatacccaccagaagcaatttgccttcagctggcaaggccagcaatatatctttactatcctacttcaggtgtatatcaactctccagctttgtgtcataatcttattgggagagattttgattgctttttgcttctgcaagctatcacactggtacattacattgatgacattatgctgaatggatccaacacactggactcatgggtgagaaatttgcatgccagaggatggaaaataaatccaacaaaaattcagggagcttctacctcagtaaaatttctagggatccagtg

SEQ ID NO: 14158 - DNA, 1632 bp, Homo sapiens
  SIMILAR (727)..(834): 581254mologous to Homo sapiens Human secreted protein fragment encoded from gene 42,accession number Y07785,Smith- Waterman Score=97.
atgacagtggattatcataagcttaaccaagtggtgactccaattgcagctgctgtaccagatgtggtttcattcattgagcaaattaacacatctcctggtatctggtatgcagccattgacttggcaaatgtctttttctccattcctgtccataaggcccaccagaagcaatctgtcttctgctggcaaggccaggaatatacctttactgtcctacctcaggtgcatatcaactgtccagctttgtgtcataatcctattctgagagattttgatcacttttcccttccacaagatatcacactggtccattacattgatgacattatgctgattggttccagtgtagaatatgttgctgcatttggtccctcctacaaccaagaaagagacacaacacctagaggtcctatttggattttggaggcaacacattcctcatttggccaccccgtcatcacccaatggacccatgaacaaagtgaccatgatggcaggaatgtaggttatgcatgggatcagaaacatggacttccactcaccaaggctaacctggttatggccattggtgaatgctcagtttaccagcagcagagactaacactgagccctcaatatggcaccattcctcaggccaggattcacaagtccaggaatcaaagggtggaaatggaagtggcaccactcaccatcacccctagtgatccactagtaaaatttttgcttcctgttcccatgacattacattctgctggcctagaggtcttagttctagagggagaaatgctgccactaggagacacaacaacaatttcattaaacctgaagttaagattgctttctggacactttgggatcctcctacctttaagtcaacaggctaagaaaggagttaaagtgttggctggtgggattgacatgaactaccaagataaaatcagtctactactccacaagggagtgtctccatcattccccatgggcagccacctcaccaattatttggcgtggctaaggcaagaacctttggcattacatgatgagaaacaaattcactgtgcactttctaaaaatgtctgtccagtgaaacaggacgcacttatccacaagtttgtctcttccagaatcgaagatgtaaaactacaaatcgttcttcaaatggagtcccagatgcaatccatgactaagatctaccacggacccttggactggcctactagcccatgctctgatgttaatgacatcaaagtcacccctcctgaggaaatctcaactgcaccaccccactacgccccaattcagcacgaagcagttaaagcggtcatcggccaacctccccagcagcatttgggttttcctgttgagagcagggtgtccgctgtgctcctgatccagcgagcttctaatagagctataacactcaccacatggcccaagattccattccttggaatccgtaaggcccagaaccccatgtcagagaatacgaggcttgccaccatcttggaagcggcccgccaccatcttggaagaggctcgccaccatcttggaagctctgtgagcaaggacccccagtaacactaggactcattgtgaactggtcctccaatcttcagaaagctgcctag

SEQ ID NO: 14159 - DNA, 336 bp, Homo sapiens
  SIMILAR (1)..(201): 801254mologous to Mus musculus Pro-Pol-dUTPase polyprotein,accession number Y12713,Smith-Waterman Score=280.
aaggcagatggatcttggagaatgacagtggattattgtaagcttaaccaagtggtgactgcaattgcagctgctataccagatgtggtttcattgcttgagcaaattaatacatctcctgatacctggtatgcagccattgacttggcaaatgcccttttctccattcctgtccataaggggtatatcaactctctggctttgtgtcataatgttatttggagagaacttgattgcttttcacttccacgagataccacactggtccattacattgatgacattatgctgattggatccagtgtgcaagaagtagaaaacaaactggacttactg

SEQ ID NO: 14160 - DNA, 1886 bp, Homo sapiens
  SIMILAR (663)..(1088): 711254mologous to Mus musculus Pro-Pol-dUTPase polyprotein,accession number Y12713,Smith-Waterman Score=564.
gagacttccagccttttaccagggtaactgtgcattggggaaaaggaaatgatcagacatttaggggactactggacactggctctgagctgacattgattccaggggatccaaaacatcattatggtcctccagttaaagtagggggcttatggagctcagctgctgtagcagatgtggtttcattgcttgagcaaattaacacatctcctggtacctggtatgcagccattgacttggcaaatgcctttttctctattcctgtccataaagcccaccagaagcaatttgccttcagcaggcaaggccagcaatatgcctttactgtcctacctcaggggtatatcaactctctagctttatgtcataatcttatttggagagacctggatggcttttcacttttgcaagatatcacacttgtccattacattgatgacattttgctgattggattcagtgagcaggaagtagcaaacacactggacttactgtccacttatcaagtgactcaaaagactgccagttttgagtggggtccagaacaggagaaggctctgcaacaggtccaggctgccgtgcaagctggtctgccacttgggccacataaactagcagatccaatggtacttgaggtgtcagtggcagacaggaatgctgactggagcctttgtggtttggctggatggtcagggacttggaagaagcatgattggaaaattggtgacaaagaaatttggggaagaggtatgtggatggacctctctgagtggtccaaaactgtgaaggtacttgtatcccatgtgagtgcttgccagtgggtaacctcagcagaggaggattttaataatcaagtggataggatgacctgttctgtggacaccactcagcctctttccccagtctcccttgtcattgcccaatgtacccatgaacaaagtggccgtagtggcaaggatggtggttacacatggtctcagcaacatggaattccactcaccaaggctgatctgggtatggccacggctgagtgcccaatttgccagcagcaaagaccaacactgagccctcgatatggcaccattccttgggctaggattcacgggtccaggaatcaaggggtggaagtggaagtggcaccactcaccatcacttctcgtgatccacaagaaaaatttttgcttcctgttcctgcgacattacgttctgctgtcctaggggtcttagttgcagagggaggaacactgccaccaggagacacaacaacaatccctttaaactggaagttaagattgccacctggacacttttggctccttctacctttaaatcagcaggctgagaagggagttacaatgttggctggggtgactgactcggactatcaagatgaaatccatctactactccacaacggagataccaaactggaacccagagaagctggacaggaatgggcattcctcgagaaaagacctcccttcttgcttgaccacgggcaagtgatcaagcctagtctcctcactggtggcaaagccttccagccagttcaatggtgggagtctccccctgctcttcctgcacaatcatttcccattgaggaagaatgtgaaaatgacgcacaggtgagggaggcatactataagaccgcttcttacctttcgtttcctggagccaatatgaatgaagacccagagagaggagaagggaaagagaagctgccaaaaacagacaatgggagaaaagaaactacgggcaataacagcccacctactgttagccctcggttcctcaaccatacgttgaggaattccgtgtaccctgcacacacctttgtgattaattcagatgaaaataaactctccttgaattatgctaatgtgtga

SEQ ID NO: 14161 - DNA, 1449 bp, Homo sapiens; identical to SEQ ID NO: 4930
  SIMILAR (832)..(3171): 891254mologous to Homo sapiens putative p150,accession number U93569,Smith-Waterman Score=3544.
  misc_feature (1)...(1449): n = a,t,c or g

SEQ ID NO: 14162 - DNA, 1563 bp, Homo sapiens
  SIMILAR (610)..(1143): 781254mologous to Mus musculus Pro-Pol-dUTPase polyprotein,accession number Y12713,Smith-Waterman Score=723.
atgattatctcaatagatgcagaaaaggccttcgataaaattcaacagcctttcatgctaaaaacactcagtaaactagaagaaacagcatccccatccccagtagtggcaacatacactccgcaacctatgctaccatcagcctttccacctttgtctgaggagataaatcctgtgctgcctgagacaacagtgatggcctcccctgaggcagttaccaggcaagataatgttgattctcctcagaagccaccccctacacccatgtttgcttctagacctataactagactaaagccccggagagcccctagtgaggaagggatccaaaggcttaaaaagattgggatggtggagtggattagtcactttagacctactcctctcagcatggaaggtccagaacatatactcttgaccaacaccttgttaaatagatatgtgaaggcagcacctgcatctttgaagagccctttaactgctcttctctttatgtcagatctaactgtgggaaccacattctctcaactacaaaatttaaatacaatgggaatatttgggtcctcatgtgacaggagccaagtggcagcactcaaccatcaaaggcaagtgccagaatgcaaaattgtcatagatatacttaacatctggcggattccccacattggctcactgactggtagggtgagggaaattatggtgggaaaggccaaatggaagccattagagcagcctccacctagaaaaatagtaattcaaaaacaatatcacatccctggagctattacagagattagtgccaccattgaggacttgaaagaaacaggggtggtgattctcaccacatccccattcaaatcaagcatttggcctttgcagaagacagatggatcttggagaatgacagtgaattatcataagcttaaccaagtggagactccaattgcagctgctgtaccagatgtggtttcattgcttgagcaaattaacacatctcctggtacctggtatgcggccattgacttggtaaatgtctttttctccattcctgtctataaagctcaccagaagcaatttgccttcagctggcaaggccagcaatatacttttactttcctacctcaggggtatatcaactctccggatatcacactggttcactacattgacgacattatgcttattggatccagtgagcaagaagtagcaaacacactggatttactgcctgccagagtggcctcatggggagttccctatgatcagttgacagaggaagagaagactagggcctgcttcacagatggtcctgcaggatatgcaggcaccacccccagggctcatggatccaggaatcatagggtggaagtggaagtggtaccactcaccataacacctactgatccactagcaaaatttttgcttcctgttcccgtgacattaggttctgctggtctaaaggtcttagttccagagaaaagaacgctgacaccaggagacacaaaaacaattccattaaacaggaagttaagatttccactagaacactttgggctcctctaa

SEQ ID NO: 14163 - DNA, 1899 bp, Homo sapiens
  SIMILAR (2445)..(1801): 421254mologous to Escherichia coli K12 putative glycoprotein,accession number AE000239,Smith-Waterman Score=306.
atgagaaaatgtggaaagccacaatttaaactagggcaaaccaacaaggctaactctagaatccaggaggaactgattcatagtaaaagtctaatagagcaggaaggagaaaaacctgttcagttttcagctttccatcggatgtggcagcctgctgattcccagtgtgatattatagacagcgctgatatatgggccgacccgcttgtgagacaccgagaaataataacgggtagtggaggaataaatagaagaagaacaagaggaggacgaggaaggggaggagaagcagcaggaggagcagaaaattgtggcagtagagaagaaagagaaagagcaggagtgggaaccgcagtcactcaactacaaaatttaaatacaattggaataattggatcccgaggtggcaggggccaagtggcagcaatcaaccatcaaaggcaaggtggtcatagctactgtaaaggacagcagaagcaaaacagcaatcagaatagtgtgactcatgtagagctctggcattggctaattaatcacagtgttcctagaagtgaaattgataggaagcctactacattcctacttaatttatataagcagaaaacttccagagacctctggccttttaccagggtaactcttcacaggggaaagagaaatgatcagacatttcagggactactggacactggctctgagctgatgttgattccagaggacacaaaacatcactgtggtcctccagttaaagtagaggcttatggaggtcaggtaattaatggagttttagctcagatccaacttacagtgggtccagtgggttcagggactcatcctgtggtcatttacccagtgccagaatgcataattggcataggcatacttagcagctggcagaatccccacattggctccctgactagtaggaagacagatggttcttggagaatgacagtgcattatcataagcttaaccaaatggtgactccaattgcagctgctataccagatgtggtttcattgcttgagcaagttaacacatctcctggtagctggtatgcagccattgacttggcaaatgcctttttcttcattcctgtccataaggcccaccagaagcaattcgccttcagctggcaaggccagcaatatacctttactgtcctacctcagggagagaccttggttaatttttcccttcctcaagatatcacactgttccattacattgatgacattatgcagattggatccagtgaccaagaagtagcaaacacactggacttattgccaagaaagagcacaacgcctagtgggcctatggattttggaggcaacacatttctcactgggtttgttactcacacctatttactgagtgacccaaaaggctgccagtttgagtgtggtctagaacaggagaaggctctgcaacaggtccaggctactgtgcaagcttctctgccacttggggtatatgacccagcagatccaatggtgattgagatgtgctttctgacccatctagccataaagtgggttgtgcgcagcagcattccatcatcaaatggaaaaggtatgtatgtgatcaggcttgagcaagtcctgaaggcacaagttgattatactgtacctcattcatcatggaaaaggaagaagtttgtcctcactggaacagacacttactctggatatgggtttgcctatcctgcatgcaatgcttctgtggattcatctgtggattcatggactgccttatccatcgtcatggtattccacacagcaatgcctctgaccaaggccctcactttatggctaaagaagtgtggcagtaggctcatgcttatagaattcactgatcttaccatgttctccatcatcctgaagcagctggaatga

SEQ ID NO: 14164 - DNA, 1243 bp, Homo sapiens
  SIMILAR (868)..(1269): 991254mologous to Escherichia coli 6-phospho-beta- glucosidase,accession number U29579,Smith-Waterman Score=721.
actcatcccagctgagagggtccagaagatacacccttgaccaatcctttgtgaaacagatttgtgagggcagcacctgcatctttgaagagatctgcagggattggtcttctctgtatgccagatctaacagtgggaattgtagtcactcaactaaaaaatttaaatgcaatgggaatcactggctctgagctgacattgattccaggggacccaaaatgacattttggtcctccagttaaagtaggggcttttggaggtgagatagttaataaatatttagctcagcttggacttacagatgatccagtgggtccccggactcatcctgtggccattttcccagtgccagaatgtataattggcatagacatacttagcagcttgcagaacccccacattggctccctgactgggagggtgagggctattatgaagggaaaggctattatgaagggctattatgaagggaagggaaaggccaagtggaagatattagagctgcctctacctagaaaaataataaatcaaaaacaatatcgcatccctggagggattgtggagatgagtgccaccatcgaggaactgaaatacgcaggggtggtgattccgattcccaccacattcccattaaactctcccatttggcctgtgcggaagacagatggatgttggagaatgacagtggattattgtgagcttaaccaagtggtgactccaactgcagctacagtaccagatgtggtttcattgcttgagcaaattaacacatctcctggtacctggtatgcagacattgacttggcaaatgccgttttctccattcctgtccataaggcccaccagaagcaatttgccttcagctggcaaggccagcaatatacctttactgtcctacctcaggggtaggacagtaaactctccggctttaggtcataatcttattgggagagaccttgatcgcttttcgtttccacgagatatcacactgctggtccattatgttgatgacattatgctgattggatccagtgagcaagaagtagcaaatgcactggacttattggtgttttctgaccatctagccataaagtgggtcatgcacagcagcattgcatcatcaagtggaagtggtatatgcgtgatcaggctcaagaaggtcctgaaggcacaacctgcaccaatggcctcatggggggttctctatgatcagttgacagaagaagagaagattagggcctag

SEQ ID NO: 14165 - DNA, 603 bp, Homo sapiens
  SIMILAR (346)..(552): 301254mologous to Mus musculus proline-rich salivary protein,accession number M19419,Smith-Waterman Score=74.
atggctgagtcacacctgctgcagtggctgctgctgctgctgcccacgctctgtggcccaggcactgatccggccccgaggtgtgcccgttcaccaggcagaggtgtcatccgaattcaggctcctggggcccgggagggtccgactctacggacccaggtcgctgtggcccatcgctttcgatttgacttggtttctgtcgccactcgcggaaggcgcgccccccgccctcgctcggcggcccgccccgccccgcccctgctcttcctccggggccgctggcactgcggccgctccgcaggcagagaagccgggagcgggcgaggcggcggcggcagcagcgatggtgagggcccaggcggggccggccagccctgcgacgggcagagggcgagtggcgagggtgggagagaggagtccaaagtccgcgggctggggcctcccctggggcccacgagggccagacctgaggcggtgaccactgctggagcaggacggggcggaccctccactccctgcgcgccgcatgggagagaaatgcgtgagccccgtcctggctgcaccgcgcagagcgagcgggactcgggctccccattctcctga

SEQ ID NO: 14166 - DNA, 717 bp, Homo sapiens
  SIMILAR (396)..(55): 971254mologous to Cloning vector pZC320 SopB,accession number U26464,Smith-Waterman Score=551.
ctaggctagattgtgatggatgatgtggcctagcctgggggcatgccacacgatcgcttcggtaagtgcagcagctttacgagggcgactcccatcggcaatttctatgacaccagatactcttcgaccgaacgccggtgtctgttgaccagtcagtagaaaagaagggatgagatcatccagtgcgtcctcagtaagcagctcctggtcacgttcattacctgaccatacccgagaggtcttctcaacactatcaccccggagcacttcaagagtaaacttcacatcccgaccacatacaggcaaagtaatggcattaccgcgagccattactcctacgcgcgcaattaacgaatccaccatcggggcagctggtgtcgataacgaagtatctttaccaacttcatccgtttcacgtacaacattttttagaaccatgcttccccaggcatcccgaatttgctcctccatccacggggactgagagccattactattgctgtatttggtaagcaaaatacgtacatcaggctcgaaccctttaagatcaacgttcttgagcagatcacgaagcatatcgaaaaacggggatcctggcgcggcctcggctgcctgcagcaggactgccaggggcccgcttagttcaggcagcaacagcaggaggaggacggaagccaagaggtggctgagacagcagcagcactgcgaggccttcat

SEQ ID NO: 14167 - DNA, 348 bp, Homo sapiens
  SIMILAR (134)..(301): 911254mologous to Homo sapiens Human secreted protein, SEQ ID NO: 7284,accession number G03203,Smith-Waterman Score=263.
atgagaagaagaaaccgaaagactaggagatatggagttttggacactaacatagaaaatatggaattgacacctttagaacaggatgatgaggatgatgacaacacgttgtttgatgccaatcatcctcgaaggaatacaacttacaagggatgtgaaggacctcttcaaggagaactacaaaccactgctcaaggaaataaaagaggatacaaacaaatggaagaacattccatgctcaagggtaggaagaatcaatatcgtgaaaatggccatactgcccaagactgctgtggaattcctgagaaagagcaactgagggatagcaacatggatttcactgagtag

SEQ ID NO: 14168 - DNA, 1419 bp, Homo sapiens
  SIMILAR (536)..(772): 391254mologous to Hydra sp. mini-collagen,accession number X61048,Smith-Waterman Score=115.
ttagcaaccgaaggcgtccttagcagcagtggccgctgagatgtacgaacttccggttctccgggcagctgccactggtgtagcttctgccacctgccacgactcgggcctttccctggcgtttggtcacctctgcttcattctccaccgcgcctatggtccctcttggagccagcgtggcgggcctggcggctcccgggtggtgagagagcggtccgggaacgatgaaggcctcgcagtgctgctgctgtctcagccacctcttggcttccgtccttcctcctgctgttgctgcctgaactaagcgggccccttgcagtcctgctgcaggcagccgaggccgcgccaggtctttggcgctcctgaccctataccacggacattaccccgcgctgccaccgggccctacccctgcccagcaaccgggccgtggtctggctgaagctgcggagccgcggggctccgagggaggcaatggcagcaacccttgtggccgggcttgagacggacgatcacggagggaaggccggggaaggctcggtgggtggcggccttgctgtgagccccaaccctggcgacaagcccatgacccagcgggccctgaccgtgttgatggtggtgagcggcgcggtgctggtgtacttcgtggtcaggacggtcaggatgagaagaagaaaccgaaagactaggagatatggagttttggacactaacatagaaaatatggaattgacacctttagaacaggatgatgaggatgatgacaacacgttgtttgatgccaatcatcctcgaagataagaatgtgccttttgatgaaagaactttatctttctacaatgaagagtggaatttctatgtttaaggaataagaagccactatatcaatgttgggggggtatttaagttacatatattttaacaacctttaatttgctgttgccaataaataccgtatccttttattatatctttatatgtatagaagtactctgttaatgggctcagagatgttggggataaagtatactgtaataatttatctgtttgaaaattacctataaaacggtgttttcctggtcggtttttgtttccctgcttacccatatgattgtaaattgttttatgtattaatcagttaatgctaattaatttttgctgatgtcatatgttaaagagctataaattccaacaaccaactggtgtgtaaaaataatttaaaatttcctttactgaaaggtatttcccatttttgtggggaaaagaagccaaatttattactttgtgttggggtttttaaaatattaagaaatgtctaagttattgtttgcaaaacaataaatatgattttaaattctcttaaagtggtccaaattatgtgtttatccaataaacataagactatagaattaaaaatta

SEQ ID NO: 14169 - DNA, 2433 bp, Homo sapiens
  SIMILAR (617)..(549): 821254mologous to Homo sapiens Human secreted protein, SEQ ID NO: 7115,accession number G03034,Smith-Waterman Score=101.
atggctgtgctgcagccaagcaggcacaggctgagacctcagctggggctcgaacctgacaattggcatagtcagcaggatgaggtcagctctgtggccacagcacgggctgtggtacccagtggcagaggtgctgcttggatgggccccagtggaaacataggaggcagtggactggtctcccacgagtgtggagaaggcactggagcagctggaagcacacagcttcaagaaggaatgcacttttgccggcagagtcgatgggcatttctgactgcactgtgtgaagtatatactcagtccttgcaggacacagtgcagtggctgcagctgtgccaatggtcagcacagggacaagatgaccacactttaattgagtggctaatgggagccacatggactgtttggaatgatgccagagaaataccagaaactggaactggccaagatgcctggctttgtgggagttggggagtggatgaccagaggccacatgtggagctggcaatccactgctccccaactaatgtacagagggtcttggcactggtagatactggtgcagactgcagtctagtttttgggaacccggtcagaaagcctgatggaacttggcagatgacagtggatgattgggaactgaataaggtgacacctcctctgcatgcagctgtaccctccatcatggatttgacagaccacttgacaatggaactaggacagtaccactttgtggactatgtgcatagccccaccatttgtcgtggtcttgttgccatggaattagctgcctggaaatgtccaaaaggggtcctcctgtttcattacattgatgatattatgttaacctctgattctcttgcagatttaaaagtggcagtgcccctcttgtggcaacatttggcagcatgtggttgggccatcaacaaatccaaggtccaatggcctggattatctgcgaaattcttaggagttatttggttgagtaagacaaaggccataccagaggccatcattgagaaaatccaggcatacccccgacccaccacgatgaagcagctgcagacttttgtaggcctcttggagtattggcggccatttgtgccccatttggctcaaatgataaaaccattgtatgggttatcaaaaaaaggggctacctgggattgggataatgaagctggaacagaccttctggccgccaagtgggccattcagcaaacacaggccttacaagtaattgatcaggggtgcccatttgaacttgatgtacatgtaaccacagacggttttggctgggtcctatggcagcgcatggagtgctttagaacgccagtaggtttttggtcccagctgtggaagggagctgagctccagtactcattaatacagaaggaattagctgctgcatatgctgctcttcaggcttatgagactgtgacggattgggctacagtcatcgtgcagatgagttacccaatagtcgggtggactgggacagcacagacaaccactttagcgaagcggggtgcctacttggaacagcagagtatgctgactacaactcccttagcagcagagttacaagaagccttggggcctatagtcctaatggaagataaggccatggggcctgaggcacccctagaccctgagccatcactgttaaagaaagggtatcctctcgttcctgatggggcatggtatacagatgggtccagccagggtgctgctgctgcctggactgctgtggcaatccagccgacactgacaccatatagtttgatactgggtgtggacaaagcacccagtgggctgaactcagagtggttgaggatggacattttggaggcctgccagaagtgcccagcatgtgctcaagcatacctgagacaaagacaactgcccaatgtgacacaacaagtgacagtagggcagatgcccttgaccagatggcaaatagattacgctgagccactgccaaaattgcagggctacacatatgcgctgatggctgcagacatagccaccggcttgttgctcatctacccttgcaggttggccaaccagcaacacagcattcgagccctgcaacacttaagtgccttatatggccttcctctggccatcaaaagtgataggggaacacattttactggacatcaaatacgacactgtaggttggcatgctccaacaacatcatggactgggcccacacctacaccgagttgaccaatgtctccaactgttggatctgcaccgcccttccagcagcagctgcagacagcttgccctggcttgtgcatccagcttctgtgcagaaccggacattgctaaagacttggggtcccacggacaatgggtgggatgcaacatggaggctttggatagggggtgtcacaaaacccatggcaagcttgccccctggctga

SEQ ID NO: 14170 - DNA, 241 bp, Homo sapiens
  SIMILAR (1)..(168): 1001254mologous to Homo sapiens Neuron-associated protein,accession number B01398,Smith-Waterman Score=298.
gtatatctatgttgctgacatattggctcatgaaattcatgttttggaaaaacacactaatatgaatttaactcagttgaaggttctccgcatccagaacattctatctgagaagcctacagtgactacagtttatgccaacaatgggtctgttctccaaggaagttctgtagcctcagtgtatgatgggaagctgctcataggcactttataccacagagccttgtattgtgaactctaa

SEQ ID NO: 14171 - DNA, 479 bp, Homo sapiens
  SIMILAR (3)..(92): 1001254mologous to Homo sapiens paraoxonase,accession number AF001601,Smith-Waterman Score=157.
atgttgtttactacagtccaaatgaagttaaagtggtagcagaaggatttgattcagcaaatgggatcaatatttcacctgatgataagtatggccccttatagaatatcttcatttttcttcagttgtggtgctggccaaattctttactttgctttctttgtcaatgtgaaaatagttttcttgacatttatggtatattatacatataatatatagatacactatatatataattatatatgttttgtatatatatttacatatacttagtcacatgtatttatatgcaaatacaataccatatttaagtaaactatataatacagtaatatatatgtatttatatataatatataaagtttggaatacatcattgtcaaatttaattttataaatataaattttaaagtgtgatcatactgatgcatacatattgaagtatcaggtatttccttttaaataaatgtattattttt

SEQ ID NO: 14172 - DNA, 1813 bp, Homo sapiens
  SIMILAR (1383)..(874): 451254mologous to Felis silvestris polyprotein,accession number X51929,Smith-Waterman Score=350.
  misc_feature (1)...(1813): n = a,t,c or g
cgagccgggaagatggcaccgcccacggagctgctggccaggccggagcgaggcagcgcgcccggctcccgcgccatggggcggctggtgggctgtgggcttgctggggatcgcgctggcgctcctgggcgagaggcttctggcactcagaaatcgacttaaagcctccagagaagtagaatctgtagaccttccacactgccacctgattaaaggaattgtgtggtgagtgtcttcttccttccccaaattcagcagaggagatacaagggtatttgatgagggctgcagaacaggtctaaaattcccagggactccacagctttgcaccagataagcctgggaggaatactaatgatggatctaaaaagaagaaaaaacccaaggggcacgggaattaaggaatcagtcgtggggtttgatttgggcctcattcaatccacatgggcatcagcactttccataggacaacgatggacacagttttatctctttgttgtaaaccaccccagaattcaagaatacagtggaaatttttaaatttgaagaaacaaaaaattttctggtggatttgaaaaccagcaaacctgtagcctttttccaggggggaatggaatcacaggtgggtggacccgggacatttttatggcaccaatgaaccactacttctctgatcctttcttaaagtatttagaaacatacttgaacttacactgggcaaatgttgtttactacagtccaaatgaagttaaagtggccggcagaaggatttgattcagcaaatgggatcaatatttcacctgatgataagtatatctatgttgctgacatattgggctcatgaaattcatgttttgggaaaaacacacctaaatatgaatttaacctcaagttgaagggtacttgaggctgggataccactgggtgggataattttatcctatttggatcccctccctcgggggggacatctgggggtagggcttgtccatcccctaatgggcccaggaggctccttccgtgtatggaccccgaacaaatcccctccccctcggtaagagggttncttcccgcatccccagaacattccctatcctgagaagcccctacagtggacttacagttttatggcccaacaatggggtctgttcctcccaaggaagttcctgtagccctcagtgtatggatggggaagctggctgcatagggcactttattacccacagaggccttgttatttgtggaactcttaaattgttacttttgggccatggaaagtgcgattaactttaacaattaatttttctatgaaattgctaaattctggagggggatttaacccagcaacattgaccccagaaatggtatgggcatgtggtaggtaaattttaattccccagtaagggaacggccccttttagttccttagagcacttttaacaaataaaaaaggaaaatgaacaggttcctttaaaatgcccaagcaagggacagaaaagaaagcctgcctttcgaataaagtgaatacattttgcacaaaagtaagcctgcacctttgccttcccaactgcccagaacatgggttccactggaaataggagtggaattatatttccttaaaaatgtggagtgacctcacttctggcactgtgactactatggctgtttagaactactgataataacgtattttgatgttttgtacttacatctttagaataccattaaaaagttccgccgttatattaaagactaactaaaatcccaaaaaaaaaaaaaaaaaaaattcctgcggctgcgaattcttccctcg

SEQ ID NO: 14173 - DNA, 854 bp, Homo sapiens
  SIMILAR (195)..(848): 611254mologous to Homo sapiens HLA-DPB1,accession number M83664,Smith-Waterman Score=573.
tcatggtctctaatatttcagacaggagctccctttaatgagttcttgttttcctgactgcagctctcttcattctgccaaccttttccaactccatgatgatcctgcaggtttcagggggcccctggacagaatattgaggaggggggtgttgttgggagtggcaccacccccatctctccctgctcttcacagagaattccgtctaccaggaacggcaggaatgctatgcgttcaatgggactcagcgcgttgtggacgggctcatctacaaccgggaggaatacgtgcattttgacagcgcagtgggggagttcctagcagtgatggagctggggcggcccataggcgagtacttcaatagccagaaggactttatggaacggaagcgagccgatcagctgccagattgcagagaccccctgatgccagactaaggagtgtggatttctcctctaggccagcaggtccccaacctcactgctcagaagactctccaacatctcccctccaagaaggagccccagcagcaccacgacctgcttgtctaccacgtgacagatttctacccagacagcattcaagtccgatgcttcctgaatggacaggaggaaacagctggggtcgtgtccaccaacctgatccgtaatggagactggaccttccagatcctggagatgctggaaatgaccccccagcaggacaggacatgagcaggggtgcagctgctggaggtgactctgaacctgagcctgttcttcctagaggcacagtctgattctgtgcagagcaagatgctgacaggagccaggggtctcttcattaattacctacaactgaatctctgtacacct

SEQ ID NO: 14174 - DNA, 571 bp, Homo sapiens
  SIMILAR (340)..(840): 281254mologous to Rattus norvegicus 5E5 antigen,accession number D37934,Smith-Waterman Score=122.
tccagggcagggccactccagagaattaccttttccagggacggcaggaatgctacgcgtttaatgggacacagcgcttcctggagagatacatctacaaccgggaggagttcgcgcgcttcgacagcgacgtgggggagttccgggcggtgacggagctggggcggcctgctgcggagtactggaacagccagaaggacatcctggaggagaagcgggcagtgccggacaggatgtgcagacacaactacgagctgggcgggcccatgaccctgcagcgccgagtccagcctagggtgaatgtttccccctccaagaaggggcccttgcagcaccacaacctgcttgtctgccacgtgacggatttctacccaggcagcattcaagtccgatggttcctgaatggacaggaggaaacagctgggcgtcgtgtccaccaacctaatccttaatggagactggaccttccagatcgtggtgatgctggaaatgaccccccagcaggggaggatgtctacacctgccaagtggagcacaccagcctggatagtcctgtcaccgtggagtggat

SEQ ID NO: 14175 - DNA, 1680 bp, Homo sapiens; identical to SEQ ID NO: 7546
  SIMILAR (153)..(88): 771254mologous to Homo sapiens Human secreted protein, SEQ ID NO: 7678,accession number G03597,Smith-Waterman Score=96.

SEQ ID NO: 14176 - DNA, 430 bp, Homo sapiens
  SIMILAR (161)..(430): 711254mologous to Mus musculus Pro-Pol-dUTPase polyprotein,accession number Y12713,Smith-Waterman Score=334.
gagacctccagccttttaccagggtaactgtcactggggaaagggaaatgatcagacatttcagggactactggacactggctgtgagcagacattgattccaggggacccaaaacatcattgtggtcctccagttaaagtaggggcttttggaggtcaggcaggcattgacttggcaaatgcctttttctccattcctgtccataaggcccaccagaagcaatttgtcttcagctggaaaagccaggaatatacctttactgtcctacctcagaggtatatcaactctccggctttgtctcataatcttattcggagagaacttgatcacttttcacttctggacgatatcacactagtccgttacattggtgatattatgcttattggatccagtaagcaagaagtagtaaacacactggacttattg

SEQ ID NO: 14177 - DNA, 1428 bp, Homo sapiens; identical to SEQ ID NO: 6119
  SIMILAR (689)..(627): 761254mologous to Homo sapiens Human secreted protein, SEQ ID NO: 7115,accession number G03034,Smith-Waterman Score=80.

SEQ ID NO: 14178 - DNA, 911 bp, Homo sapiens
  SIMILAR (687)..(908): 741254mologous to Mus musculus Pro-Pol-dUTPase polyprotein,accession number Y12713,Smith-Waterman Score=298.
atgattagacccaaaaatgctaaggactgtacttccaatagtatggagaacactgatattccttggtgtgaactgtttagagagttatgcaaaattaatgcatttgacactcctaattcactgctcacgagaggcaagaagtttagtgactctatacataatacctttgaccatatatggagaacccaagaacataatgaagctggttggttgctcctaacttcagtggacaaaaggatgaaagaagatgatgaacttagggattctgtctcctggcttcagaagcagatactgagcctcaaatctgccaagattaccctgagtgagagtcttatctcctgtagagaaagagctgaaattgtgggaaaacagacacagctcttatcctgcaagtggctgacctgcaacaaaaggagacctccaacctttcaccagagtaactgtgcaatggggaaagaggaatgttcagactttttggggattattgtacactggatctgagttgatgttcattccaggggacccaaaacatcattgtggtcctccagttaaaccgggggcttacagaggggtatatcatctccccggctttgtgccagaatcttgtttgcagagatcttgatcacttttcccttctacaagatatcacatgggtccgttacattgattacactatgctgattggatctaatccaatggtgcttgaggtgtcagtggcagatagggatgctatttggagcctttggcaggcccccatagatgaattacagcaaaggtctctaggattttggagcagggccctgccatcttctgcagataaccatcctcctttcgacatgcacctcttggcttgttatcgggctttgatagaaactgaatgtttgactatgggtcatcaagtcaccatgtga

SEQ ID NO: 14179 - DNA, 2901 bp, Homo sapiens
  SIMILAR (1450)..(3099): 981254mologous to Homo sapiens KIAA0433,accession number AB007893,Smith-Waterman Score=2842.
atgtcagttgaagctcggaaggactcttttattacacagataattcaaagcaagaaatctgctgtcagtatagggacagcctctgggctgaacagggcaacaagttcaggtcacctccacggccttgctgctccacagctggaggaagctgcagcgcaggcaggaggaggtggaagccaggaggggtggaagtggggagggaagaagaagggagcaggaagccgggtggctctaatcagagaaggcaacggcagtgccgggatctgggtcactttgatcgtagggtttgctgaagcacaaagaaagggttttcctgccggttctccacaactagactaccccatcagcaatcctgaaggacgggagactgctgagcggatggaggttaagaacagaagaaactgggacagccggtgccttgtgccaatccctatgcacctgctaaataggctgacatgtttggacgaagcagcccaatttgcatttgtcaccacaatgaatgactttggcaaaggcactcaccctctccacaattataaaatgaggttgtggccttctcccagttgggaaataggtgagaccccatgtcaaaaaaaagaagaagaaggagaaggaggaggaggaggaggaagaggcgaagaagaagaagaagaggaagaagaggaggaggaggaggaaatcaagagtacagtttgtagtagggatagccacgaaaaaaagcatttaaagaacccggatgctggcgacgagtgtttacatagccaattccctttattaaataccctctactttaaatacctagaatgggaccaacttgagcagtaccagtacattctccacagagatgctgaccctgattatcaacctgcagaaccaatgacagcatcagtctccctccagacattgtatactagaagcggtgaccatgggcagacccgtccatctcagcttgccctgcggagcattgtgggagtgctttctgagtcggaatttcaagcgtcactgcaaggacagtttgtgttttggatatcagacagtaaaagttcagttcagttaattgcattctcagttcaggacgtattatcaaaatcgcatcacctctctgccaatcctgatgctgggttatttacgtattccaacctgtctgtctttctgggaatcttccaaattccatatcagaggaagccgaagtgtgtggatcgtttcccttttcctccttttccaagtagacgtttttggctaaaattagcaacagttttcaataaaccagatgtgatctctcacccagggttctggagtttggcgcagagtacacactttcatcagctgtccccagtgccgggctggtcagagttcagtaccagagatggttctctgacagtgtggagcaccagaaaccatgagaaggaggcacagcaatctctcctgagcatggagcctgctcttggtgttgttttgctgcagctgctgtttgccattgatgatcgttctcttctttcaggagatatggagaacactgagagtccttggcatgaactgttcagagacttatgcaaaataaatgcatttgacactcctgattcatcactcatgagaggcaaggagtttagtgactctatacataatacctttgaccatatgtggagaaccaaggaacataatgaagctggttggttgttcctaagttcagtggacaaagtgatgacagaaaatgatgaactcaggaattctatcttccggcttcagaagcagatactaagcctcaaatctgctaagattgccctgagtgagagttttatctcctatagagaaagaactgaaattgtggaaaaacagacagaagctcttatcatggtatctgtgcactggggaaagggaaatgatcagacatttcttggactactggatactaactctgagttgtcattgattccggggaacccaaaacatcattgtggtcctccagttaaagtaggagcttatggaggtgaggggtatatcacctctctggctttgtgtcataatcttattcggagaggacttgatagcttttcgcttccacaaaatatcacactggtttattacattgatgacattatgctgattggatccagtgagcaagaagtagcagacacactggacttattgactgccagttttgagtggggtccagatcaggagaaggctctgcaacaggtccagactgctgtgcaagctgctctgccacgtgggccatatgacccagcagatccaatggtgcttgaggtgtcagtggcagatagggatgctgtttggagcctttggcaggctcccataggtgagtcacagcatgggcctctaggattttggagaaaggccctgccatcttctgcagataactactctccttttgagagacagctcttggcctgttactgggctttagtgaaaactgaacatttgactatggatcatcaagtcatcatgcgacctgaactgtttatcatgaactgggtgctttctgatccatctagccataaagtgggtcatgcacagcagcattccatcaccaaatggaggtggtatgcatgtgatcaggctccagcaggtcctgaaggcacaagtaagctacatgaggaaatggctcagatgcccatggtctccactcctgccaccctgccttctctcccccagcctgcactgatgtcctcaacggtagttctgtatgatcagttgacagaggaagagaaggctagggcctggttcagagatggttctgtacgatatgcaggcaacacccgaaagtggacagctgcaacactactgcccctttctaggacatccctgaagggcagtggggaagggaaatctttccagtgggcagaacttctcgcagtgcacctggttgtgcactttgcatga

SEQ ID NO: 14180 - DNA, 2583 bp, Homo sapiens
  SIMILAR (1600)..(2370): 751254mologous to Mus musculus Pro-Pol-dUTPase polyprotein,accession number Y12713,Smith-Waterman Score=1064.
atgactaaaacaccaaaagcaatgacaacagaagccaaaattgacaaatgggatctaattaaactaaagagcttctgcacagcaaaagaaactatcgtcaaagtgaacaagcaacctacagaatgggagaaaatttttacaatctacccatctgacaaagggctaatatccagaatccacaaagaacttaaacaaatttacaagaaaaaatcaaacaaccccatcaaaaagtgggcaaaggatatgaacagacacttctcacaagaagacatttatgcagccaaaagacacatgaaaagatgctcatcatcactggccatcagagaaatgcaaatcaaaaccacaatgagataccatctcacaccagttagaatggcaatcattaaaaagtcaggaaacaacaggatgcagggggaggaacatggcttcattcctgctctgagtcatcgtcactgttcccacatccacttggtgatgagggacacacatctcagctgtgaagctcacagaactcactcaagagccacagatctatttcgaacgcatttggagagttggtgtgtgcaatccgaacacttgcagcctgcagacaacctactgtgggaccttgtgagcatggtaactgtgcactggggaaaaggaaatgatcagacatttcagggactactggacactggctctgagctgactttgattccaggggacccaaaacgtcactgtggtcctccagttaaagtaggggcttatggaggtcaggtaattaatggagttttagctcaggtgcaacttacagtgggtccaaagacagatggatcttggagaatggcagtggattatcataagcttcaccaagtggtgactccaactgtggctgctgtaccagatgtggtttcattgcttgagcaaattaacacatctcttggtacctggtatgcagccattgatttggcaaatgcctttttctccattcttgtctataaggcccaccagaagcaatttgccttcagctggcaaggacagcaatatgcctttacaatcctacctcaggggtatatcagttatctggctttgtgtcataatcttattgggagagattttgattgctttttgcttctgcaagctatcacactggtacattacattgatgacattatgctgaatggatccaacacactggactcatgggtgagaaatttgcatgccagaggatggaaaataaatccaacaaaaattcagggagcttctacctcagtaaaatttctagggatccagtggccatatgacccagcagatccaatggtgcttgaggtgttaatggcagatagggatgctgtttggatcctttggcaggcacccataggtgaatcacagcagaggcctctaggattttggagtaaggccctgccatcttctgcagataactactctccttttgagagactgctcttggcctgttactgtgctttcgtggaaactgaacgtttgactatgggtcatcaagtcatcgtgcgacgcgaactgcctatcatgaactgtatgctttctgactcatcaggccacaaagtgggtcacgcacagcagcatcatgaaattgaagtgatatttgtataccatgtgagtgctcaccaatgggtgacttcagcagatgaggagtttaataatcaagtggataagatgacccgttctgaggataccactcagcctctttcctcagccacccctgtcatcacccaatgggcccacgaacaaagtggccatggtggcagggatggaggttacacatgggctcagcaacatggacttccactcaccaaggctgacctgactatggccactgttgagtgcccaatttgccagcagcagagaccaacactgagccctcaatatggcaccattccttggggtgatcagccatccacctggtggcaggttagttatattggaccttttccatcatggaaagggcagaggtttgtcctgactggaataggcacttattccggatatgggtctgcctatcctgcacgcaatgcttctgccaagactaccacctgtggactcaaggaatgcctaatccaccatcatggtattccacacagcattgcttctgaccgaggcactcattttatggctaaagaggtgtggcagtgggctcatgctcgtggagttcactggtcttatcgtgtttcccatcatcctgaagcagatggattgatagaatggtggaatggccttttgaagtcacaattacaacaccaactaggtgacaatactttgcaggactggggcaaagttctccagaaagccacatatgctctgaatcagcatctgatatatgaacattggactccaagttcttcagttttgggacacggactggctctccttccttctcagcttgcagacaacctattgtgggaccttgtggtcatggcctatacgttaaaactacagaatgctgatgaaataaacataaggcgtagatgtctgactagacagccaggaagtactgctcccaccgagagaccaaaatatggagtaaaccaacatgcttcaaacacatcttcagagagaaaacactga

SEQ ID NO: 14181 - DNA, 2727 bp, Homo sapiens
  SIMILAR (3)..(617): 931254mologous to synthetic construct aceB,accession number A31765,Smith-Waterman Score=988.
ggaaataatatggaagaatgaatacttcattttaattgatcttccagggtgactgtgaagatcacgctaaccttctgtgcagccttcttcttggatatggattagaagcctttgtttgtgttgggaccaaggcaaaaggagtacctcatgcatgggttatgacttgtggaactgatggggccatcactttttgggagagtttaacaggacacaggtacatccataaacctaccaatcctgatgaacctccagttgctgaacagcccaaaccactgtacccatatcgaacaattggttgtgttttcaaccatcagatgttcctgggaaattgtcaaccctctgatgcagtagaaacctgtgtatttgatttgaacgatgaatccaaatggaaacccatgagtgaggaagcaattaaatctgtgtgtgctcctggagctacaacatcccttcctccctttccacctctgtgtgcatccacaattgacgcgtcagtaacaagtaatgaaattgaaatgcagctgaggctcctggtgtcagaacacaggaagtataccaaaatccacacatgtccaagccccactggtggccctgtagaacctgcagatacaaagagtcagccctctgtatgcatggatttcacatcccatgaataccgtatttccgacccgtttttggttgaaaaaaatttgcctaaagaaaaaactgccaacacagccggacatcagaaggaacaaactggggacacgctgcctttaagaaacataacaggcaccgtgagggtccacggcttcattcttgaagttagtgagaccaagaacccacctaatcccgggcacaaaaccacctcaatctcccaaagaccgaaagccctggtgtcgctgggaccagaggtgagacgtggaacacgtggggaagatgagaaggcgctggagaaggagggtggtggtcgcagatgggaatgtggtggagccaatgagctgtgcgggagacctccagccttcaccagggtaactgtgcattggggaaagggaaatgatcagacatttcaggacctattggacactggctctgagctgacattgattccaggggacccaaaacgtcattgtggtcctccagttaaaataggggcttatggaggtcagataattaatggagttttagctcaggtccaacttacagtggatgcagtgggtccctggactcatcctgtggtttttcccagtgccagaatgcataattggaatagacatactcagcagctggcagaatcccacattggctccctgactgtccatttatctagtgacccaaaaggctgccattctgagtggggtccagaacaggagaaggctctgcaagaggtccaggctgctgtgcaagctgctctgatacttgagccatatgacccagcaggtccagtggtgcttgaggtgtcactggcagatagggatgctgtttggagcctttggcaggcccccataggtgaatcacagcaaaggcctctaggattttggagcaaggccctgccatcttctgcagccataaagcgtgtcatgcacagcagcattccatcatcaaatggaagtggtatatacatgatcgggctcgagcaggtccggaaggcacaaatagttctgcacgatatgcagccaccatgtgaaaatgggacagcttcagcactacagcctctttctaggaaatccttgaaggacagcagtgaagggaaatcttcccagtgggcagaacttcgagccgtgcacctggctgtgcacgttgcatggaaggagaaatggccagatgtgcgattagatactgattcatgggccgtagccaatggtttggccagatggtcagggacttggaaggagcatgataggaaaattggtgacaaagaagtctggggaagaggtacgcggatagaactctctgagtggtcaaaaactgtgacgatatttgtatcccattgcttctaccaagactaccatccatccgtgggctcacagaatgccttatacaccaacatggtattccacacagcattgcctctgaccaaggcactcactttacggctaaagaattgcaacagtgggctcatgctcacggaattcactggtcttaccatgttccccatcatccagggttggggcaaagttctccagaaggccgtgtatgctctgaatcagcgtccaatatatgaatggaaggaagaatcatgcttgcacacaggtgtggctgatgcgctcagaggcaactgggcagaaggccacagggagcacaaggccttgtggctgggcctctggagcacctggtctcagcacccgctcaggtccttgaagacgaccagacaccatccagggcttggtgtactctctgaagatatatgcgaggcagggggagctacagaagagctgtccagggcctctggttttgccacagggtatgggaagagaaaagaagacactaagaagcataagcagcactctgtgtcagatataatgtaaggaacacaatctgccaaagaactggcctaagccatttcctaagaattttccttcacagaacgtgtaatatcaaaaataacttgccttttatcttaaatactcaaagcttcaaaaccttataatgtccataattcattacatcgtcagaaaaaaactgaaataccatttcatttccaaaagaagtcaagatatacttttacctatgatttaaagcagaacaagc

SEQ ID NO: 14182 - DNA, 377 bp, Homo sapiens
  SIMILAR (374)..(237): 671254mologous to Homo sapiens Human secreted protein sequence encoded by gene 11 SEQ ID NO:72,accession number B24447,Smith-Waterman Score=151.
gtctgctggagtttgctggaggtccactccagaccctgtttgcctggttatcaccagcggaggctgcagaacagcaaagattgctgtctgttccttcctctatggaatttctaggcggctttgtttacactgtgagggtgaaaccatctactcaggcgtcagcaatggcagacgcccttccccccaccaagctggagcatcccaggtcgagctcagactgctgtggtagcagcgagaatttcaagccagtggatcttagcttgctgggttccgtgggggtaggacccaccgagccagaccacttggatccctggcttcagccccctttccaggggagtgaacggttctgtcttgctggcgttccaggtgccactggg

SEQ ID NO: 14183 - DNA, 753 bp, Homo sapiens
  SIMILAR (537)..(403): 861254mologous to Homo sapiens Human secreted protein sequence SEQ ID NO:103,accession number Y87064,Smith-Waterman Score =195.
tcatgcaatctgcagaaggcctccctccacaggtacgagcccaagggcacgtccaatgaacatactgcacattgggctccatctcagagcctgcttcccaagaattcgacctgtggcatgggtagggcaatggccagccacagtcacagagatttttccataatgagaagactcttgttgaaggtttaccctaggccccacagaggccagcaagctaagatccactggcttgaaattcttgctgccagcacagcagtctgaagtcgacctgggacactcgagcttggtggcaggaggggcgtccactactactgaggcttgagtaggcagttttcctctcacagtgtaaacaaagccactaggaagtttggaaggagagttctggctggcatctggcaggtgcccctctgggacaaagcttccagaggaaggaacaggcagtaatctttgctgttctgcagcctctgctggtgatacccaagcaaacagggtctggagtggacctccagcaaactccagcacacctgcagcagaggggcctgagtgggtgtcttcaatccttatgctcattgacctcttcatgacctcaacgtcatcctcaaaattcttcgttggtttccaactgtgtggtttcctagttggattctttctgctctcatctttcctccttcggggcacccggatggctattccattcgcagcatccagaggaaggtgcccctgcctccagctgccttgatttagttcccccat

SEQ ID NO: 14184 - DNA, 2424 bp, Homo sapiens
  SIMILAR (1)..(1080): 961254mologous to Homo sapiens putative p150,accession number U93563,Smith-Waterman Score=1780.
atggtggatgaagatacaagtgatgtgttccaagagcagataggaggtgtctacttaaaagaaaacctaagattctcacatgtggtttcatgtcagacccagcacattgacagctgtggtggctatggtgagaaaggtgcagaaggccttctgcttgagaaagaggtccccaatccctggaccacggaccagtacccatccgtggcctgttatgaaccaggctgcaccgcagaagcagcagcatcagattctcataggagtgcaaaccctactgttaactgcacatgtgagggatcaaggttgcacactccttataagactctaatgcctgatgacctgagatggaacagtttcatcctgaaaccatacccccaaccgccatcctgggaaaaattatcttccatgaaactggtccctggtgccaaaaaggttggggaccgctgctttactgcacataaagtaactagtaaaccaaagttcagttctaaaagtcacatttggcatgtttataatgaaaattccaacagacagaagctggaacatgtaaaagtcaataaaggaagcaaagcgagtttatttataaataaagaagatgtatatgaatattaccaaaaagatcccaaaaacacaaaatttggtaaatccaagcataaacaatcaactcttgaccagatatactctacaggactcagaaagggcaatctccataacgtcaaagatcccaacacaaacgtaccaaaaggtataggaagaagaaaaacacaacataaaaggacccaagtagatgatgtagactgtaatccaagaaagatactagctgtctctccttccaggagaataaacagattggttacctatcagcagcatattccagaaactcataatgaccttccagaagaattgtgtgaaccttccagcttaactctgtcaagcctgagaaatggattagatagcagtactgaggcttgttcagtttccaaagagaaacacatccagaacctggatttatcagatagtcaagaagttcaatgcttggaattagaatctgttgaccaaactgaagctgtttctttcccagagcttttattacataaagaaatcaagttaccagttgttactacagataagcagcctcacactctccaggaacaacaccatgtactttataaatctcatgaaaacagtaacttggtcccaaaagatgagagatttaacaaatgggaaaattctttcctatcctttgtaaaggaaaattctgataatgatgatgatgatgattgctctacctctgagaaggctataacatctaaaaaggtgttgtgttctacaggtggcaaaaaacactataattttaaggagaatttaacaaataaaaaagaaatgggtttccaacagtttttactttctgaagatcatctttcacaggaaaatgagttaaaagcagtcagcctaaccacacttccagaacaggaagctgttaatttttcttattcagataatgcagttatttctgaacatgttgcaaattatgaacaatgcatatttggaccttcttttgatcactcaaatggcaatcctgagcaaaattccctggcttgtatgagaacacttttgacacatgaggcttcaaagttgactaatcatgtggagctattcaaaaagccacaggattatattcccagagcaccaacttttttaatgaatcaaacagatacacatattgtggaaaagatggcaaagaattgtgacactgagaggaattacattgacagagaccaaaaaataatttattcaaatgagcctttatccatagttgctcattctcaagtaatagaaacaactaaagttgaaaaaaggagacaaaaccatctagaaagtgagactatacacaatatagattctcattccactgacaatatgagtaaagaattggccaacatctcaaaacttagtcaaagagaaaagaaggaaatttctcacaaaccagatgaggaattaactaataacatcagtggagatgaaataactataagaaattgtgaggagataaaagaaaaaacggagtcagaaattcacatgcctactaatagccaagaacacaaaacagttcagaatttcagaaaaagacaaagtttcttaaaaactacctgcaacctaggggttcccccgtggagttctttggttcgttcagtgggttcgtcgactttaatgggtagtgtttctgcccttgtctcggtctccgttccgtcagacccctctgctgcaggtctgctggagtttgctggaggtccactccagaccctgtttgtctgggtatcaccagcagaggttgcagaacagcaaagattgctgcctgctccttcctctggaagctttgtcccagacgggcacctgccagatgccagtcggagctctcctgtatga

SEQ ID NO: 14185 - DNA, 1073 bp, Homo sapiens
  SIMILAR (974)..(693): 971254mologous to Homo sapiens preprostromelysin,accession number X05232,Smith-Waterman Score=492.
ttagctattgatacttgtgtatgcttcacgaagttcttgtgttgtgtttttcaactctatcaggtcatttatgttcttctctaaactggttattctagttagcagtttctgtaaccttttatcaaggttcttagcttccttgcattgggttggaacatgttcttttagcttggtggagtctgttattacccaccatctgaagactacttctgtcaattcatgaaactcgttctccgtccagttttgttcccttgctggcgaggagttgtgatcctttggaggagaagaggcattctggtttttggaattttcagcctttttgtgctgttttttcctcatcttcgtggatttatctacctttggtctttgacgttggtgacctttggatggggtttttatgtgggtgtcctttttgttgatgttgatgctattgctttcagcagaggctgcagaacagcaaatattgcagaacagcagatgttgctgcctgatccttcctctggaagcttcgtcacagaggggcacctgccagatgccagcaggagctctcctgtatgaggtgtctgttgacccctgctaggagatgtttcccagtcaggaggcatgagggtcagggacccacttgaggaggcagtttgttccttagcggagctcaagcactgtgccgggagatctgctgctctcttcagagctctaactgcaaaagagatcattatatcagcctctccttcatacagcctggagaatgtgagtggagtcacctcttcccagactttcagagctttctcaacagcagaatcaacagcatcttttggcaaatctggtgtataattcacaatcctgtatgtaaggtgggttttcctccacttcgggatgccaggaaaggttctgaagtgaccaacgtcaggaactccacacctgggcttgcgcatcacctccagagtgtcggagtccagcttccccgtcacctgaacaaggttcatgctggtgtcctcaccccttgcagctccatccaatggataggctgagcaaactgccacgcacagcaacagtaggattggaagactcttcat

SEQ ID NO: 14186 - DNA, 690 bp, Homo sapiens
  SIMILAR (226)..(26): 381254mologous to Homo sapiens Polypeptide fragment encoded by gene 114,accession number W88930,Smith-Waterman Score=86.
atgaggatgtctggaggaagagtcttccaggcagagaacagagtgaccgtcattttgcgggaacagcagggagaaaggagggggataagcaaggagtttgcgggagagagggcaacgcctgctctgcgctgcgcattcgctctggccatagcgggcctcgtgtcgctgctgatgcagcccgagggcgccctcggcgaggagctgcaagtgccgcagcccagggccgccagttggctgaacttaggctccatcaagaagtacttggggaagctcttcaacagcagcccgaagaaatctaaaaaccacaagaaaactgcgaacgccacggacacctccccatcaaaagccacgaaacccccaccatggaccaccacgaacccccagtggctgaacacctcggaaccccgaccaccgacctcctcccggggccccaggtaggacagcctggatgctgggcaccgagccaggggcctcggggctgggggcagcttgggtgctagcgagaggaagttcctgggggcgggcatgcggggagacacagcacccctgtggggggggcttctttctccaggctgggccttggcctccagacgcctctctgcctaccaacccctttgtattgagaggggcctcgacccctcctcatcccctcagtgaaaacaataaagacaaatttttgttgcaaaaaaa

SEQ ID NO: 14187 - DNA, 437 bp, Homo sapiens
  SIMILAR (320)..(225): 461254mologous to Chlorella protothecoides putative extensin- like protein,accession number AJ238629,Smith-Waterman Score=57.
acgaccgccggacgcagttcggccgatttgacactgggcatcctcgagcttgttaaagcacttgcccaacggtgagcaacggcctgcaacggagcccgagggactcgcgctgcccgttaagcagctttgcggtggcggaggctgggctgacgtctctccgacatcccgggacggaggaagagatgaaggctctgcagcccccgccgcccgatttacgcttgagaaagcgaaggcgagagaggtcgtccagcccctgggggcccagccctagagagcgggacgcgggctgcggggcccggcggcctggacggcggagcgttgaaagctcccccagggataggaagtgcagccgaaatcaacgattgagggtctgagcacctccctcatgcagacagagccccggctcccatgttcaccatgctgagaaagacctgcgg

SEQ ID NO: 14188 - DNA, 687 bp, Homo sapiens
  SIMILAR (1)..(255): 961254mologous to Homo sapiens TAR DNA-binding protein- 43,accession number U23731,Smith-Waterman Score=430.
atgtctgaatatattcgggtaaccgaagatgagaacgatgagcccattgaaataccatcggaagacgatgggacggtgctgctgtccacggttacagcccagtttccaggggcgtgtgggcttcgctgcaggaatccggtgtctcaatgtatgagaggtgtccggctggtagaaggaattctgcatgcccccgatgctggctggagaaatccggtgtatgttgtcaactatccgaaagataacaaaagaaaaatggtgttgggtctcccatggaaaacaactgaacaggacctgaaagagtactgtagtacctttggagacgttcttatggtgcggcaaagccaagatgagcctttgagaagcagaaaagtgtttgtggggcgccgtacggaggacatgactgaggatgagctgtgggagttcttctctcagtatggggatgtgatggatgtcttcgtccccaagccgttcagggcctttgcctttgttccatttgcagatgatcagattgcgcggtctctttgtggagaggactcgatgaaaggaatcagcgttcacatatccaatgccgaacccaagcgcaatagcaatagacagcaagaagtggaagatttggtggtaatccaggtggctttgggaatcagggtggatttgagtcgtatcaacgctgtgaacgcaaggctgtga

SEQ ID NO: 14189 - DNA, 833 bp, Homo sapiens
  SIMILAR (1)..(831): 1001254mologous to Homo sapiens TAR DNA-binding protein- 43,accession number U23731,Smith-Waterman Score=1469.
gagcccattgaaataccatcggaagacgatgggacggtgctgctctccacggttacagcccagtttccaggggcgtgtgggcttcgctacaggaatccagtgtctcagtgtatgagaggtgtccggctggtagaaggaattctgcatgccccagatgctggctggggaaatctggtgtatgttgtcaactatccaaaagataacaaaagaaaaatggatgagacagatgcttcatcagcagtgaaagtgaaaagagcagtccagaaaacatccgatttaatagtgttgggtctcccatggaaaacaaccgaacaggacctgaaagagtattttagtacctttggagaagttcttatggtgcaggtcaagaaagatcttaagactggtcattcaaaggggtttggctttgttcgttttacggaatatgaaacacaagtgaaagtaatgtcacagcgacatatgatagatggacgatggtgtgactgcaaacttcctaattctaagcaaagccaagatgagcctttgagaagcagaaaagtgtttgtggggcgctgtacagaggacatgactgaggatgagctgcgggagttcttctctcagtacggggatgtgatggatgtcttcatccccaagccattcagggcctttgcctttgttacatttgcagatgatcagattgcgcagtctctttgtggagaggacttgatcattaaaggaatcagcgttcatatatccaatgccgaacctaagcacaatagcaatagacagttagaaagaagtggaagatttggtggtaatccaggtggctttgggaatcagggtggatttggtat

SEQ ID NO: 14190 - DNA, 447 bp, Homo sapiens
  SIMILAR (295)..(411): 411254mologous to Drosophila melanogaster Mst84Dc,accession number X67703,Smith-Waterman Score=64.
tgcgggggacagcaggaggacagccggggaatgggcccgcacttgcccagagtccctgatggtgtcgtcttgggagtggaggaacctgagggaaaagcccagggacgagtcaggggagagctctgccctggtgctcttgcacgtatccacatgggccacagctgcacccggctctcagcagagggcatcgccatgctcctgggcacagccgggccctctcgcctccctgcggctcctgatgcctcccaggctccgctgaggtcaccttgggcacttagcgtggctgcagctctttgcagccccgtgtcctgtcatccatgtggccgtcatgtggtcacttttgggcattgccctgcgcaaggtccatggggactgggcacctttggccattctttctttggttgtctgtgcaagtaataaactaaatctgaaaaaaaaaaaaaaaaa

SEQ ID NO: 14191 - DNA, 1803 bp, Homo sapiens
  SIMILAR (2331)..(3749): 801254mologous to Homo sapiens putative p150,accession number U93564,Smith-Waterman Score=1920.
tcactctcctgcacgggagggcactggttggaaggtgtgtgagggaaccttctgatggccacgctcaggaccttgagaagggtttgaggcacaaaacagcacacacttgtcaaaactcagcaggtattcactcgtgagcagggcattgcactgaacgccaagctttccatccaaaggaaaacccggtggcaaatggactgtaacgatgtgcgcactcagcggagcctgggaggcatcaggagccgcagggaggcgagagggcccggctgtgcccaggagcatggcgatgccctctgctgagagccgggtgcagctgtggcccatgtggatacgtgcaagagcaccagggcagagctctcccctgactcgtccctgggcttttccctcaggttcctccactcccaagacgacaccatcagggactctgggcaagtgcgggcccattccccggctgtcctcctgctgtcccccgcaggtctttctcagcatggtgaacatgggagccggggctctgtctgcatgagggaggtgctcagaccctgcagggcgggaacaaggtggaggaagtcgctggcgctgcagaagctgggcagtcaccccctccacacccaccccagcacataacaggtgctcaacacattcgcgaggggagcgctgagcaaagcggaggcccgggttccctcctggagaaacctgcttcccctccaaggcctcaagcgtccgctccttcactgacctcaatcgttgatttcggctgcacttcctatccctgggggagctttcaacgctccgccgtccaggccgccgggccccgcagcccgcgccccgctctctagggctgggcccccaggggctggacgacctctctcgccttcgctttctcaagcgtaaatcgggcggcgggggctgcagagccttcatctcttcctccgtcccgggatgtcggagagacggcagcccagcctccgccaccgcaaagctgcttaacgggcagcgcgagtccctcgggcaccgttggaggccgttgctcaccgttgggcaagtgcatcggaagacgatgggacggtgctgctgtccacggttacagcccagtttccaggggcgtgtgggcttcgctgcaggaatccggtgtctcaatgtatgagaggtgtccggctggtagaaggaattctgcatgcccccgatgctggctggagaaatccggtgtatgttgtcaactttggagacgttcttatggtgcggcaaagccaagatgagcctttgagaagcagaaaagtgtttgtggggcgccgtacggaggacatgactgaggatgagctgtgggagttcttctctcagtatggggatgtgatggatgtcttcgtccccaagccgttcagggcctttgcctttgttccatttgcagatgatcagattgcgcggtctctttgtggagaggactcgatgaaaggaatcagcgttcacatatccaatgccgaacccaagcgcaatagcaatagacagcaagaagtggaagatttggtggtaatccaggtggccggctccaagggactcggtattccccagcgccggctccgggcagtcccggaagggctcaagggctgggcgactggctgatcgagaccgtccgggtcctggctctcgggtcacttgcagaggcctgagcagagcgtagggagggcgccggccgcgccgcgtcacgccgtccgccggtcgctccgccgactcgcggctctgtgccgccggacccgcgcccgctgccgccgcgcacagctgcacgtatcccctcagcgccgtcgacat

SEQ ID NO: 14192 - DNA, 185 bp, Homo sapiens
  SIMILAR (3)..(86): 821254mologous to Homo sapiens HSPC004,accession number AF070660,Smith-Waterman Score=107.
gagagcgggaagctatccagaagtctgtgacaagaagctgcttactagaggaggaggaggagtcagctggctacactgctcaggcttcaggcccacttgttgaacagaacaatctgggtagcaacagcatcttccacagttttccaaactggatagctgccaaccagcagacattacccacttga

SEQ ID NO: 14193 - DNA, 411 bp, Homo sapiens; identical to SEQ ID NO: 1481
  SIMILAR (173)..(349): 941254mologous to Homo sapiens HSPC004,accession number AF070660,Smith-Waterman Score=275.

SEQ ID NO: 14194 - DNA, 456 bp, Homo sapiens
  SIMILAR (25)..(204): 801254mologous to Homo sapiens HSPC004,accession number AF070660,Smith-Waterman Score=218.
cccacgcgtgcggtggaggcagccatggtgcggttcatgcacaggtacctgctctgcgaacaggtgtgtgacgacctccgctgccgcctaagccttgatgaccgagttctgagcagcctcgtacgggacacgatcgccagggtgcacggaactttctgcgcaatcgcctgctccatcgccttggcgcttgcaagggcgctgaacgaagaggggaacccggaaggatggcgggatgtggcgggagcaagcgccggaggaagaaagaaggggcacgagtgcccaagcccgtgcaccgttttttgtacgttggctatcccaatgcctatactgtaatagggctacttcgatgcaaaaaagaattgtatcaagttgtgtggtcagttctttacttgatgacatacttggagaacaaaggacaccgttacccatgctttttcaacacattacatgtgggag

SEQ ID NO: 14195 - DNA, 990 bp, Homo sapiens; identical to SEQ ID NO: 1483
  SIMILAR (561)..(1121): 301254mologous to Caenorhabditis elegans proline and glycine- rich,accession number U41557,Smith-Waterman Score=129.

SEQ ID NO: 14196 - DNA, 455 bp, Homo sapiens; identical to SEQ ID NO: 14095
  SIMILAR (121)..(393): 1001254mologous to Homo sapiens cytokeratin 18 (424 AA),accession number X12883,Smith-Waterman Score=447.

SEQ ID NO: 14197 - DNA, 1044 bp, Homo sapiens
  SIMILAR (892)..(1092): 681254mologous to porcine endogenous retrovirus viral polypeptide,accession number AJ133816,Smith-Waterman Score=252.
ttcttcccaaatgccaagtccacaagaaggaatgtgtggcaaagcttgcacaccagccctctctcaggctgacagcctttgccctttgctcaggttggcttcagaggtggagggatattggcagatggcttgtgcagagccttatgttcagtcagagatgaacgatcatctgtcagtgtggtctctccagcatggcagcaccaccctggctagcatgagcttcaccacttgctccgccttcaccaactactggtccccgggttctgtccaggtgcccagctatggcacccagcctgtcagccacgcagccagcgtctatgcaggcctggggggctctggttcccggatctccgtgtcccacttcaccagcttctgggggtctggcaggaatgggaggcatccagaacgagaaggagaccatgcaaagcctgagagaccgcctggcctcctacctggacagggtgaggggcctggagaccgagaattggaagctggagagcaaaatccaggagcacctggagaagaatcggctgtagctggagacagagatcgaggctctcaagaaggagctgctcttcatgaagaagaacaacgaagaggaagcaaaaggcctacaagcccagattgccagctctgggttgaccgtggaggtagatgcccccaaatctcagaccttgccaagaacatggcagactcccgggcccaatatgacaagcttgctcggaagaaccgagaggagctggacaagtactggtctcagcaaatcgaggagagcaccagagtggttaccacacagtccgccaaggttggagctgctgagatgacgctcacagagctgagacatagagtccagtccttagagatcgacctggactccacgagaaatctgaaggccagcttggagaacagcctgagggaggtggaggcccgctatgccctgcagatggagccatcattgttattttcaaagattatctttgggagagtttgggagatatcatacttacatgtctttgagggcaagcaagttgttgtatgctggtt

SEQ ID NO: 14198 - DNA, 1125 bp, Homo sapiens
  SIMILAR (141)..(1046): 391254mologous to Homo sapiens cytokeratin 18 (424 AA),accession number X12883,Smith-Waterman Score=333.
ggacagagtgaggagcctggagaccgagaaccggagcttggagagcaaaatccgggagcacttggagaagaagggaccccaggtcagagactggagccattacttcaagatcatcgaggacctgagggctcagatcttcagcaaatactgtggacaatgcccgcatcgttctgcagattgacaatgcccgtcttgctgctgatgactttagagtcaagtatgagacagagctggccaatgcgccagtcttgtggagaacgacatccatgggctccgcaaggtcattgatgacaccaatatcacaccgacttgcaagcttggagacagagatccgaggctctcaaggaggagctgctcttcattgaagaagaaccccgaagaggaagtaaaaggcctacaagcccagattgccagctctgggtttgaccgtggaggtaagatgcccccaaattttcaggaccttcgccaagattcatgggcagacatccggggcccaatatgacgagctggctcggaaagaaccgagaagaggctagacaagtactggtctcagcagattgaggagagcaccacagtggtcaccacacagtctgctgaggttggagctgctgagacgcacgctcacagagctgagacgtacagtccaggtctttggagattcgacctggacttccatgagaaatctgaaggccaagcttggagaacagccttgagggaggtggaggcccgctacgcccttacagatggagcagctccaacgggatcctgctgcaccttgagtcacagctgggacagacaccgcgcacagaggcacagcgccaggcccaggaagtatgaggccctgcatgaacatcaaggtcaagcttggaagctgagatctgccaccttacccggccgccttcttggaagattggcgaggactttaatctttggtgattcctttggacgaacgcaactccatgcaaaccatccaaaagaccaccacccgccggataagttggattgggcaaagtggtgtcttgagaccaattgacaccaaagttcttgaggcattaagccagcaagaagccagtggtacccttttggggaagcaggaggccaataaaaagtttcagagtttcaaaa

SEQ ID NO: 14199 - DNA, 3499 bp, Homo sapiens
  SIMILAR (1996)..(3096): 971254mologous to Homo sapiens putative p150,accession number U93569,Smith-Waterman Score=1856.
  misc_feature (1)...(3499): n = a,t,c or g
ctcagaggctccgaactcgccggcggagtcgccgcgccagatcccagcagcagggcgcgggcaccggggcgcgggcagggctcggagccaccgcgcaggtcctagggccgcggccgggccccgccacgcgcgcacacgcccctcgatgactttcctccggggcgcgcggcgctgagcccggggcgagggctgtcttcccggagacccgaccccggcagcgcggggcggccgcttctcctgtgcctccgcccgccgctccactccccgccgccgccgcgcggatgccaagcaccagctttccagtcccttccaagtttccacttggccctgcggctgcggtcttcgggagaggagaaactttggggcccgcgccgcgcgccggcggcaccatgaagtcagcggaggaagcccgaccctgcccgccctggactggcagctgccgtcccactcaggcccgtatgagcttcggattgaggtgcagcccaagtcccaccaccgagcccactacgagacggagggcagccggggggccgtgaaggcgtcggccggaggacaccccatcgtgcagctgcatggctacttggagaatgagccgctgatgctgcagcttttcattgggacggcggacgaccgcctgctgcgcccgcacgccttctaccaggtgcaccgcatcacagggaagaccgtgtccaccaccagccacgaggccatcctctccaacaccaaagtcctggagatcccactcctgccggagaacagcatgcgagccgtcattgactgtgccggaatcctgaaactcagaaactccgacattgaacttcggaaaggagagacggacatcgggaggaagaacacacgggtacggctggtgttccgcgttcacgtcccgcaacccagcggccgcacgctgtccctgcaggtggcctccaaccccatcgaatgctcccagcgctcagctcaggagctgcctctggtggagaagcagagcacggacagctatccggtcgtgggcgggaagaagatggtcctgtctggccacaacttcctgcaggactccaaggtcattttcgtggagaaagccccagatggccaccatgtctgggagatggaagcgaaaactgaccgggacctgtgcaagccgaattctctggtggttgagatcccgccgtttcggaatcagaggataaccagccccgttcacgtcagtttctacgtctgcaacgggaagagaaagcgaagccagtaccagcgtttcacctaccttcccgccaacgttccaattataaaaacagaacccactgatgattatgagcctgctccaacctgtggaccggtgagccaggggttaagtcctctcccaagaccatactacagccagcagctcgcgatgccacccgaccccagctcctgcctcgtggccggcttcccgccctgtccgcagagaagcaccctgatgccagcagcccctggcgtgagccccaagctccacgacctttctcccgctgcctacaccaagggcgttgccagcccgggccactgtcacctcggactcccgcagccggccggagaggcccccgccgtccaggacgtgcccaggccagtggccacgcaccccggctcgcccgggcagccacccccggccctgctgccacagcagtaaatgaaataatacgaaatgacctctccagcacgagcacccactcctagttgccacattggagcactcagttcagcaggggtatgctgacttcagcagacaaagacttttgaataaataaactgaactcacacctggtaccactcagaacctccaactgactgaatgccaggagctgaacattaatatgtgcaaagattggctctccaacaagaaggaaagcagggaggaagggagaccactgtgtcacctggaggagaagtcatctcatgacaacagaagggaggtggccgggctgagcacgggagacccaccgtgcaggggcctttcatgggaacggcccacacgcagtttgaccccacgcccagcccttctggcacccctggggttcaatactggaagtgccttatttaaccagaccatcagggcatcatagaattgagcattgaatttgctactgtaggagtatttttaggagcagaaactgcaaacacatttcattgtgaggttttaccctctgtatgaatgaagagaatgctggaaggctgcgagaggactctagtatgagtctccaacatttggaacgtttcctgggctgtcacgtacactcctgctgccttacacagtgcattttagaatcttccagtctgtcatctcagctcttttgtaacatgcttcccttgtctgcgcggttgaaaccgtaggcttgttcatagtcgcatgctcgcatctttgtttttaatctggcttcgaacatagcacaagtaacttgaatagcacatcaataggttactggacaaaagcagaaaaacctgttacaggatagcctgcatttgcatgtgtgtacatatctaggcatctatttatgtataaataataacagagccgacgtgtcctcgcccaggagggcttccctgtcagcaataaccggcatccgttttggaacctgcgtctggggctccagtcgctgctcttgctggcgtccatcgccgcctcggacggccgtgcattttctcgtctcacgcagttcgaggaggaccctagaaagccaggagctgtgattgacagtagctgtaggttaccagacggcaacattagaaagtgattgtaaataacatgcaacctaagtgtaatatatttgttcagttataagatgattgtttcacagaagccttaccactctctgcttcatctaagaaaaccaataccaaaaacgccactttaatgctcagccctgcgttgtgtgttttcagatgagttactgttaacaggtaggttcgtgtaggccttgctgggcactctgtacaattagttgcttattacgtatgattactcgcagcgatctattgttccatataaccaaaaagcatggtttattcattgaaacacggttgacctgaactcgtgccttaggaattaatgcccccttatggaacctgcctgaattgcacctgcgggtggaggctccggctgtgaagtcactgaacagaacgtcgctgatggagaaagggctcccgcagaaggaacggcctgtaccgtgcgctccggcacaatcgcgtctcttgtgtctcactcacggaaagaaacaacctgaaggccatcccgtcggtctgcacgtaaccgtgaagacgtgtggccgcgtcccacctgcggctgggtaccctgcacccggcactgtaggagtcacgtgcagcctttctcaggggactgtcattgaaaaggaaacgtttgatgtctgtgtcagctgtctttgtagttaggaaatagatccaataaagccgtatttttttgctggnnnnnnnnnnnnnnnnnnnnnnnnnnnnnnnnnnnnnnnnnnnnnnn

SEQ ID NO: 14200 - DNA, 4963 bp, Homo sapiens
  SIMILAR (1)..(3633): 1001254mologous to Homo sapiens procollagen I N- proteinase,accession number AJ003125,Smith-Waterman Score=6651.
gagccgccgggccggcggggaggcgggggaggtgttttccagctttaaaaaggcaggaggcagagcgcggccctgcgtcagagcgagactcagaggctccgaactcgccggcggagtcgccgcgccagatcccagcagcagggcgcgggcaccggggcgcgggcagggctcggagccaccgcgcaggtcctagggccgcggccgggccccgccacgcgcgcacacgcccctcgatgactttcctccggggcgcgcggcgctgagcccggggcgagggctgtcttcccggagacccgaccccggcagcgcggggcggccgcttctcctgtgcctccgcccgccgctccactccccgccgccgccgcgcggatgccaagcaccagctttccagtcccttccaagtttccacttggccctgcggctgcggtcttcgggagaggagaaactttggggcccgcgccgcgcgccggcggcaccatgaagtcagcggaggaagaacactatggctatgcatcctccaacgtcagccccgccctgccgctccccacggcgcactccaccctgccggccccgtgccacaaccttcagacctccacaccgggcatcatcccgccggcggatcacccctcggggtacggagcagctttggacggtgggcccgcgggctacttcctctcctccggccacaccaggcctgatggggcccctgccctggagagtcctcgcatcgagataacctcgtgcttgggcctgtaccacaacaataaccagtttttccacgatgtggaggtggaagacgtcctccctagctccaaacggtccccctccacggccacgctgagtctgcccagcctggaggcctacagagacccctcgtgcctgagcccggccagcagcctgtcctcccggagctgcaactcagaggcctcctcctacgagtccaactactcgtacccgtacgcgtccccccagacgtcgccatggcagtctccctgcgtgtctcccaagaccacggaccccgaggagggctttccccgcgggctgggggcctgcacactgctgggttccccgcggcactccccctccacctcgccccgcgccagcgtcactgaggagagctggctgggtgcccgctcctccagacccgcgtccccttgcaacaagaggaagtacagcctcaacggccggcagccgccctactcaccccaccactcgcccacgccgtccccgcacggctccccgcgggtcagcgtgaccgacgactcgtggttgggcaacaccacccagtacaccagctcggccatcgtggccgccatcaacgcgctgaccaccgacagcagcctggacctgggagatggcgtccctgtcaagtcccgcaagaccaccctggagcagccgccctcagtggcgctcaaggtggagcccgtcggggaggacctgggcagccccccgcccccggccgacttcgcgcccgaagactactcctctttccagcacatcaggaagggcggcttctgcgaccagtacctggcggtgccgcagcacccctaccagtgggcgaagcccaagcccctgtcccctacgtcctacatgagcccgaccctgcccgccctggactggcagctgccgtcccactcaggcccgtatgagcttcggattgaggtgcagcccaagtcccaccaccgagcccactacgagacggagggcagccggggggccgtgaaggcgtcggccggaggacaccccatcgtgcagctgcatggctacttggagaatgagccgctgatgctgcagcttttcattgggacggcggacgaccgcctgctgcgcccgcacgccttctaccaggtgcaccgcatcacagggaagaccgtgtccaccaccagccacgaggccatcctctccaacaccaaagtcctggagatcccactcctgccggagaacagcatgcgagccgtcattgactgtgccggaatcctgaaactcagaaactccgacattgaacttcggaaaggagagacggacatcgggaggaagaacacacgggtacggctggtgttccgcgttcacgtcccgcaacccagcggccgcacgctgtccctgcaggtggcctccaaccccatcgaatgctcccagcgctcagctcaggagctgcctctggtggagaagcagagcacggacagctatccggtcgtgggcgggaagaagatggtcctgtctggccacaacttcctgcaggactccaaggtcattttcgtggagaaagccccagatggccaccatgtctgggagatggaagcgaaaactgaccgggacctgtgcaagccgaattctctggtggttgagatcccgccgtttcggaatcagaggataaccagccccgttcacgtcagtttctacgtctgcaacgggaagagaaagcgaagccagtaccagcgtttcacctaccttcccgccaacgttccaattataaaaacagaacccactgatgattatgagcctgctccaacctgtggaccggtgagccaggggttaagtcctctcccaagaccatactacagccagcagctcgcgatgccacccgaccccagctcctgcctcgtggccggcttcccgccctgtccgcagagaagcaccctgatgccagcagcccctggcgtgagccccaagctccacgacctttctcccgctgcctacaccaagggcgttgccagcccgggccactgtcacctcggactcccgcagccggccggagaggcccccgccgtccaggacgtgcccaggccagtggccacgcaccccggctcgcccgggcagccacccccggccctgctgccacagcaggtgagtgcgcctccaagcagtagctgcccccctggtctcgaacactcgctctgccccagcagcccctctcctccactcccgcctgccacccaagagccgacctgcctgcagccctgcagcccagcgtgcccgcccgccacgggccgcccgcagcacctgccgtccacggtccgcagggacgagtctccgactgccgggccacggctgctgccagaggtgcatgaggacggtagtcctaatttggcccctattcctgtaacggtcaagcgagagcctgaagagttggaccagttgtacctggatgacgtaaatgaaataatacgaaatgacctctccagcacgagcacccactcctagttgccacattggagcactcagttcagcaggggtatgctgacttcagcagacaaagacttttgaataaataaactgaactcacacctggtaccactcagaacctccaactgactgaatgccaggagctgaacattaatatgtgcaaagattggctctccaacaagaaggaaagcagggaggaagggagaccactgtgtcacctggaggagaagtcatctcatgacaacagaagggaggtggccgggctgagcacgggagacccaccgtgcaggggcctttcatgggaacggcccacacgcagtttgaccccacgcccagcccttctggcacccctggggttcaatactggaagtgccttatttaaccagaccatcagggcatcatagaattgagcattgaatttgctactgtaggagtatttttaggagcagaaactgcaaacacatttcattgtgaggttttaccctctgtatgaatgaagagaatgctggaaggctgcgagaggactctagtatgagtctccaacatttggaacgtttcctgggctgtcacgtacactcctgctgccttacacagtgcattttagaatcttccagtctgtcatctcagctcttttgtaacatgcttcccttgtctgcgcggttgaaaccgtaggcttgttcatagtcgcatgctcgcatctttgtttttaatctggcttcgaacatagcacaagtaacttgaatagcacatcaataggttactggacaaaagcagaaaaacctgttacaggatagcctgcatttgcatgtgtgtacatatctaggcatctatttatgtataaataataacagagccgacgtgtcctcgcccaggagggcttccctgtcagcaataaccggcatccgttttggaacctgcgtctggggctccagtcgctgctcttgctggcgtccatcgccgcctcggacggccgtgcattttctcgtctcacgcagttcgaggaggaccctagaaagccaggagctgtgattgacagtagctgtaggttaccagacggcaacattagaaagtgattgtaaataacatgcaacctaagtgtaatatatttgttcagttataagatgattgtttcacagaagccttaccactctctgcttcatctaagaaaaccaataccaaaaacgccactttaatgctcagccctgcgttgtgtgttttcagatgagttactgttaacaggtaggttcgtgtaggccttgctgggcactctgtacaattagttgcttattacgtatgattactcgcagcgatctattgttccatataaccaaaaagcatggtttattcattgaaacacggttgacctgaactcgtgccttaggaattaatgcccccttatggaacctgcctgaattgcacctgcgggtggaggctccggctgtgaagtcactgaacagaacgtcgctgatggagaaagggctcccgcagaaggaacggcctgtaccgtgcgctccggcacaatcgcgtctcttgtgtctcactcacggaaagaaacaacctgaaggccatcccgtcggtctgcacgtaaccgtgaagacgtgtggccgcgtcccacctgcggctgggtaccctgcacccggcactgtaggagtcacgtgcagcctttctcaggggactgtcattgaaaaggaaacgtttgatgtctgtgtcagctgtctttgtagttaggaaatagatccaataaagccgtatttttttgctggaaaaaaaaaaaaaaaaa

SEQ ID NO: 14201 - DNA, 1767 bp, Homo sapiens
  SIMILAR (519)..(1241): 291254mologous to Alvinella pompejana fibrillar collagen chain FAp1 alpha,accession number AF053538,Smith-Waterman Score= 107.
atgggtcagaagtgctcgtggcgggaaggagttggggggtgggggggcggtcctgtctttcagcccagcgccagcgagccacatggcctcagaccaaccccaggatgggcccgttgtccacctgtgaaaggggaagccgtggctttcctctcagggctacggcacaggccgtgtctgcggggcgagcacggctccacgtacggctctcgtccgcggtgtggatgggtgggcggtacagcctcctctgcggttcggttgctgtgctgtcctctgctgagtggtgtcagggttgtccatcccgctctctgtcagctgctgccatggggcagcgggaaggccctggagggtgcctgggctgtgtctggtcccggccacgcgtccctgcagcgtctgagaccttgtggaacacacttgacccggcgctgggacggggtcggcccacacgcaccgccagcccgcaggagtgaggtgcaggctgccgctggctccttaggcctcgacagctctcttgaggtcggccctcctcccctcccgagagctcagcagccgcagacccaggcagagagagcaaaggaggctgtggtggcccccgacgggaacctgggtggccgggggacacaccgaggaactttccgccccccgacgggctctcccaccgaggctcaggtgctcgtgggcagcaaggggaagccccatggccatgccgcttccctttcaccctcagcgacgcgccctcctgtgcccgcggggaacaagacggctctcggcggccatgcaggcggcctgtcccacgaacacgatggagacctcagacgccgtccccaccctgtcactgtcaccatcacccatcctgtcccctcacgcctccccacatcccatcattactacccctcaggcctccccacaagtgctggtgtggacctgtgggtcgcttggttcgtggagagacagccacagcatcttcccagcatcgcggccggcacctggcacctgcactttggccgtcagagacgtgctggtaccgtgctacggacgagggcggtcactctggcgaccccagctctctgccgaggcagccaggcactggctcacgacactcatggaccagggcgggaccgaggaggaaatgagggcttccctgtcagcaataaccggcatccgttttggaacctgcgtctggggctccagtcgctgctcttgctggcgtccatcgccgcctcggacggccgtgcattttctcgtctcacgcagttcgaggaggaccctagaaagccaggagctgtcctgcactccagctggatgcttcaggcaaacaccaggccccaacgctaaaacttctgtgaccaactttctaaaaatgagcctggaaagcagcttccgggagaaggtgaggtttccgaggagaatctgaagtcctctgatctgctggtgatacctggggggctctgggccaggcaaactgtagccctctgagagctccgcctgggcgtcacggtggcccctccgtggcccgtgcaaagcccctgagccggctgcatcagacccgctaagcatgcgttttccctgatcaaacaaatgacaaaacgaaagctcaaatgcttgaatttcattaggatccctcgcccaggtccttggagggcgggtagtggataaagttcccttgttcctcggatcctcaggaacaccccagactttagaaggaaagtcagaaggtgctgacacaggtgcataactaaagggaaatccttctttctcagctccaaccat

SEQ ID NO: 14202 - DNA, 382 bp, Homo sapiens
  SIMILAR (379)..(29): 331254mologous to Lycopersicon esculentum proline rich protein,accession number X61395,Smith-Waterman Score=111.
ttccagggctggaggccaggtgggcggtggggctcatctcaggggcagggcgtgggggtttgtgggccaggacccacccaagggctgggtctgggaggtgcttggggagcccagggcgacctggtgtgtgccctgcgggatgccccgagggctcctgcttgtgttgccagcacctgcccttgggagccgtcagctggggccacgatgctggcagggtgaggcctggcagggtctggggcttttggagggtgggggctaagggaacccctggtggaagctgccttcagggttcctgcctgccttgaggatgggtgataaggggctgggccctgccctcctgctgcctgggctctgtaactgatgctcagaggaccgggtggag

SEQ ID NO: 14203 - DNA, 657 bp, Homo sapiens
  SIMILAR (652)..(215): 361254mologous to Globodera pallida putative cuticular collagen,accession number AJ277425,Smith-Waterman Score=113.
tcacagtccctgtccatcctgaaccagtccagggccagagtaggttccactgtagaggacgaaaggcaagagcaggctgcgagccgccacgctgtgcacggtctcagacgtgaatgaccatcctcttggggggacccacggcccgtccacagcgggtgggaaccgcatctgtaacaggcccaaggtgcttcctcctgcaccatcaatcccagacacctgggtgtggtgtctgagttcaacagccagggaggggcctggacctttcaacagacggccccggtggccgttctcaggtgggactgatctggtcctgctgctgccttcactgagcagcatcgggagaaccaggtggccgctgtccaggctctgcgctcccggccctgctgggtctgctctggagttcagggctcgtgatggtgtcccagtgtgtaggtggcccgagctgggagtcccacagtcccgcagcggcgacgccgccacccgccgagtgccgaggcccggggcccactcccagcccagctccaggagaggccgcgccggaggaccgcgaggacggcgccgcagcgccaggtcgggctgagcctgccagcatcgtggccccagctgacggctcccaagggcaggtgctggcaacacaagcaggagccctcggggcat

SEQ ID NO: 14204 - DNA, 868 bp, Homo sapiens
  SIMILAR (140)..(679): 271254mologous to Leishmania major proteophosphoglycan,accession number AJ243460,Smith-Waterman Score= 103.
atgatgctcaataaatactgggtgagtgagcaaaaacttgcacttgacagttgtgaccgcatatgtcgttctgaggatactgctaagaacaatcatcagagcctacaaaacaggtgcgtggatgtgatgatagccagactcaagccaagcaccatcaagaaattctacgaggccggctgcaagtacaaggaagagcagctcaccaccggctgcgagaagtggctggaaatgaacttggttcctctaggggggacgcagatccacctccacaaaatcccacaggacctgctccacaaagtgctgaagtccccagatgtgattctcgagtgcctgggcttcaaatgggagctccatcagccccagctttttcagtctgagaccttggccaagctctacctgaaagtccctggcgcagggcaccacacaccccctgagggagctggaggagcttctgcgaggtacttcctccctggcacccagtgctggagccccagtgccctctagcttgacggtcccagcttggaacatggttatctgttttgagaccacggtcactctagcagtcaagagtgaggtcgccatcctctcatgtctcctcacctggctctatgcaggccccaaactctccatcgtccttccagcctgggatgaacggggcttggatctggtggctgtgaacccatatacccctggctcgatggccagggcccccaggcatcctggtgataacatgtccaactgtcacatggataaagtggtcattcatttgttcatttcatccaacataaacttattgagcgtctatccagtgctgggcatctatgccaaggattcaatggtgattgaaacagagtgcctgctctcctga

SEQ ID NO: 14205 - DNA, 1543 bp, Homo sapiens
  SIMILAR (560)..(1405): 911254mologous to Homo sapiens putative p150,accession number U93574,Smith-Waterman Score=1404.
atggattacctgggagataaactcacagtggcccagacccacatgacccagtggatgggcaccgtgaggaggtccttccaggaagccctcaatttggtgaccaccacggtgggccacgaacggacgagtgcagagtcggccagccggacccccttcaagcgtacttcctccttccgacacctggcttcccggagtcgggaatccttccgccgcttctctgctcgcagccaacagagattttcttcactgaggaaaaggcatacagattcggaaccgccagatattgatgtaaggtccatgagggccagggctttggccgtcctggttcaccttgatattgccagtacccagaacagtggctagagaaatacagagaacaccacaaagatactccttgagaagagcaaccccaagacacataattgtcagattcaccaaggttgaaatgaaggaaaaaatgttaagggccgccaaagagaaagctgataagcaacttcagcaaagtctcaggatacaaaatcaatgtgcaaaaatcataagcattcctatacagcaagaaaagacagagagccaaatcatgagtgaactcccattcacaattgcttcaaagagaataaaatacctaggaatccaacttacaagggacatgaaggacctcttcaaggagaactacaaaccactgctcaatgagataaaagaggacacaaacatatggaagaacattccatgctcatggataggaagaatcaatattgtgaaaatagccatactgcccaaggtaatttatagatttaatgccatccccatcaagctaccaatgacttccttcacagaattggaaaaaactactttaaagttcatatggaaccaaaaaagagcccatattgccaagtcaatcctaagccaaaagaacaaagctggaggcatcaccctacctgacctcaacctatactacaaggctacagtaaccaaaacagcatggtattggtaccaaaacagagatatagaccaatggaacagaacagagccctcagaaataataccacacatctacaaccatctgatctttgacaaacctgacaaaaacaagcaatggggaaatgattccctatttaataaatggtgctgggaaaactggctatccatatgtagaaggctgaaactggatcccttccttacaccttataaaaaaattaattcaagatggattaaggacttaaatgttagacctaaaaccataaaaaccctagaagaaaacctaggcaataccattgaggacataggcatgggcaaggacttcatgactaaaacaccaaaagcaatgaaaacaaaagccaaaatagagaaatgggatctaattaaactaaagagcttctgcacagcaaaagaaactacaatcagaagttttggcagtgaacagaagtctcacacccttgtgagggccactaggctggtttctgatcacagccagtcatttgaagcatggctgcaatttctaggggacaccaggtttggcactcagaaactcagagactcagattga

SEQ ID NO: 14206 - DNA, 3214 bp, Homo sapiens
  SIMILAR (4864)..(5487): 1001254mologous to Escherichia coli similar to,accession number D90854,Smith-Waterman Score=1065.
tcaatccttagaagactgtgtacatgagatactgtacatgttggttgggttctccgagaagcgcatgcccggatagaatgcaaaagattcattagggagtaacacctctgcgggagaacgcgaggatgaggttctagtgggaccggcgctagcgggcgcgtcctgccaggagtgagtcttggcgccatctagcgcctgctggaggctctgcagctgcagtggactgagccgccggcgctgggcgtgggtcaccgccgcggcgttctccggacccagggaggcgatctgctccgcggacagctcctgtttccctgtgtgatttgaaatggggtcaagctcccatttctccttgaagaactgagcacctactttgaatatctcatcaggaaggcattttattgctgatggctggaaatatggcatcaaatccttgtcaagcatccggagctctgccttagttaatccagctgcaatggtcccaagctcctgcaagacagaactggtccactcagtgggatccccaaacacaacttcagccttcctcttaaactcggctaagacatgtgtgctgcagagcagggtcccaattctggccactaccaccctgaattctgagatctttataagtgggatttcagtgatgtttatagcacacagggttgcaccaagtcctaccaaatgaaagctcttcaggtcctggatactgtatcctgaatcatccaggtacccttgcaaaatggattcagcctgtcccggggtccattctgtttgccagcttagggaagccacagtgtatatggagctgaggtccagctgctccagctcactctcattaagagccagagcaatgcgccccagggagacgatatggtgttctctccagtaagatggcatgtcccaaacctgatattgctttctccttcagggtcatcagctgaggccggctgaaaccctggacagctcccagcagttccacggtcctgatgaatgtgtcttcctccatgcaccgcaggtcctccagggcccagcaggcgttggcttcggccaacttgaagatgtcatcagaagagggggccacgactccatggcaaccaggcatagggtcatagctggggatcttatcactgctgttccgaacagactgaaagacagcccagaggaattctttagtgggcagggtcctggccatcttggaagctgcttgcagaaggatctcaggaaatgcagccttttgctcagggttgaggtctgggcagtctctgaggccgtgtagagcagtcgcccaagccctgggggagatccccctgtcgatgatggctgccggcaagtgacacagcaggttccccatgatgtccacagtgtactcatcagcaatggagtcgtccaggcactgctgcactttcctgaggactgaagtctttttgtgggaatctaaaaccaaggagtccaaccagctcttccccaggctgatcagaaagggcacacactgggaggctgggacagaagccaggtagcgggccgggagtgcagccaagaggaaaggtggcatagacaatctggaaacttcccagtatttccacgccaaacaattaacctgatagggtgaaagcagggcgaagttgttctgaaaatcctggaaatgggccagaaagaagtcagtgctcatggcatcaatgtgtgagcaggtcacgcctttgaccagctgcccagcactcaaaagctcctcaggccttctggtggtctttaacagaagctcatacaggaacagagcctggctccttccaagttccttatccttcaggactgtagagttgaatccaggttgcctccttaaatcaaagagagacacttccttaaagaaagccccttgtatctccacgatgcctggggcagtgtcttccgcttggaccatcttgctgaggataccttgctgctgggcaggtgacaagtcggatacatactgggagacggcacttctcaggacctgcgagatgtccttgcgtttcatgctgcagaaggcctgggtgctgaccccagccagcagtgcgcccatctggctgacattgtagaaagacagcaccttctcatgggccaagtatttggcagacaagatgatgacctggctcttggcccaacctgagacctggttgagggtggagatggctccgtgcacagcctcgggggagagggattccagttggctgtaggtcaaacctacaactgcatccgacaaagaacccagggtctcattgagggtctggttctccatggcaatgtccaggagttctgctttgagcttctggacgccagcctggaagcccctcaggtggctgcacttgatcatctggtaaagcaggacttgagccacagtggcatccagcaattccaggtcattgtagaaacaaaccagcagccccagcatcttgggaaagggctccaaggcccagagctcatgcgcttgcctgtggatggtggaggtattcctcatgttaaagttggaggagctgatcctctccagaaacgcctgggccagctcaggtgtgatgtcatagaccatgtccagctgcttggtggcgttgtcatagctgataaacagcccaatttctataggactaattttcgtaatttcttcaaacgataggtgaaccatgtatctgcccaaaacccataagtgttccgcactgacccatgaagcagagtcatcagtggcattggaggatgtctgcagtattccagtcatccaggaatagagagctctctgggaatgagccgaggttttgtcgtagagatctttgaacactgcagataggttcttaaaggcatcctcgcgcaggtcccgagggagccgctctgtgatgtctggctggagaaagctccctgaggaccccctcagcaccttgcccaggatctccacacactccagggagttcagcatctggaaacacctctccagtgtgatgagaaacaggctgcggttcacgccagggctctgcaaggctcgttctcgaatctctcctaagtcgatgatgatgtctttcaggtccaagccgtccttcttgtcttctaagaggcatttcatggcagtgcggaactgctgggcgtctgtcttcctcaggtcctccagcagcttctggggctggtgcagacgctgctccaggtggttttccacggctgccctgcctggaatttggcactgtataactcgacactccat

SEQ ID NO: 14207 - DNA, 626 bp, Homo sapiens
  SIMILAR (399)..(157): 411254mologous to Mus musculus putative nucleotide pyrophosphatase/phosphodiesterase; NPP5,accession number AF233377,Smith-Waterman Score=148.
ggcgccggtctctggcttcctcattgagctccaatccatatgtcaagtggctgaacttttgggacagtgggctctatggggcaggtacagaggccctggcaggtgccctgagcaaaagcagcagcatctgcgatgtggacctgttggagaaccagctgggagtggcaggagcccaggccctctgtgccgccctcacagtgaaccaggccatgcggaagatgcagctgtcagggaatggcctggaggagcaggcggcccagcaccttgccgaactcctgctggcccacacagacctgaagtccctggacctgagctacaaccagctgaatgaccaagcagatctgtgcatgggactgcagggcttcctcatcttccacagctttgggggcggcactggctctgggttcgtgtctctgctcatgaagcggctctcggtggactacgggaagaagtccaagctggagtttgccatttgcccagccccccaggtctccatggccatgacggagccctacaactccatcctgaccacctacacgaccctggaacattctgactgtgccttcatagtcgacagcaaagccacctatgacatgtcagcacaacctggacatcgagtgtcccat

SEQ ID NO: 14208 - DNA, 1356 bp, Homo sapiens
  SIMILAR (838)..(1353): 891254mologous to Drosophila melanogaster Sog,accession number U18774,Smith-Waterman Score=783.
atgaggggttcctgtgagaggtctggggaggatgaagagcagaaagaagaggctatggtggcctgtgggcgtctttcaggggtccccgaggccgagcagggtcccgaggccaattgggactccgacctggagacggaaggcaccgatgggcttggagaactggtcagggacacactgtacctgaggtcttgccgggcccatagtgttgtgcccatctcctgctttctgcgccaagggagcgcccaagagctgaacctccggcaccgtggcctggggccccagggcgcccgggctctggcttcctcattgagctccaatccatatgtcaagcggctggaccttcgagacaatgggctctgtggggcaggtgcagaggccctggcaggtgccctgagcaaaagcagcagcatccatgatgtggacctgtcggagaaccagctgggagtggcaggagcccaggccctctgtgccgccctcacagtgaaccaggccatgcggaagatgcagctgtcagggaatggcctggaggagcaggcggcccagcaccttgccgaactcctgctggcccacacagacctgaagtccctggacctgagctacaaccagctgaatgaccaagcaggcccagctccaagcctgcgtgcatttccacaggcaaacatcttccttaaagttctagacatctcatacaatggctttggggatcctggagcctctgcggtgggtgaggctctgaaggccaacaacgtgttggaggaactcaacatgagtaacaaccgcatctctgcgatgggagccctgagcctgggcctgggcctccgggtcaaccagacgctgaggattcttgtactttgtgtgcgtgtttctcaggtgtccaggaatcccatgcgaagtgaaggctgctttggtctcctcaagtctgtccaggacaatccagcctctgccctggaactgctggatttctcagatatccaggtgaacgcagagtttgatggccttgctagctcagtgaggggaattcttccaggacttggcattaaagactggcgcttgcagagtggagtataaaaaggagttgctgccagtcttcagatcagccctgccagcgtctgtccctaagtgaccttggagtgtggcttcctcatctccaatcagctgctttgacctccagggtatatacttgaaagaaatgaagacatatgtccccacaagaactcgtgcacgaatatccatagcaacattatttataatattctaagagtgaaaatgcccaccagtggataaatgcaatgtggtatatccatacagtggaatattatttggcaataaaaaggaatttgaggtgataccaaaaaa

SEQ ID NO: 14209 - DNA, 497 bp, Homo sapiens
  SIMILAR (455)..(1117): 231254mologous to Homo sapiens neuroD-related factor,accession number AB021742,Smith-Waterman Score=91.
gagtacgtgactgtacggaggattaacctagaagcttgttccaatgagatggtaacattcttgcagggcgagctgcatgtctccaaactcttcaaccatcccaatatcgtgccatatcgagccacttttattgcagacaatgagctgtgggttgtcacatcattcatggcatacggttctgcaaaagatctcatctgtacacacttcatggatggcatgaatgagctggcgattgcttacatcctgcagggggtgctgaaggccctcgactacatccaccacatgggatatgtacacaggagtgtcaaagccagccacatcctgatctctgtggatgggaaggtctacctgtctggtttgcgcagcaacctcagctgccctggtgctttctccaagggccatcagtgtcttgcctagcttgagggcttaagtccttatgctgtgttagtttcgttgtcagaacaaattaaaattttcagagacgctgaaaaaaaaaa

SEQ ID NO: 14210 - DNA, 423 bp, Homo sapiens
  SIMILAR (124)..(423): 821254mologous to Homo sapiens Full length human STLK5 protein,accession number Y55961,Smith-Waterman Score=386.
tgagctgtgggttgtcacatcattcatggcatacggttctgcaaaagatctcatctgtacacacttcatggatggcatgaatgagctggcgattgcttacatcctgcagggggtgctgaaggccctcgactacatccaccacatgggatatgtacacagaatctccagggttatgatgccaagtctgacatctacagtgtgggaatcacagcctgtgaactggccaacggccatgtcccctttaaggatatgcctgccacccagatgctgctagagaaactgaacggcacagtgccctgcctgttggataccagcaccatccccgctgaggagctgaccatgagcccttcgcgctcagtggccaactctggcctgatgacagcctgaccaccacaccccccggccttcaacggtactcgccct

SEQ ID NO: 14211 - DNA, 474 bp, Homo sapiens
  SIMILAR (154)..(471): 901254mologous to Homo sapiens serologically defined breast cancer antigen NY-BR-96,accession number AF308302,Smith-Waterman Score=482.
attcccgggtcgacgatttcgtctggcggcggcgcggcagtaaaactgaggaggcggagccaagacggtcggggctgcttgctaactccaggaacaggtttaagtttttgaaactgaagtaggcctacacagtaggaactcatgtcatttcttcggtgggtctcggaaaagttcattgttgagggcttaagagatttggaactatttggagagcagcctccgggtgacactcagagaaaaaccaatgatgcgagctcagagtcaatagcatccttctctaaacaggaggtcatgagtagctttctgccagagggagggtgttacgagctgctcactgtgataggcaaaggatttgaggacctgatgactgtgaatctagcaaggtacaaaccaacaggagagtacgtgactgtacggaggattaacctagaagctgttccaatgagatggaacattcttgcaggcgagctgatg

SEQ ID NO: 14212 - DNA, 1473 bp, Homo sapiens
  SIMILAR (673)..(1218): 1001254mologous to Homo sapiens GK001,accession number AF226054,Smith-Waterman Score=955.
atgggggagctgactcctgctggagatgaatcgagtccaggctcccagaaccctggccgaagctcacctccccctggctatgttcctgagcggcagcagcacattgcccggcaggggtcctacaccagcatcaacagtgagggggagttcatcccagagaccagcgagcagtgcaccaatgatgcgagctcagagtcaatagcatccttctctaaacaggaggtcatgagtagctttctgccagagggagggtgttacgagctgctcactgtgataggcaaaggatttgaggacctgatgactgtgaatctagcaaggtacaaaccaacaggagagtacgtgactgtacggaggattaacctagaagcttgttccaatgagatggtaacattcttgcaggatcaggcagctagagacatgaagaggcttgaagaaaaggacaaggaaagaaaaaacgtaaagggtattcgagatgacattgaagaggaagatgaccaagaagcttattttcgatacatggcagaaaacccaactgctggtgtggttcaggaggaagaggaagacaatctagaatatgatagtgacggaaatccaattgcacctaccaaaaaaatcattgatcctcttccccccattgatcattcagaggtatgctttttttctcaaggtgcaatgaaagccttccacactttctgtgttgtccttctggtgtttgggagtgtctctgaagccaagtttgatgattttgaggatgaggaggacatagtagagtatgatgataatgacttcgctgaatttgaggatgtcatggaagactctgttactgaatctcctcaacgggtcataatcactgaagatgatgaagatgagaccactgtggagttggaagggcaggatgaaaaccaagaaggagattttgaagatgcagatacccaggagggagatactgagagtgaaccatatgatgatgaagaatttgaaggttatgaagacaaaccagatacttcttctagcaaaaataaagacccaataacgattgttgatgttcctgcacacctccagaacagctgggagagttattatctagaaattttgatggtgactggtctgcttgcttatatcatgaattacatcattgggaagaataaaaacagtcgccttgcacaggcctggtttaacactcatagggagcttttggagagcaactttactttagtggaacagttcctctccccactctggggtgtccagacaggtgcggatcaaggcttcccagtccgcaggggatataaatactatctaccagccccccgagcccagaagcaggcacctctctgtcagagggggtatccaaaacgcggatatataccatcaggtaatgaacactcgctcttgccagctctgagctttgacacagatttagaccgtcctaacttccaagactgggggaggagtttagctacatccaagtag

SEQ ID NO: 14213 - DNA, 970 bp, Homo sapiens
  SIMILAR (40)..(144): 1001254mologous to Homo sapiens serologically defined breast cancer antigen NY-BR-96,accession number AF308302,Smith-Waterman Score=174.
agttttctctactaacctatttttctttttcttttttagaccaatgatgcgagctcagagtcaatagcatccttctctaaacaggaggtcatgagtagctttctgccagagggagggtgttacgagctgctcactgtgataggtatgtgcaggggccgtccttactctcctgctttctgctccaggggctgctgcagctttctcagcagccccagatgtgtgtacagcagaggccatccactagttaggaggattcatgggcacagacttgcttctgtggggtcttctctgtttttttctgccaagtatggggaagagatcaaacttccaggaaagaagctcttttgccatctttcctttgtgggctgccatgtttccggtgtcctgggccatagtgagtcagaaaggttggctgagaaggaactgatgagagaaaaatcaagaaatgtgagccatgaacataacagttaaattctgctgggaaaaggaaaaaaaaaaaagtaacagtagtgaaaaatttaacattaagtttcttttgaaatcaagtcccttttttaaaggaaaattttcttaaaaccttttgttgttcttgtcgttgcgtatggcattccctttttcttttaggcaaaggatttgaggaccctgcatgaactgtgaatcctagcaaggtacaaacccaaccggagagtaccgtgcactgtcacggaggattaacctagaagcttgttcccaatgagatggtaacattcttgcaggtaataaaccatgagtgtgtcacatggagggagggtgggctcttggctctgataggaattacaaggaattacaaagaaatgaagggagactaaacgttcggaagttatggaagctttcagtggagaatcctggccatttggcactaaggattgggctgaaatgctgctcagcctaatttatatttccctttttttctccaaacactcccttgtgg

SEQ ID NO: 14214 - DNA, 480 bp, Homo sapiens
  SIMILAR (370)..(38): 691254mologous to Homo sapiens serologically defined breast cancer antigen NY-BR-96,accession number AF308302,Smith-Waterman Score=333.
ttacttagcttctttctgcaagaatgttaccatctccattggaacaagcttctaggttaatccttcggacaagtcaagtcttctccggttggtttgtaccttgctagattcaacagtcaatcaggtccctaaaatcctttgccctatcacagtgagcagctcgtaacaccctccctctggcagaaagctaactcatgacctcctgtttagagaaggatgctattgactctgagctcgcatcattggtttttctccgagtgtcacccggaggctgctctccaaatagttccaaatctcttaagccctcaacaatgaacttttccgagacccaccgcctgattcgctctggtttacttacaagaaatgacatgagttcctactgtgtagacctacttcagtttcaaaaacttaaacctgttcctggagttagcaaacagccccgaccatcttggctcccccacgcgtccgcccacgcgtccg

SEQ ID NO: 14215 - DNA, 1635 bp, Homo sapiens
  SIMILAR (301)..(3216): 1001254mologous to Homo sapiens put. c-fms precursor,accession number X03663,Smith-Waterman Score=5155.
  misc_feature (1)...(1635): n = a,t,c or g
ttcgacgatttcgtcagcaaccggtctggcggcgttgcggcagtttaactgaggaggcggagccaagacggtcggggctgcttgctaactccaggaacaggtttaagtttttgaaactgaagtaggtctacacagtacgaactcatgtcatttcttaccaatgatgcgagctcagagtcaatagcatccttctctaaacaggaggtcatgagtagctttctgccagagggagggtggtacgagctgctcactgtgataggcaaaggatttgaggacctgatgactgtgaatctagcaaggtacaaaccaacaggagagtacgtgactgtacggaggattaacctagaagcttgttccaatgagatggtaacattcttgcagggcgagctgcatgtctacaaactcttcaaccatcccaatatcgtgccatatcgagccacttttattgcagacaatgagctgtgggttgtcacatcattcatggcatacggttctgcaaaagatctcatctgtacacacttcatggatggcatgaatgagctggcgattgcttacatcctgcagggggtgctgaaggccctcgactacatccaccacatgggatatgtacacaggagtgtcaaagccagccacatcctgatctctgtggatgggaaggtctacctgtctggtttgcgcagcaacctcagcatgataagccatgggcagcggcagcgagtggtccacgattttcccaagtacagtgtcaaggttctgccgtggctcagccccgaggtcctccagcagaatctccagggttatgatgccaagtctgacatctacagtgtgggaatcacagcctgtgaactggccaacggccatgtcccctttaaggatatgcctgccacccagcccaggtcctggttctgtcctccccagatgctgctagagaaactgaacggcacagtgccctgcctgttggataccagcaccatccccgctgaggagctgaccatgagcccttcgcgctcagtggccaactctggcctgagtgacagcctgaccaccagcaccccccggccctccaacggtgactcgccctcccacccctaccaccgaaccttctccccccacttccaccactttgtggnagcagtgccttcagcgcaacccggatgccaggcccagtgccagcaccctcctgaaccactctttcttcaagcagatcaagcgacgtgcctcagaggctttgcccgaattgcttcgtcctgtcacccccatcaccaattttgagggcagccagtctcaggaccacagtggaatctttggcctggtaacaaacctgggaagagctggaggtggacgattgggagttctgagccctctgcaaacctgtgcgcattctccagccagggatgcagaggccacccagaggccccttcctgagggcggcccacattcccgccctcctggggaagatttgggtaggaaaggacatttttttccagggaaagtttgattgcttgattgattggggaaagaaaatcctgggagagacatttcattgttccaaggtttttgagacacaagggattttcaacaaccagggatcaggagggtccaaagccgacattcccagtcctgtgagctcaggtg

SEQ ID NO: 14216 - DNA, 460 bp, Homo sapiens
  SIMILAR (170)..(334): 811254mologous to Homo sapiens melanoma-associated chondroitin sulfate proteoglycan (MCSP),accession number X96753,Smith-Waterman Score=232.
  misc_feature (1)...(460): n = a,t,c or g
agggccggncnncccccaactgatgatcatagatcacccgtggggaanncgcaggccactcanccagcactgccttctcccagcaggacctgctggttggggccattctctttggccacaatggcagcctcagctcccgcaacaccctggccttctcaatggatgtggggccttctcaatggatgtggggccagtgcacacagatgccatcctacaagtgaccattgccctagagggcccactagccccactgaagctggcctggcacaagaagatctacatcttccagggagaggcagctgagatcagaagagaccagctggagaccacggagttcatcatctcggagccactggccaatatgtactcgcgtgggaaccagaacacactgatggaggagtgggcagagtangcacagtggcacgacgagatgctgcgcatgcaccacgtgctgaaggag

SEQ ID NO: 14217 - DNA, 433 bp, Homo sapiens; identical to SEQ ID NO: 8590
  SIMILAR (128)..(322): 651254mologous to Homo sapiens golgin-95,accession number L06147,Smith-Waterman Score=214.

SEQ ID NO: 14218 - DNA, 299 bp, Homo sapiens
  SIMILAR (123)..(299): 911254mologous to Homo sapiens melanoma-associated chondroitin sulfate proteoglycan (MCSP),accession number X96753,Smith-Waterman Score=260.
gagaaactaacaatgaaaacggactcgttgatggaggaaaagttggaatgcagcctctggtgctgtttgagcgatccctctatcccgggtcgctgctgtgttctggaaaggcgcattgtaccctggatgcagcagcttccttctttggtgagaaccacctggaggtgactgtggccatggctctgactgacatagacctgcaactgcagttctccacgtcccaacccgaagccctccttctcctggcagcaggcccagctgaccacctcctgctgcagctctactctggacacctgcag

SEQ ID NO: 14219 - DNA, 5526 bp, Homo sapiens
  SIMILAR (1)..(7509): 1001254mologous to Homo sapiens neurofibromatosis protein type 1,accession number M38107,Smith-Waterman Score=12946.
atgagctgggcagaggcctgcactcttgcccctgccatccctgctgcccctgattctttactttctgcatctactcagaaacccaagaatgcagtggagccagcccttgggctcctttatccccgttgtaagcatagccatcatcttgtggtaatagacataaacttgcattttcctttggaagaagagaccaacggcttctttcatttaacacagtccactgagtgggagtttgcccccaaaagagagaaagatcaagtagtcaagaagaggtatgtagaaaaccccaacatcatggcctgctacaatgaactgctccagctggagtttggagaggtgcgatcacaactgaaactcagggcttgtaactcagtattcactgcattagaaaacagtgaagatgcaattgaaattacaagcgaagaccgttttatacagtatgcaaatcctgcatttgaaacaacaatgggctatcagtcaggtgaattaatagggaaggagttaggagaagtgcctataaatgaaaaaaaggctgacttgctcgatactataaattcatgcatcaggataggcaaggagtggcaaggaatttactatgccaaaaagaaaaacggagataatatacaacaaaatgtgaagataatacctgtcattggacagggaggacatctagctaaccacgttcagtgtgaacctcaactcccagtgtggcccgcggctgtggccaccagtgaccataatcagacaggcaaacataaagacaggagaaaaggctcactagacgtcaaagctgttgcctcccgtgcaactgaagtttccagccagagacgacactcttccatggcccggatacattccatgacaattgaggcgcccatcaccaaggtaatcaatattatcaatgctgcccaggaaagtagtcccatgcctgtgacagaagccctagaccgtgtgctggaaattctaagaaccactgagttatattcaccacagtttggtgctaaagatgatgatccccatgccaatgaccttgttgggggcttaatgtctgacacaggccttgaaataatcaaggatggagaggaagaaggggagagccgcacagcgcagcagtaccctgggctgtcagagtccacgcggcagccctggaggaggtccaggacccccaggaccacctggggctggaaagcaacagagcaacagtgtccagacttcccgcctcctggcccgcaccctcatctagagcttctcatcttccactgtgaaggacaaggaactggccagaaacacagcacctcatacccgtgcacactcatgtctgagaagcgtggcttaatgaacgtcttctttgcaaaatacacaggccctgcaatgaggaagtcctctggattgactcctagcttattacatctttattgtgcagaccctctccattcaaagcccctcttcaactgcccaccccccactacctccaagacagagattctgggttcttgcaactgcagcccctcagagagtgtaagaggggcagaaaaaggagatcaagagctgctagcgaatataaagcaggcagaaaaacatgaaaagaaccacccggaggtgactgtggccatggctctgactgacatagacctgcagctgcagttctccatgtcccaacccgaagccctccttctcctggcagcaggcccagctgaccacctcctgctgcagctctactctggacacctgcaggtcaggcttgtcctgggccaggaggagctgaggctgcagaccccagcagaaattctactgagtggctccgtcccccacaccacagttctgactgtctcagaggactggcccacattgtcagtcaatgggtttctgaatgcctcctctgtagtcctgggagcccccctagaagtcccctatgggctctttgttgggagcactgggagacttggcctgccctacctgaggggaaccagccatcccctgaggggttgcctccatgcagccgctctcaatggccgcagactcctccagcctctgacccccaataagcatgagggctgtgctgaagagttttctgccaatgatgatgtggccctgggcttctctgggtcccactctctggctgccttgcctgcctggggcactcaggatgaaggaaccctggagtttacactcaccacacagagctggcaggcacccttggccttccaggcagcaggctggcatggggacttcatccatgtggacatatttgagggccacctgtggtccatggttgagaagggccagggtactgtattgctcctcaacagtgtgcctgtgactgacgcacagccccacaaggtcagcatccacatcaacattcaccagctagaaatctccatggaccagtaccccacacgaactgaggagtcctcagctacctggagccacgcccgcttcatccacgatggccctgaggacacctctgaccagctggtgctggaggtgtcagtgatggcttggttgcccatgccctcatgcctgcggaggggccaaacagacctcctgcccatccaggtcaaccctgtcaatgacccaccccacatcatcttcccacatggcagccttatggtgatcctggaacacacacagaagcctctggggcctgaggttctccaggcctatgacctggactctgcctgtgagggcctcgccttccagctccttggcaccccctctggcctccccatggagcaccgagaccagcctggggagccggtgactgagttctcctgctgggagttggaggccggcagcctagtctatgtccactgtggtggccctacacaggacttgacattccgggtcagcaatggactgcaggccagccccccggccatgctgaaggtggtggctgtccagctggccatacaaatccaccgcagcacagggctgcatctggcccagggctctgccatgcccatcttgcctaccaacctgttggtggagaccagcgccgtggggcaggatgtgaccgtgctgttccgtgtcaccggaggcctgccgttcagggagctgcagaagcagggggctggtggggtggaggatgctgagtggtgggtcacacaggcgttccaccagcaggatgtggagcagggccacgtgaggtacctgagcactgacccacagcactacaccgaggacaccgtggagaacctggatctgcaggtgcaggtgagctgggaaatcctgagcaatctgtccttcctagtgaccatccagagagccactgtgtggatgctgcagctggagccactgcacactcagaacacccagcaggaggccctcaccacagcccacctggaggccaccctggaggaggcaggcccaagccccccaaccttccactgtgaggtggttcaggctcccaggaaaggcaactttcaactacagggcacgatgctgtcagacggtcagggcttcacccaggatgacgtacaggctgcagaggtgacctatggggccatggcacgtgcctcagtggcagtggaggacaccttctgtttccatgtcacagctccaccatatttctccccactctgtaccttctccatccatattggcggtgacccagacatgcctgtcctcgtggtgcccgagggtggtgggtgtgtcctctctgctgaccagctcttcatcaagagtctcaacagtgccaggtacctctatgaggtcatggagcagccccgccatgggaggttgacttggcgtgggacacaggacaagatcactatggtgacatccttcaccaatggagacctgatgcatggccagctgaccatcagctgcgtcttccacgtggcctggggtaggtggcggctgctgactacagacaacatggccttcagcaatgctgattcgggctttgctgaggcccagctggtgctgacccaccaggacctcctctctggcagtatcatggccacggatgagcccatgcagcccatctgccgcttcatccaggaggggcctcaggaagaggcgagtcctgtgtccgatgggcagcaccaggccatcacggtgctggaggtgcaggccttggagccttacctctgtgtggccaatggctccggcctcatggttcctcaaggaggccagggtaccatcaacatggccgagctccacctgggcaccaacctcaacatctgcagtagggatgaggcccactaccacgtcacagacagccctcactggggacagttgctccaagccactcagccagccacagccttctctcagcaggacctgctggttggggctgttttctatggccacaatggcagcctcagctcccgcaacaccctggccttctcaatggatgtgggaccagtgcacacagatgccaccctacaagtgaccattgccctagagggcccagtagccccactgaagctggcccagcacaaggagatctacatcttccagggagaggcagctgagatcagaagggaccagctggaggtagcccaggaggcagtgccgccagcagacatcgttttctcagtgaagagcccaccgagtgccggctacctggtgatggtgctgcgtggcatcttggcagatgagccacccagcctggaccccgtgcagagcttctcccaagaggcagtggacacaggcaggatcctctacctgcactcccgccctgaggcccggagccatgccttctcgctggatgtggcctcggcctgggtgctccccttgaggacgtcacgtggagctggaggtggaagagcatctgatccagtacctgcacgatgggagcaagacactgacggttttgtcctgatggctaatgcctctgagatggaccgccagagccatcctgtggccttcactgtcaccatcctgcctgtcaatggccaacccccgacctcatacaaactcaggcctgcagaggctctgaggagcatggatggttactctgggcccaaggacctggtgtacaccattaagcagcccagcaatgggtggagtccgtccagccactcagcagccagagcctcagagccagcaggcaccgacccccagctcctgctctaccatgtggtgcggggcctccagctaggccggctcttccacgcccagcatgacagcacaggggaggacctggtgaacttcactcagggagagaccccggagttcatcatctcggagccgctggccaatatgtactcatgtgggaaccagaacacactgatggaggagttggcagagcaggcacagcagcacgacgagatgctgcacatgcaccacgcgctgaaggaggcgctcagcatcatcggtgacatcaacaggaccactgtcaccatgcccatgcccccgcccgtggacgacacctggttgcaggtgcagagcatccctgacgcacacaggtaccagagactgccccccacggccccaaaatcccccacccgggatgcccagaggagtgccctgggggcaagtggcacaccccctcaccggggtggctcccacctggagtga

SEQ ID NO: 14220 - DNA, 4584 bp, Homo sapiens
  SIMILAR (4131)..(3211): 761254mologous to Homo sapiens melanoma-associated chondroitin sulfate proteoglycan (MCSP),accession number X96753,Smith-Waterman Score=1175.
tcagggatgctctgacaaccaggtgtcgtccacgggcgggggcatgggcatggtgacagtggtcctgttgatgtcaccgatgatgctgagcgcctccttcagcgcgtggtgcatgtgcagcatctcgtcatgctgctgtgcctgctctgccaactcctccatcagtgtgttctggttcccacatgagtacatattggccagcggctccgagatgatgaactccggggtctctgcctgagtgaagttcaccaggtcctcccctgtgctgtcatgctgggcgtggaagagccggcctagctggaggccccgcaccacatggtagagcaggagctgggggtcggtgcctgctggctctgaggctctggctgctgagtggctggacggactctcagtgcccggcaccgcccactgcactacccacccattgctgggctgcttaatggtgtacaccaggtccttgggcccagagtaaccatccatgctcctcagagcctctgcaggcctgagtttgtatgaggtcgggggttggccattgacaggcaggatggtgacagtgaaggccacaggatggctctggcggtccatctcagaggcattagccatcaggacaaaaccgtcagtgtcttgctcccatcgtgcaggtactggatcagatgctcttccacagccgtacctctctccagcagaaggtgctgagggtcctggcttgaggcccatcctccttctgcagggccccatgccggggtggctccagcacctccagctccacgtgacgtcctcaaggggagcacccaggccgaggccacatccagcgagaaggcatgcctcagggcgggagtgcaggtagaggatcctgcctgtgtccactgcctcttgggagaagctctgcacggggtccaggctgggtggctcatctgccaagatgccacgcagcaccatcaccaggtagccggcactcggtgggctcttcactgagaaaacgatgtctgctggcggcactgcctcctgggctacctccagctggtcccttctgatctcagctgcctctccctggaagatgtagatctccttgtgctgggccagcttcagtggggctactgggccctctagggcaatggtcacttgtagggtggcatctgtgtgcactggtcccacatccattgagaaggccagggtgttgcgggagctgaggctgccattgtggccatagaaaacagccccaaccagcaggtcctgctgagagaaggctgtggctggctgagtggcttggagcaactgtccccagtgagggctgtctgtgacgtggtagtgggcctcatccctactgcagatgttgaggttggtgcccaggtggagctcggccatgttgatggtaccctggcctccttgaggaaccatgaggccggagccattggccacacagaggtaaggctccaaggcctgcacctccagcaccgtgatggcctggtgctgcccatcggacacaggactcgcctcttcctgaggcccctcctggatgaagcggcagatgggctgcatgggctcatccgtggccatgatactgccagagaggaggtcctggtgggtcagcaccagctgggcctcagcaaagcccgaatcagcattgctgaaggccatgttgtctgtagtcagcagccgccacctaccccaggccacgtggaagacgcagctgatggtcagctggccatgcatcaggtctccattggtgaaggatgtcaccatagtgatcttgtcctgtgtcccacgccaagtcaacctcccatggcggggctgctccatgacctcatagaggtacctggcactgttgagactcttgatgaagagctggtcagcagagaggacacacccaccaccctcgggcaccacgaggacaggcatgtctgggtcaccgccaatatggatggagaaggtacagagtggggagaaatatggtggagctgtgacatggaaacagaaggtgtcctccactgccactgaggcatgtgccatggccccataggtcacctctgcagcctgtacgtcatcctgggtgaagccctgaccgtctgacagcatcgtgccctgtagttgaaagttgcctttcctgggagcctgaaccacctcacagtggaaggttggggggcttgggcctgcctcctccagggtggcctccaggtgggctgtggtgagggcctcctgctgggtgttctgagtgtgcagtggctccagctgcagcatccacacagtggctctctggatggtcactaggaaggacagattgctcaggattttccagctcacctgcacctgcagatccaggttctccacggtgtcctcggtgtagtgcccaccagccccctgcttctgcagctccctgaacggcaggcctccggtgacacggaacagcacggtcacatcctgccccacggcgctggtctccaccaacaggttggtaggcaagatgggcatggcagagccctgggccagatgcagccctgtgctgcggtggatttgtatggccagctggacagccaccaccttcagcatggccggggggctggcctgcagtccattgctgacccggaatgtcaagtcctgtgtagggccaccacagtggacatagactaggctgccggcctccaactcccagcaggagaactcagtcaccggctccccaggctggtctcggtgctccacggggaggccagagggggtgccaaggagctggaaggtgaggccctcacaggcagagtccaggtcataggcctggagaacctcaggccccagaggcttctgtgtgtgttccaggatcaccataaggctgccatgtgggaagatgatgtggggtgggtcattgacagggttgacctggatgggcaggaggtctgtttggcccctccgcaggcatgagggcatgggcaaccaagccatcactgacacctccagcaccagctggtcagaggtgtcctcagggccatcgtggatgaagcgggcctgggatttacgcagttcagcctccatcagtgccagcatgggctgcacatgccaccactcaagccaggctgtgccaccctcggtcaccaccactgcgctgatagcagctcctccagtctgcagccagccaccatgttgtgcgtcagcaaggcttcccacagcccctgcctctagccattgacactgaggtcttccatgcagccagcccagcagggaggcattggcagcccctggtgtcaggcctgagcggtgttcgtggctccaggtagctgaggactcctcagttcgtgtggggtactggtccatggagatttctagctggtgaatgttgatgtggatgctgaccttgtggggctgtgcgtcagtcacaggcacactgttgaggagcaatacagtaccctggcccttctcaaccatggaccacaggtggccctcaaatatgtccacatggatgaagtccccatgccagcctgctgcctggaaggccaagggtgcctgccagctctgtgtggtgagtgtaaactccagggttccttcatcctgagtgccccaggcaggcaaggcagccagagagtgggacccagagaagcccagggccacatcatcattggcagaaaactcttcagcacagccctcatgcttattgggggtcagaggctggaggagtctgcggccattgagagcggctgcatggaggcaacccctcaggggatggctggttcccctcaggtagggcaggccaagtctcccagtgctcccaacaaagagcccataggggacttctaggggggctcccaggactacagaggaggcattcagaaacccattgactgacaatgtgggccagtcctctgagacagtcagaactgtggtgtgggggacggagccactcagtagaatttctgctggggtctgcagcctcagctcctcctggcccaggacaagcctgacctgcaggtgtccagagtagagctgcagcaggaggtggtcagctgggcctgctgccaggagaaggagggcttcgggttgggacatggagaactgcagctgcaggtctatgtcagtcagagccatggccacagtcacctccgggtggttcttttcatgtttttctgcctgctttatattcgctagcagctgctgcatccagggtacaatgcgcctttccagaacacagcagcgacccggggtagagggatcgctcaaacagcaccagaggctgcattccaacttttcctccatcaacgagtccgttttcattgttagtttctccttaaacacgattggcttcgccgcggagaaagacaataggctgcctctcccccggcggcggcagcagcggctgcggctaaagcggcggcaaccgaggcgagcaatgggcacggcggtctcggccgagccgaggggcttcaccgctgctgctccggctccgcgacagctctgcacgtagccccagccaccccgcgcaccggctacaagccgcccgggggtggccggggcacgcaagagggcagtaacgtctgcgagtcctcccgtgagtacacgcggagcaagggctgcgagctgggattgcacggcagagctgcccat

SEQ ID NO: 14221 - DNA, 2139 bp, Homo sapiens
  SIMILAR (212)..(8668): 991254mologous to Homo sapiens GAP-related protein,accession number M82814,Smith-Waterman Score=14551.
cttgcctgtttcctggacaaacatcatgacattatcatcatagaccacagaaatcctcgacagctggatgcagaggcactgtgcaggtctatcagatcatcaaaactctcagaaaacacagttattgttggtgtagtacgcagggtggatagagaagagttgtccgtaatgcctttcatttctgctggatttacaaggaggtatgtagaaaaccccaacatcatggcctgctacaatgaactgctccagctggagtttggagaggtgcgatcacaactgaaactcagggcttgtaactcagtattcactgcattagaaaacagtgaagatgcaattgaaattacaagcgaagaccgttttatacagtatgcaaatcctgcatttgaaacaacaatgggctatcagtcaggtgaattaatagggaaggagttaggagaagtgcctataaatgaaaaaaaggctgacttgctcgatactataaattcatgcatcaggataggcaaggagtggcaaggaatttactatgccaaaaagaaaaacggagataatatacaacaaaatgtgaagataatacctgtcattggacagggaggaaaaattagacactatgtgtccattatcagagtgtgcaatggcaacaataaggctgagaaaatatccgaatgtgttcagtctgacactcgtacagataatcagacaggcaaacataaagacaggagaaaaggctcactagacgtcaaagctgttgcctcccgtgcaactgaagtttccagccagagacgacactcttccatggcccggatacattccatgacaattgaggcgcccatcaccaaggtaatcaatgttatcaatgctgcccaggaaagtagtcccatgcctgtgacagaagccctagaccgtgtgctggaaattctaagaaccactgagttatattcaccacagtttggtgctaaagatgatgatccccatgccaatgaccttgttgggggcttaatgtctgatggtttgcgaagactatcagggaatgaatatgttctttcaacaaaaaacactcaaatggtttcaagcaatataatcactcccatctcccttgatgatgtcccaccacggatagctcgggccatggaaaatgaggaatactgggactttgatatttttgaactggaggctgccacccacaataggcctttgatttatcttggtctcaaaatgtttgctcgctttggaatctgtgaattcttacactgctccgagtcaacgctaagatcatggttacaaattatcgaagccaattatcattcctccaatccctaccacaattctacacattctgctgatgtgcttcatgccactgcctattttctctccaaggagaggataaaggaaactttagatccaattgatgaggtcgctgcactcatcgcagccaccattcatgatgtggatcaccctgggagaaccaactccttcctgtgtaatgctggaagtgagctggccattttgtacaatgacactgctgtgctggagagccaccatgcggccttggccttccagctgaccactggagatgataaatgcaatatatttaaaaacatggagaggaatgattatcggacactgcgccaggggattatcgacatggtcttagccacagaaatgacaaagcactttgagcatgtcaacaaatttgtcaacagcatcaacaaacccttggcaacactagaagaaaatggggaaactgataaaaaccaggaagtgataaacactatgcttaggactccagagaaccggaccctaatcaaacgaatgctgattaaatgtgctgatgtgtccaatccctgccgacccctgcagtactgcatcgagtgggctgcacgcatttcggaagaatatttttctcagactgatgaagagaagcagcagggcttacctgtggtgatgccagtgtttgacagaaatacctgcagcatccccaaatcccaaatctctttcattgattacttcatcacagacatgtttgatgcttgggatgcctttgtagacctgcctgatttaatgcagcatcttgacaacaactttaaatactggaaaggactggacgaaatgaagctgcggaacctccgaccacctcctgaa

SEQ ID NO: 14222 - DNA, 645 bp, Homo sapiens
  SIMILAR (385)..(44): 581254mologous to Mus musculus dynamin,accession number L29457,Smith-Waterman Score=304.
gcagccagtgctccttgtcaagctccccccgtcactccaggtgggagccaccccggtgagggggtgtgccacttgcccccagggcactcctctgggcatcccgggtgggggattttggggcctggggggcagtctttggtacctgtgttcgtcagggatgctctgacaaccaggtgtcgtccacgggcgggggcatgggcatggtgacagtggtcctgttgatgtcaccgatgatgctgagcgcctccttcagcgcgtggtgcatgtgcagcatctcgtcgtgctgctgtgcctgctctgccaactcctccatcagtgtgttctggttcccacatgagtacatactggccagcggctccgagatgatgaactccggggtctgagagtgggcaaacagggaagaaggttgggacctggtgcctgtgccgccctggctgccttgctgggcccttctgggactgtgcgctggacttggagccccttggagtatggcttttcacacgggcttctataccgcttcgactggaagatccacctccccactgccttttctcactcagatggggacaccgaggtccagaggaaaagacacctgtcaaatgtcacagatctgggaggggacttaagacctatcatgccaagagg

SEQ ID NO: 14223 - DNA, 652 bp, Homo sapiens
  SIMILAR (292)..(480): 671254mologous to Homo sapiens golgin-95,accession number L06147,Smith-Waterman Score=214.
actcgcagacgttactgccctcttgcgtgccccggccacccccgggcggcttgtagccggtgcgcggggtggctggggctacgtgcagagctgtcgcggagccggagcagcagcggtgaagcccctcggctcggccgagaccgccgtgcccactgctcgcctcggttgccgccgctttagccgcagccgctgctgccgccgccgggggagaggcagcctattgtctttctccgcggcgaaggtgaggagctgtctcggctcggcccgcgggggagccccgggagccgcacggtggcatttttcaactccgctggagccagtgcccaggaggaacaaagggtgtgctgccagcccctggctcacccagtggcctcgtcccagaagaagccagaggtagcggccccagccccagagagtgggggtgagtctgtgtttggggagacccaccgggccctgcagggggccatggagaagctgcaggtgagtaggtcctggcatgggccaacaaggggggcgggggggcaggacaaggcaggtgactcctgacatgtgaccccattattttggctccacagcgactttatggaaggagaaggtggacctgaaggagcgggtagagaaactagagcttcaattcatccacctctcctcg

SEQ ID NO: 14224 - DNA, 543 bp, Homo sapiens
  SIMILAR (230)..(541): 481254mologous to Homo sapiens 88-kDa Golgi protein,accession number AF204231,Smith-Waterman Score=193.
agtcagcaacaggtatctacggggagggccgtgcatcctctactaccctgcaggatctggaggtaagaggccctgggccgaggtgcagtgaccctgcaggccagccctccaacctcctcccacagcaggggcttgttgcccctctgccagctgaggcagcccacacacccccaccagccctaatgattattctctctacccctccccacaatcttcctccaactccttctctctgcatgcacctcagagccagtaccaagaactagcagtagccctggattcaagctccgcaataatcagtcaactcactgaaaacatcaattcactggttcgcacatctaaggaggagaagaagcatgagatacatctggtacagaagcttgggaggagcttgttcaaactcaaaaaccagacggctgaacccctggccccagagcccccagcagggccatctaaggtggagcagctacaagatgagaccaaccacctaaggaaggagctagagagtgtgggaagacagctccaggctgaggtggaaaacaa

SEQ ID NO: 14225 - DNA, 1260 bp, Homo sapiens
  SIMILAR (298)..(1215): 811254mologous to Homo sapiens melanoma-associated chondroitin sulfate proteoglycan (MCSP),accession number X96753,Smith-Waterman Score=1242.
atgtcagaaaaaacacaacaggggaaattggccgcagccaagaaaaagccaatcgtgtttaaggagaaactaacaatgaaaacggactcgttgatggaggaaaagttggaatgcagcctctggtgctgtttgagcgatccctctaccccgggtcgctgctgtgttctggaaaggcgcattgtaccctggatgcagcaggaatcctattcatcttcttcaccgatatggtttgtggactctgatgagccaaatctgacatcagttctggaacgtctagaagatactaaggacaacagttcgctgctagcgaatataaagcaggcagaaaaacatgaaaagaaccacccggaggtgactgtggccatggctctgactgacatagacctgcagctgcagttctccatgtcccaacccgaagccctccttctcctggcagcaggcccagctgaccacctcctgctgcagctctactctggacacctgcaggtcaggcttgtcctgggccaggaggagctgaggctgcagaccccagcagaaattctactgagtgactccgtcccccacaccacagttctgactgtctcagaggactggcccacattgtcagtcaatgggtttctgaatgcctcctctgtagtcctgggagcccccctagaagtcccctatgggctctttgttgggaacactgggagacttggcctgccctacctgaggggaaccagccatcccctgaggggttgcctccatgcagccgctctcaatggccgcagactcctccagcctctgacccccaataagcatgagggctgtgctgaagagttttctgccaatgacgatgtggccctgggcttctctaggtcccactctctggctgccttgcctgcctggggcactcaggatgaaggaaccctggagtttacactcaccacacagagctggcaggcacccttggccttccaggcagcaggctggcatggggacttcatccatgtggacatatttgagggccacctgtggtccatggttgagaagggccagggtactgtattgctcctcaacagtgtgcctgtgactgacgcacagccccacaaggtcagcatccacatcaacattcaccagctagaaatctccatggaccagtaccccacatgtactttgaaccgaggagtcctcagctacctggagccacgtgacagtctccttcttggggagctggtgcagaggcctctcgtcacctccaggaacaccgctcaggcctga

SEQ ID NO: 14226 - DNA, 2028 bp, Homo sapiens
  SIMILAR (1120)..(1701): 471254mologous to Homo sapiens similar to golgi antigen; similar to Q08379 (PID:g2498401),accession number AC004460,Smith- Waterman Score=396.
gtaatcaatattatcaatgctgcccaggaaagtagtcccatgcctgtgacagaagccctagaccgtgtgctggaaattctaagaaccactgagttatattcaccacagtttggtgctaaagatgatgatccccatgccaatgaccttgttgggggcttaatgtctgacacaggccttgaaataatcaaggatggagaggaagaaggggagagccgcacagcgcagcagtaccctgggctgtcagagtccacgcggcagccctggaggaggtccaggacccccaggaccacctggggctggaaagcaacagagcaacagtgtccagacttcccgcctcctggcccgcaccctcatctagagcttctcatcttccactgtgaaggacaaggaactggccagaaacacagcacctcatacccgtgcacactcatgtctgagaagcgtggcttaatgaacgtcttctttgcaaaatacacaggccctgcaatgaggaagtcctctggattgactcctagcttattacatctttattgtgcagaccctctccattcaaagcccctcttcaactgcccaccccccactacctccaagacagagattctgggttcttgcaactgcagcccctcagagagtgtaagaggggcagaaaaaggagatcaagagctgctagcgaatataaagcaggcagaaaaacatgaaaagaaccacccggaggtgactgtggccatggctctgactgacatagacctgcagctgcagttctccatgtcccaacccgaagccctccttctcctggcagcaggcccagctgaccacctcctgctgcagctctactctggacacctgcagtcagcaacaggtatctacggggagggccgtgcatcatctgctaccctggaggatctggagagccagtaccaagaactagcagtggccctggattcaagctccacaataatcagtcaactcactgaaaacatcaattcactggttcacacattgaaagaggagaagcatgagatacatcaggtacagaagcttgggaggaacttgttcaaactcaaaaaccagacggctgaacccctggccccagagcccccagcacggccctctaaggtggagcagctccaagatgagaccaaccacctaaggaaggagctggagagtgtgggaagacagctccaggctgaggtggaaaacaatcagatgttgagtctcctgaacaggagacaggaggagaggctgcaggaacaggaggggtggcaggaggaacaggagaggctgctggacaagaataatgagaacaagagtgcactgcagttggagcagcaagtaaaggagctgaagcttggagaacctggaagctaccagccagtagaaacagcagctaaagcccagttgagcctcatggctctccctggggaaggagatggaggaggacatctggacagtgagcaggaggcgcctcggcccatgccgaacatcccaggggacctggagagccgggaggccatggtggcatttttcaactccgctggagccaatgcccaggaggagcaaagggtgtgctgccagcccctggctcacccagtggcctcgtcccagaaaaagccagaggtagcggccccagccccagagactgggggtgaatctgtgtgtggggagacccaccaggccctgcagggggccatggagaagctgcaggaaagtacatcagccagggggcagtgtcagagacgcagcactgggagaggaggacatcgtcaggctggcccaggaccaggaggagatgaagagatgctctgcacctgcacccaggtgtcgtccgcgggcaggggcatgggcatgctgacggtggtcctggtggtgtcactgatgatgctgagcgcctccttcagcacgtggtgcatgcgcagcatctcgtcgtgccactgtgcctactctgcccactcctccatcagtgtgttctggttcccacgcgagtacatattggccagtggctccgagatgatgaactccgtggtctga

SEQ ID NO: 14227 - DNA, 564 bp, Homo sapiens
  SIMILAR (214)..(357): 931254mologous to Homo sapiens bA526D8.2 (novel protein similar to KIAA1074),accession number AL136981,Smith-Waterman Score =229.
tttcgttgcgagtgtcgctgctgaaggctgtggtggaccgggctggatcgcggattctgagctacattgcgggtttgggggtggatcttggatttgggggtggatcgcgggttgcgggggggatcgcggatttggggcggagtgggggtggaaaggccacgaggagccgccgcggctcaagagcgggtggtgggcgtctgagaagtcgccaccatgaggaagctcttcagcttcgggagacgcctgggccaggcgctcctgagctccatggaccaagagtatgcgggtccgggttacgacattcgggactgggaactgcggaagatccacagggctgccatcaagggcgacgccgcaggaggtggagcgctgccatgacgcgcaggttccgggacttggacgcccgcgacagaaaagacaggactgttctacatttgacctgtgcccatggccgtgtggaagtggtcaccctcttgctgagcagaagatgccagattcgacatctgtgacagactaaaacaggacacctttaatgaaggctgtacactgccaggaagaggcttg

SEQ ID NO: 14228 - DNA, 1284 bp, Homo sapiens
  SIMILAR (198)..(8714): 1001254mologous to Homo sapiens neurofibromin,accession number M89914,Smith-Waterman Score=14667.
atgttcgtgtggaggaatgtggaaggtcactctgtggccgtgttcccctggtactccatccccttcctgacccctccctgcagccacatgaggcccagcaaactgccagtcactcagtggcctccaaccagagaaaacaacctgccaagttggcagctgttgctcatgagcgtccaccaggcccagtccctcagtgccctgcgcaaggaacaggactcatcttctgagaaggatggacgcagccccaacaaatgggacaaggaccacatctggtggcccatgagtggcagtcataatcttcagcaagcagcaccaggccctggcagggcgcaccagggtcaccccaaccaggataaccggaccatcagccagatgctgagcgagcaatggtacaccctggggcccaatgagatgcagaaatacgacctggccttccagcacatggccagtgaggacatagcgagtgacgaggagcacacggtcatccatgaggaggagggggtggagaagctgaggacaggctcagggaaccggagaccgagaaggcgctgtcctcttcactgcacgcgccccggaccagtgccggccctgatcatgcagctcttccaggcccactgcttcttcctgtccactaggccacagctgctctccaggcccactatgcacacatcttcccctccaaggacctccacaagcccctactgtgcctggggccactgcgacctgctggttctcctggaatcaatgtcggtgcagggctgtgtccagctatccctgaaaggtctgattatctcctctccccactgcatggtcaccctggtctgtctggaatgtgtgcacctgtatcctaatgccagctctgggtcctctgacaccattctgcttcagaagcagctccgaatccgtatcgcagaggggacgagtccccgggctgtgactgagcgcttccagctgcctggctggccgcgctccgggcgctataagagggcggcggccgcggcgcgccctgcgcggagctgggagcgcgatggtcggccgccgaggcgcggcaagatgctggatgggtccccgctggcgcgctggctggccgcggccttcgggctgacgctgctgctcgccgcgctgcgcccttcggccgcctacttcggcctcctaccccgagcgccgccgctgggagccctggctggccttcggatcccagcccccgacctggacgccctgggccgctccctcagccgggccgccgccctccgccggtcacctgttcccggccctctggcctga

SEQ ID NO: 14229 - DNA, 777 bp, Homo sapiens; identical to SEQ ID NO: 13980
  SIMILAR (145)..(465): 561254mologous to Homo sapiens BC85722_1,accession number AC006486,Smith-Waterman Score=273.

SEQ ID NO: 14230 - DNA, 499 bp, Homo sapiens
  SIMILAR (117)..(1): 1001254mologous to Homo sapiens BC85722_1,accession number AC006486,Smith-Waterman Score=199.
cttgttggggctgcgtccatccttctcagaagatgagtcccgttccttgggtagggcactgagggactgggtccgacgttttccgggcggtagaggcaactggatctcaggagacatgatggagaggaaggcatcatcatggtcactctctgtctcactgtccagccggggctctcctggggggccggaggcctcctcctccgtggtgggaggcggacccttaccagattccaccacccccaaagggtgtgggggtccgggtcctgggctctcagggcatgtggctccagggggccgctcagggtcagcactccctgtcccacctggtggccgttcatgagcaacagctgccaacttggcaggttgtttgctctggttggaggccactgagtgactggcaggttgccgggcctcgtgtggctgcagggaggggtcaggaaggggacggagtaccaagggaacatggccacagagcgaggttccacattcctccacatga

SEQ ID NO: 14231 - DNA, 753 bp, Homo sapiens
  SIMILAR (726)..(469): 581254mologous to Mus musculus fibrillin-2,accession number U20217,Smith-Waterman Score=303.
ctagagaggcacgacggtttgccacgtacgaagcttggggcatcggttggccacgttgcacatccaacacccaaggggcttccccgtgtggatgtcagtgaggaatcccggggcctgatttccacacaggatctggtagtcagccccttcctcctcatggatgaccgtgtgctcttcgtcactcgctatgacctcgctggccatgtgctggaaggccaggttgtatttctgcatctcattgggccccagggtgtaccaccgctcgctcagcatctggctgacggtccggttatcctggttgggatgaccctggtgcgccccgccagggcctggtgccgcctgctgaagatcatgagcgccactcatgggccaccggatgtggtccttgtctgatttgttggggctgcgtccatccttctcagaagatgagtcctgttccttgcgcccttgttcttttacaactatagggtccaggcaggtagtagcagtagcatccggtgtgtacccggcctgacagtggcagcggaaggagccaaggctgttgatgcactccccatgagcacacaggtgagcaagcatacggcattcatctacatccacacagttgatgccagtgaagtccaggctgtagccaaagggacactcacagcggaaggatccatcggtgttgacacagacgccgttagtgcagacgccagggttctctgcacactcattcacgtcctcgatgtaaattgcaaagctttcaggcat

SEQ ID NO: 14232 - DNA, 2499 bp, Homo sapiens
  SIMILAR (1903)..(4035): 991254mologous to Homo sapiens GAP-related protein,accession number M82814,Smith-Waterman Score=3657.
tcagggtctgtcctcacaggaacctgatgccagagctgtgcactgaaaggatttggacacaggtattttgtggaactgagcattttccaggtcttgctggaggtcattctgtgtgaacttgatggagatctttctcatgcgctgttttcctaagtgtgggagagcatggcctgcatgactgctggcttccagcacgtggcgtgcaaacccatgccagagtgtgtaattcactgtagccctggaagacacttgatagttcagaagccgagatcctgcgaggtgtctcagagagctcagctgtgaccctgcactgtatggaagggcaggcagtggggcccaggcaggtgaagaggattgtccactgttgagcatcatcagcctaaaacccacatgcaatgctattgctgcaaaaccgctgacttgccctttgcacatctgtccctcaaggtgctgctgtcctctgtggagggtgggatcccgggaactagagcccctctcctgctggagacactcggcactcagaaagtgtgtgcttgggggcacggcctcgctttgggacaactcagggcagcatcgacggtgaacaaaatcctttctgtttgcagccctgcctgtggtagttatggagacccccaggtgttgaggcagggctggggtgtccccttccaaccaggctgtcaaggccccaactctggggcagaggcagtggcagggcagccaggtttgtgccagagcctgagcaggttgaggtggggtcaggcaggggtgactctcgggcagaggcagtggtggggcagccagggcagcgtcaagagtctgagccaggtgaggtgcggtcaggacccccacagggcttggaggggaagatgtgtgcatagtgggcctggagggcggctgtggcctagtggacaggaagaagcagtgggcctggaagagctgcatgatcagggccggcactggtccagggcacgtgcagtgaagaggacagctccttctcggtctccggttccctgagcctgtcctcggcttctccaccagaaggtggcaggatccattgggaggaaacaggccaccttggaaggcgtccctgggcccccatccccaggggttggggccgtagggggcccgctctgctgcgttgaccagactcctgggctttgaaggctcctgggcccagtaagaaggaggtgggcgccaaggttgaggaggaagcatccgagtatgtgtaggaggaggacagggtgtgaccatagactgccaaaagccactccttgaacttgagatcggtgtcggtggtgctaaagccatcatcagcaatgacatcatcaccccctcctcctcatggatgaccgtgtgctcctcgtcactcgctgtgtcctcactggccatgtgtgtgtgcagccattctgccccacagaggctgctccttggtatccgagctctgaagtgtttgggctgcaactgactggagttcagaggacaccccaggggcagtggcagtgcccgtctctgatattctccgctcccacgagcccttgttacactcctgctagcccctggcttgtgggcttggcctctgagctggacttctttcggtccttgttgcaagtgggccaccttcacctggaaggccaggtcgtggtatttctgcatctcactgggccccagggtgtaccaccgctcgctcagcatctggctgacggtccggttatcctggttggggtgaccctggtgcgccccgccagggcctggtgccgcttgctgaagatcatgagcgccactcatgggccaccagatgtggtccttgtcccatttgttggggctgcgtccatccttctcagaagatgagtcctgttccttgcgcagggcactgagggactgggctgtccagcagggactcccctgaggggcccagggctcctcctccatggtgggaggtgagcttttaccaggttccaccacccccaaagtgtgtggggttgcgggccctgggctttcagggcaggtggctccagggggccgcccagggtcaacactccctgtcccacctggtggacgctcatgagcaacagctggcaacttggcaggttgttttctctggttgcaggccactgagtgactggcaggttgctgggcctcgtgtggctgcagggaggggtcaggaaggggatggagtaccaggggaacacagccgcagagtgaccttccacattcctccacacgaacatgattaccctgatgggcagtacctgtggctgtttctgctccctcacccagtccataggcttctggttgtaaaaagtgtgcatcttgagactgttcagaaagcgcaaagtcatctcctttggaggctgcatcgctcaaatcttcttcatccacgtcattggtggtgtggagatggtgctgctcatagccatggcctagtttattgagggtttttagcatgaagggctgctgaattttgtcgaaggccttttctgcatctattgagagaagcat

SEQ ID NO: 14233 - DNA, 616 bp, Homo sapiens
  SIMILAR (429)..(133): 581254mologous to Homo sapiens BC85722_1,accession number AC006486,Smith-Waterman Score=257.
tcacccactccttgaacttgagatcagtgtcagtggtgctaaagccgtcatcagcaatgacatcatcaccccctcctcctcatggatgaccatgtgctcctcgtcactcgctatgacctcgctggccatgtgctggaaggccaggtcgtggtacttctgcatctcattgggccccagggtgtaccaccgctcgctcaggatctggctgatggtccagttatcctggtaggggtgaccctggtgcgccctgccagggcctggtgccgcttgctgaagatcgtgaccgccactcatgggccaccagatgtggtccttgtcccatttgttggggctgcgtccatccttctcagaagatgagtcctgttccttgcacagggcactgagggactgggcctggtggacactcgtgagcaacagctgccgacttggcaggttctttgctctggttggaggccactgagtgactggcaggttgctgggcctcacgcggctgcagggaggggtcaggaaggggacagagtaccaggagaacacagccacagagcaaggttccacattcctccacacaaacatgctgacaccaccagaggccttgctggacgcagacatcaggggc

SEQ ID NO: 14234 - DNA, 1155 bp, Homo sapiens
  SIMILAR (4)..(771): 911254mologous to Homo sapiens neurofibromatosis 1,accession number U17690,Smith-Waterman Score=1189.
atccttaattaaattaagctccccccccccggctgccgccgtcgcgggggccgtcaccgccgccaccgctaccgaggccgagcggagccgttagcgccgcgccgccgccgcctcccgcccgccccggagcagccccgggcccgcccgcccgcatccagatttttgaaaaatacaatgtctaatggttatgaagaccacatggccgaagactgcaggggtgacatcgggagaacgaatttgatcgtcaactacctccctcagaacatgacccaggatgagttacgaagcctgttcagcagcattggtgaagttgaatctgcaaaacttattcgggataaagtaccaggacacagcttgggctatggctttgtgaactacgtgaccgcgaaggatgcagagagagcgatcaacacgctgaacggctttgaggctccagtcaaaaaccattaaggtgtcgtatgctcgcccgagctcagaggtgatcaaagacgccaacttgtacatcagcgggctcccgcggaccatgacccagaaggacgtagaagacatgttcttctcggtttggggcggatcatcaactcgcgggtcctcgtggatcagactacaggtttgtccagaggggttgcgtttatccggtttgacaaacggtcggaggcagaagaggcaattaccagtttcaatggtcataaacccccaggttcctctgagcccatcacagtgaagtttgcagccaaccccaaccagaacaaaaacgtggcactcctctcgcagctgtaccactcgccagcgcgacggttcggaggccccgttcaccaccaggcgcagagattcaggttctcccccatgggcgtcgatcacatgagcgggctctctggcgtcaacgtgccaggaaacgcctcctccggctggtgcattttcatctacaacctggggcaggatgccgacgaggggatcctctggcagatgtttgggccgtttggtgccgtcaccaatgtgaaagtgatccgcgacttcaacaccaacaagtgcaaagggtttggctttgtgaccatgacaaactatgaagaagccgcgatggccatagccagcctgaacggctaccgcctgggggacaaaatcttacaggtttccttcaaaaccaacaagtcccacaaa

SEQ ID NO: 14235 - DNA, 2340 bp, Homo sapiens
  SIMILAR (1429)..(1599): 1001254mologous to Homo sapiens HuR RNA binding protein,accession number U38175,Smith-Waterman Score=292.
atgttcgtgtggaggaatgtggaaggtcactctgcggccgtgttctcctggtactccatccccttcctgacccctccctgcagccacacgaggcccagcaacctgccagtcactcagtggcctccaaccagagaaaacaacctgccaagttggcagccgttgctcatgagcgtccaccaggcccagtccctcagtgccctgcgcaaggaacaggactcatcttctgagaaggatggacgcagccccaacaaatcagacaaggaccacatccggtggcccatgagtggcgctcatgatcttcagcaggcggcaccaggccctggcggggcgcaccagggtcatcccaaccaggataaccggaccgtcagccagatgctgagcgagcggtggtacaccctggggcccaatgagatgcagaaatacaacctggccttccagaacgtagaggcccggatccgctacgtcatcgtccgcggaaacgagcaaggtttctttcgcatgcatcacctccgtggcgtcagctccctgcagctggggcggaggcgtccggggcctggaacctaccggctggaggtggttgacatgattacaatcgatgctcggtaccggtgttcaggactgaggtctccaccagaccccgaccatctgaaatctgtggacttacacaggaatgaacacttctttctgcaaaaagccaggtgggaaatacatttggttttgcaggccacaccatctcagatacaactactccatgtggcctttgtactagcaaagcagccattgaggtgccggaagcagacactcttcctcatatctgtagttggcacaaaggagaagaatgtggcctccgagggccggaacccagttcgccccctccgcggccatcgctggctgcccgcgtctccgccggccgcggagcacttcgcaggcggcgccgaccggaagtcccgcctctcccgcgcgccccggagcgccgcgacagctacgccggccaatgagcagcgcgccgtggcggacgtcggccaatgggctcgcgcgcggggggggcgtgtccgggccgcgggccggagcgggtcgtgcgcgctgaggaggagccgctgccggcgtcgccgtcgccgccaccgtcgccaccgataccgaggccgagcggagccgttagcgccgcgccgcgctgcatccggccagccaggaaaactcagggcccgcagggggatcaattgtaatgccagcagtatccccatgctccaagtcgtgaggatcaaaagtatctccaaacattgccagatggctcgggttgcgggggaggggtctcttccactctcacacgcacagctcactcactgtgtctttgggaataaacaggtgcagaggaccattgcctacctgccccctcagcagcagggtgtccagggatttttgaaaaatacaatgtctaatggttatgaagaccacatggccgaagactgcaggggtgacatcgggagaacgaatttgatcgtcaactacctccctcagaacatgacccaggatgagttacgaagcctgttcagcagcattggtgaagttgaatctgcaaaacttattcgggataaagtagcagtgggacttctaagcctttgtgtccccatccggaatgtggagattgtggcttctacatcctggtggtccctacctctggccccatatgtccctcgggggatcagaaggagtcagccctctaccctcatggatgacctgtcatgccggagccaccaggctgcagccccattcacggcttctgtcttgctgtatatctctggtcgggttaaagcccacaccgctgcccaaggctttaaccacatcccggaggagggggtgtcccaagaggcggggtcgggctggtctcaggcttggaaagacggttggcttaccaatgtcttcatgttctcttgcacaggacacagcttgggctatggctttgtgaactacgtgaccgcgaaggatgcagagagagcgatcaacacgctgaacggcttgaggctccagtcaaaaaccattaaggcaggcccctgcaactgggcttcctgcagcagccactgcacccacccgccctcagtgcccgccttcacaagatacccacagacactgccccatgatcttggttactcagtggccaaaccctggctcagcagcagctctcccagacctgccccatgccgcatggacgtggtgtgcagtgggctccctgagggcaggcgcgccactcctgcctcctcgtgtccagtgcaggtcctcagaggcaccttccccggtgggggctggcagggcctcctggagccttgtgctcatcctgggctctga

SEQ ID NO: 14236 - DNA, 1053 bp, Homo sapiens
  SIMILAR (562)..(2325): 1001254mologous to Homo sapiens similarto mouse growth factor receptor-binding protein Grb10,accession number D86962,Smith- Waterman Score=3097.
  misc_feature (1)...(1053): n = a,t,c or g
atgcatactctcaacccctactcagaaatgaaagcagaaagaagctatttacagcaagtcatgtgggcgtcaggaacagaatatgcttccaaaattaaacttctggaagaagtttatactgggaggagaattgattatgagatcaatgcccacaaatactggaatgacttctacaaaatccacgaaaatgggtttttcaaggatagacattggctttttaccgaattccctgagctggcacctagccaaaatcaaaatcatttgaaggactggttcttggagaacaagagtgaagtacctgaatgtagaaacaatgaggatggacctggtttaataatggaagaacagcacaagtgttcttcaaagagccttgaacataaaacacagacacttcctgtggaggagaatgtaactcagaaaattagtgacctggaaatttgtgctgatgagtttcctggatcctcagccacctaccgaatactggaggtaaccttttattgtcttggtagtgggatatgtgaagctattatatttgtgcacatgagggttcctgaagtcaacatcaaaatcaacaaatgtcatgagtactgtttagctctggtcactacaccttccctaatacagttaggccagattcttgttgattattatttttctagcttttctagctttagggaattaactctggaaagttctgtgattaatagttcatttctgtctgcaggttggctgtggtgtgggaaacacagtctttccaattttacaaacgaacaaacaaattcagaatatgatccttctcggtgttttgcctttgttcacgacctgtgtgatgaagagaagagttacccagtgcccaagggnagtcttgatattatcattctcatatttgttctttcagcaattgttccagacaagatgcagaaggctatcaacaggctgagcaggcttctgaaacctggcgggatgatgcttctgcgagattacggccgctatgacatggctcagcttcggtttaaaaaaggtattttgaaagtgctgaatcctaaccactag

SEQ ID NO: 14237 - DNA, 1525 bp, Homo sapiens
  SIMILAR (380)..(1246): 681254mologous to Homo sapiens phospholipase C-beta- 1a,accession number AJ278313,Smith-Waterman Score=875.
  misc_feature (1)...(1525): n = a,t,c or g
atgcatactctcaacccctactcagaaatgaaagcagaaagaagctatttacagcaagtcatgtgggcgtcaggaacagaatatgcttccaaaattaaacttctggaagaagtttatactgggaggagaattgattatgagatcaatgcccacaaatactggaatgacttctacaaaatccacgaaaatgggtttttcaaggatagacattggctttttaccgaattccctgagctggcacctagccaaaatcaaaatcatttgaaggactggttcttggagaacaagagtgaagtacctgaatgtagaaacaatgaggatggacctggtttaataatggaagaacagcacaagtgttcttcaaagagccttgaacataaaacacagacacttcctgtggaggagaatgtaactcagaaaattagtgacctggaaatttgtgctgatgagtttcctggatcctcagccacctaccgaatactggaggtaaccttttattgtcttggtagtgggatatgtgaagctattatatttgtgcacatgagggttcctgaagtcaacatcaaaatcaacaaatgtcatgagtactgtttagctctggtcactacaccttccctaatacagttaggccagattcttgttgattattatttttctagcttttctagctttagggaattaactctggaaagttctgtgattaatagttcatttctgtctgcaggttggctgtggtgtgggaaacacagtctttccaattttacaaacgaacaatgacccaggactctttgtttattgctgtgatttttcttccacagctatagaactggtccagacaaattcagaatatgatccttctcggtgttttgcctttgttcacgacctgtgtgatgaagagaagagttacccagtgcccaagggcagtcttgatattatcattctcatatttgttctttcagcaattgttccagacaagatgcagaaggctatcaacaggctgagcaggcttctgaaacctggggggatggtacttctgcgagattacggccgctatgacatggctcagcttcggtttaaaaaaggtcagtgtctatctggaaatttctacgtgagaggtgatggaaccagagtttacttatgtcatacaagatgtaactggacacgcttttcacccactgctggactggaaaaaccacaaaaacctggtggatcgccgactgcaggtgaaccgaggaaagacaactgacaatgtaccgggtttggattcagtgcaaatactgcaagccccttctgtccagcaccagctgagagggcanctgctgccaacacgatgcaagcccgttgttgtttccgggctttttttaaaaaaaaaaattgtagcactgggcgtggtgcatgcctgtaatcccagccactcaggaggctgaggcggggaggatccattgagcccagcagtccaacctgggcaaaatagtgagagaccctgtatctgaaagtaatgataaaataaaaagaatataaatga

SEQ ID NO: 14238 - DNA, 1336 bp, Homo sapiens
  SIMILAR (420)..(566): 721254mologous to Homo sapiens B23 nucleophosmin (280 AA),accession number X16934,Smith-Waterman Score=178.
  misc_feature (1)...(1336): n = a,t,c or g
tcggaattcccggcccgacgatttcgttggccggctcctaccctgaagggtgcacctgcagtcctcgccgataaagaggcagcagttcggaagccggttcctgagagatccgggcgcgctttttccaccacaatgcctggtaatcactctgccccttcgcccggcctgtcgctgaccctctgtcccgccgcctcggagcactccgaaaagcccctgaccgccggccacgagtcaagctgccctaccccgaggcactctccaaggggagagaaactcctaggccagcgactcaccctgcccgcagccaggacgtgaggcccctaaagttgcccgtttgattttctcagggacaatgtggaagtggtcggaagaggnaagccgcggcggcggacgaagaaaagtccaggagaacaagtattccagcgggttgttgccaggagaaacaagtttgattatgagatcaatgccccacaaatactgggaatgacttctacaaaattccacgaaaaatggggttttttcaaggatagacattggctttttaccgaattccctgagctggcacctagccaaaatcacgtgcagtttgaaggattggttcttggagcaacaagagtgaagtatgtgaatgtagaaacaatgaggatggacctggtttaataatggaagaacagcacaagtgttcttcgaagagccttgaacataaaacacagacacctccatgtggaggagaatgtaactcagaaaattagtgacctgggaaatttgtgctgatgagtttcctggatcctcagccacctacccgaatactggaggttggctgtggtgtgggaaacacagtctttccaatttttacaaaccgaacaatgacccaggactctttggtttattgctgtgatttttcttccacagctataggaactggtccagacaaattcagaatatgatccttcttcggtgttttgcctttgttcaaggacctgtgtgatgaagagaatcagttacccagtgcccaagggcagtcttggatattatcattctcatatttgttctttcagcaattgttccagacaagatgcagaaggctatcaacaggctgagcaggcttctgaaacctggcgggatgatgcttctgcgagattacggccgctatgacatggctcagcttcggtttaaaaaagaggaactggacacgcttttcaccactgctggactggaaaaagttcagaacctggtggatcgccgactgcaggtgaaccgaggaaagcaactgacaatgtaccgggtttggattcagtgcaaatactgcaagccccttctgtccagcaccagctga

SEQ ID NO: 14239 - DNA, 474 bp, Homo sapiens; identical to SEQ ID NO: 3841
  SIMILAR (270)..(377): 881254mologous to Homo sapiens line-1 reverse transcriptase,accession number U83303,Smith-Waterman Score=160.

SEQ ID NO: 14240 - DNA, 5799 bp, Homo sapiens
  SIMILAR (997)..(1968): 1001254mologous to Homo sapiens PCAF associated factor 65 beta,accession number AF069736,Smith-Waterman Score=1665.
atgactcctgaatcaagggatactacagatttgtctccagggggtacccaggagatggaaggcatcgtgatagtgaaggtggaggaggaagatgaagaagaccattttcaaaaggaaagaaacaaagtagagtcatcgccacaagttctcagtcgctctacaactatgaatgagagagccttattgtcatcgtatttagttgcatatagagtggcaaaagagaaaatggctcacacagcggctgaaaaaattatccttccagcatgtatggacatggtacggacaatttttgatgacaaatcagctgataaactaagaactatacctcttagtgataatacaatatctcgtcgaatctgtacgattgcaaaacatttggaagcaatgcttattacacggctgcagtccggtatagactttgcaatccaactcgatgagagcactgatattgcaagttgtcccacactcttggtttatgtcagatatatcccgctgaaattacgcttaggaggacttcttcaaccagaaaaacccattgttctaaaggttgagtcaagggatgggaccattcagtacaactctcaacagcacataaatctttcagcagcttggctgaagactgctgtgcagggcagggaagctccaggcaaacagcccagcaaacagcagcactcagctaaaaggaagactcacagaacacagttgaagaaggaaagtggcgatggacctcatcccaaatttggcggtggaaacctggcttctcctggctgtcagcctggtgctcctctatctagatacttcacgtacagaggcagtgaactgactgctttctggttgaccaccttgaaaaagatgagtgtgcctggcactgtgcttctcagatatgggacccgtacacatggactttttaagagactgggaattccagggcccacacctctgcctttgttgggaaatgttttgtcctatcgtcagaagttggtgaaaattgaagaggtggctgatgtggctgtatccttcatcctggaggaatgggggcatttggaccagtcccagaagtccctttatagggatgacaggaaggagaactatgggagtattacttccatgggttatgagtccagggacaatatggagctcatagtgaagcagatttctgatgactctgaatcacactgggtggcgccagaacacaccgaaaggagcgttcctcaggatccagactttgcagaagtcagtgaccttaaaggcatggtacaaaggtggcaggtcaaccccactgtggggaaatcaaggcagaatccttcccagaaaagggatctggatgcaatcacagacatcagccctaagcaaagcacacatggcgagagagggcacagatgcagcgattgtggcaaattcttcctccaagcctcaaactttattcagcatcggcgcatccacactggagaaaaaccgtttaagtgcggagaatgtgggaagagctacaatcagcgggtgcacctcacccagcaccagcgcgtccacacaggggagaaaccctacaaatgtcaggtgtgcggaaaggctttccgggtgagttcccacctggttcagcaccacagtgtccacagcggagagaggccctatggctgcaatgagtgtgggaagaacttcggtcgccattcgcatctgatcgaacacctaaaacgccacttcagggagaaatcccagagatgcagtgacaaaagaagtaagaacacaaaattaagtgttaagaagaaaatttcagaatattcagaagcagacatggaactatctggaaaaacccaaagaaatgtttctcaagttcaagattttggagaaggctgtgagtttcaaggcaagctggatagaaagcagggaattcccatgaaagagatactaggacaaccatcttcaaagaggatgaactacagtgaagtcccatatgtccacaaaaaatcctccactggagagagaccacataaatgtaacgagtgtgggaaaagcttcattcagagtgcacatcttattcaacatcaaagaatacacactggggagaaaccattcaggtgtgaggaatgtgggaaaagctacaaccaacgcgtgcacctaactcagcatcagcgcgtccacacaggtgagaagccctacacctgtcccttatgtgggaaagccttcagagtgaggtcccaccttgttcagcatcagagcgtgcacagtggggagagacccttcaagtgtaacgaatgtgggaaaggctttgggaggcgttcccacctggctggacatcttcgactccactcccgagagaaatcccatcagtgtcgtgaatgtggggaaatcttttttcagtacgttagcctaattgaacatcaggtgctccacatgggtcagaaaaatgaaaaaaatggcatctgtgaggaagcatatagttggaacttgacagtgattgaagacaagaagattgagttacaagagcagccttatcagtgtgatatctgtggaaaagcctttggttatagctcagacctcattcagcattacagaactcatacagcagagaagccctatcaatgtgatatatgtagagaaaatgttggccagtgttcccacaccaaacaacatcaaaaaatctactccagcacaaaatcccatcaatgtcatgaatgtggcagaggcttcactctgaagtcacatcttaatcaacatcagagaatccatactgatcgcgactgtggccgaggcaggggcaccagcaaccagtggcgctcagtgaagggcaggctgggtctgttccgccatttgccggaccggggtggccgagccgaggacctggaggagaagcgccctgcgccctcgacatctctgaatagcttccttcaactgccagtgaaagatagcaggcctgatttcattggacgcaactgttttcagccccaattagagggtctctggaaatttgacacagagtgctataaaaagtatggaaaaatgtggggaacgtatgaaggtcaactccctgtgctggccatcacagatcccgacgtgatcagaacagtgctagtgaaagaatgttattctgtcttcacaaatcgaaggatgttccccatcattgcccagtatggagatgtattggtgagaaacttgaggcgggaagcagagaaaggcaagcctgtcaccttgaaagacatctttggggcctacagcatggatgtgattactggcacatcatttggagtgaacatcgactctctcaacaatccacaagacccctttgtggagagcactaagaagttcctaaaatttggtttcttagatccattatttctctcaataatactctttccattccttaccccagtttttgaagcattaaatgtctctctgtttccaaaagataccataaattttttaagtaaatctgtaaacagaatgaagaaaagtcgcctcaacgacaaacaaaagaggccagccgaaggatgtctgcaggtcagggagacaggaccaggtaacccagctgtcactgaagattatatagagtttgagaatgttggaatatttgaaaatgctcccccaaaaaagctgctgatgagttctggaaatgtcaggagattaatctatacggacactgctgaagaaaaagctctgtctgatctggagctcgcagcccagtcaataatcttcatttttgctggctatgaaaccaccagcagtgttctttccttcactttatatgaactggccactcaccctgatgtccagcagaaactgcaaaaggagattgatgcagttttgcccaataaggaacgcagctccgcaccagcaacggaaagctggatggagaatgactttgacgagttgagagaagaaggcttcagacgatcaaactactccgagctaaaggaggaagttcgaacccatggcaaagaagttaaaaaccttgaaaaaagattagacaaatggctaactagaataatcaatgcagagaagtccttaaaggacctgatggagctgaagaccatggcacgagaactacgtgatgaatgcacaagcctcagtagccaattcaatcaactggaagaaagggtatcagtgatggaagatcaaatgaatgaaatgaagaaagaagagaagtttagaagaaaaagaataaaaagaaaggaacaaagcctccaagaaatatgggactatgtgaaaagaccaaatctacgtctgattggtgtacctgaaagtgacggggagaatagaacgaagttggaaaacactctgcaggatattatccaggagaacttccccaatctagcaaggcaggccaacattcaaattcaggaaatacagagaacgccacaaagatactcctcgagaagagcaactccaagacacataattgtcagattcaccaaagttgaaatgaaggaaaaaatgttaagggcagccagagagaaagaaatacaaactaccatcagagaatactataaacacctctatgcaaataaactagaaaatctagaagaaatggataaattcctcgacacatacactctcccaagactaaaccaggaagaagttgaaactctgaatagaccaataacaggttctgaaattgaggcaataattaatagcttaccaaccaaaaaaagtccaggaccagatggattcaccgccgaattctaccagaggtacaaggaggacctggtaccattctttctgaaactattccaatcaatagaaaaagagggaatcctccctaactcattttatgaggccagcatcatcctgataccaaagcctggcagagacacaaccaaaaaagagaattttagaccaatatccctgatgaacagtgatacaaaaatcctcaataaaatactggcaaaccgaatccagcagcacatcaaaaagcttatccaccatgatcaagtgggcttcatccctgggatgcaaggctggttcaacatacgcaaatcaataaacataatccagcatataaacagaaccaacgacaaaacccacatgattatctcaatagatgcagaaaaggcctttaacaaaattcaacagcccttcatgctaaaaactctgaataaattagtgttggaagttctggccagggcaatcaggcaagagaaagaaataaagggtattcaattaggaaaagaggaagtcaaattgtccctgtttgcagatgacatgattgtatatctagaaaaccccatcgtctcagcccaaaatctccttaagctgataaacaacttcagcaaagtatcaggatacaaaatcaatgtgcaaaaatcacaaatattcttatacaccaataacagacaaacagagagccaaatcatgagtgaactcccattcacaattgcttcaaagacaataaaatacctaggaattcaacttacaagggatgtgaaggacctcttcaaggagaattacaaaccactgctcaatgaaataaaagaagatacaaacaaatggaacaacattccatgctcatgggtaggaagaatcaatatcatgaaaatggccatactgcccaaggtaatttatagattcagtgccatcgccatcaagctaccaatgactttcttcacagaactggaaaaaactactttaaagttcatatggaaccaaaaaagagcccgcattgccaagtcaatcctaagccaaaagaacaaagccggaggcatcatgctacctgacttcaaactatactacaaggctacagtaaccaaaacagcatggtactggtaccaaaacagagatattgatcaatggagcagaacagagccctga

SEQ ID NO: 14241 - DNA, 2724 bp, Homo sapiens; identical to SEQ ID NO: 3844
  SIMILAR (586)..(861): 981254mologous to Homo sapiens putative b,b-carotene-9',10'- dioxygenase,accession number AJ290393,Smith-Waterman Score=487.

SEQ ID NO: 14242 - DNA, 3441 bp, Homo sapiens; identical to SEQ ID NO: 3973
  SIMILAR (587)..(958): 591254mologous to Mus musculus cytokeratin,accession number M22832,Smith-Waterman Score=332.

SEQ ID NO: 14243 - DNA, 3309 bp, Homo sapiens; identical to SEQ ID NO: 7855
  SIMILAR (1722)..(1886): 501254mologous to Homo sapiens Human secreted protein, SEQ ID NO: 5210,accession number G01129,Smith-Waterman Score=123.

SEQ ID NO: 14244 - DNA, 2367 bp, Homo sapiens
  SIMILAR (630)..(211): 311254mologous to Plasmodium falciparum merozoite surface antigen 2,accession number U91654,Smith-Waterman Score=127.
atggtaaagggatcaattcaacaagaagagctaactaatctaaatatgtatgcacccaatacaggagcacccagattcataaagcaagtcctgagtgacctacaaagagacttagactcccacacattaataatgggagactttaacacccaactgtcaacattagacagatcaatgagacagaaagtcaacaaggatacccaggaattgaactcagctctgcaccaagcagacctaatagacatctacagaactctccaccccaaatcaacagaatatacattcttttcagcaccacaccacacctattccaaaattgaccacatagttggaagtaaagctctcctcagcaaatgtaaaagaacagaaattataacaaactatatctcagaccacagtgcaatcaaactagaactcaggattaagaatctcactcaaaactgctcaactacatggaaactgaacaacctgctcctgaatgactactgggtacataacgaaatgaaggcagaaataaagatgttctttgaaaccaacgagaacaaagacacaacataccagaatctctgggacacattcaaagtagtgtgtagagggaaatttatagcactaaatgcccacaagagaaagcaggaaagatccaaaactgacaccctaacatcacaattaaaagaactagaaaagcaagagcaaacacattcaaaagctagcagaaggcaagaaataactaaaatcagagcagaactgaaggaaatagagacacaaaaaacccttcaaaaaattaatgaatccaggagctggttttttgaaaggatcaacaaaattgatagaccactagcaagactaataaagaaaaaaagagagaagaatcaaatagatgcaataaaaaatgataaaggggatatcaccactgatcccacagaaatacaatctaccatcagagaatactacaaacacctctacacaaataaactagaaaatctagaagaaatggataaattcctcgacacatacactctcccaagactaaaccaggaagaagttgaatctctgaatagaccaataacaggagctgaaattgtggcaataatcaaaacttaccaaccaaaaagagtccaggaccagatggattcacagctgaattctaccagagaaaaagagggaatcctccctaactcattttatgaggccagcatcatcctgataccaaaacctgacagagacacaaccaaaaaagagaattttagaccaatatccttgatgaacattgatgcaaaaatcctcaataaaatactggcaaaccgaatccagcagcacatcacaaagcttatccaccatgatcaagtgggcttcatccctgggatgcaaggctggttcaatatacgcaaatcaatacgtgtaattcagcatataaacagaaccaaagacaaaaactacatgattatctcaatagatgcagaaaaggcctttgacaaaattaaacaatgcttcatgctaaaaactctcaataaattaggtattgatgggacatatttcaaaataataagagctatctatgacaaacccacagccaatatcattctgaatgggcaaaaactggaagcattccctttgaaaactggcacaagagagggatgccctctctcaccactcctattcaacatagtgttggaagttctggccagggcaattaggcaggagaaggaaataaagggtattcaattaggaaaagaggaagtcaaattgtccctgtttgcagacgacatgattgtatatttagaaaaccccattgtctcagcccaaaatctccttaagctgatcagcaacttcagcaaagtctcaggatacaaaatcaatgtacaaaaatcacaagcattcttatacaccaataacagacaaacagagagccaaatcatgagtgaactcccattcacaattgcttcaaagagaataaaatacctaggaatccaacttacaagggataggaaggacctcttcaaggagaactacaaaccactgctcaaggaaataaaagaggatacaaacaaatggaagaacattccatgttcatgggtagaaaaaatcaatatcgtgaaaatggccatactgcccaaggtaatttacagattcaatgccatccccatcaagctaccaatgactttcttcacagaattggaaaaaactactttaaagttcatctggaaccaaaaaagagcccgcatcaccaagtcaatcctaagccaaaagaacaaagctggaggcatcacactacctgacttcaagctatactacaaggctacagtaaccgaaacagcatgcagagccctcagaattaatgctgcatatctacaactatctgatctttga

SEQ ID NO: 14245 - DNA, 2094 bp, Homo sapiens; identical to SEQ ID NO: 6727
  SIMILAR (502)..(176): 731254mologous to Homo sapiens dJ1174N9.1 (novel protein with IBR domain),accession number AL031602,Smith-Waterman Score=394.

SEQ ID NO: 14246 - DNA, 2337 bp, Homo sapiens; identical to SEQ ID NO: 2287
  SIMILAR (1)..(1392): 851254mologous to Homo sapiens dJ1174N9.1 (novel protein with IBR domain),accession number AL031602,Smith-Waterman Score=2084.

SEQ ID NO: 14247 - DNA, 1989 bp, Homo sapiens; identical to SEQ ID NO: 5631
  SIMILAR (17)..(298): 1001254mologous to Homo sapiens similar to human bromodomain protein BR140(JC2069),accession number D87076,Smith-Waterman Score= 495.

SEQ ID NO: 14248 - DNA, 2559 bp, Homo sapiens
  SIMILAR (1)..(501): 721254mologous to Homo sapiens similar to human bromodomain protein BR140(JC2069),accession number D87076,Smith-Waterman Score= 577.
atggaggaagatctaccaagcaaatgtaaaacaaaaaaggcaggggttgcaatcctagtctctgataaaacagactttaaaccaacaaagatcaaaagagacaaggaaggccattacataatggtaaagggatcaattcaacaagaagagctaactatcctaaatatatatgcacccaatacaggagcacccagattcataaagcaagtcctgagtgacctacaaagagacttagactcctacacaataataatgggagactttaacaccccactgtcaacattagacagatcaatgagacagaaagttaacaagaatacccaggaattgaactcagctctgcaccaagcggatctaatagacatctacagaactctccaccccaaatcaacagaatgtacatttttttcagcaccacaccacatgtattccaaaattgaccacatagttggatgtaaagctctcctcagcaaatttaaaagaacagaaattataacaaactgtctctcagaccacagtgcaatcaaactagaactcaggattaagaaactcactcaaaactgctcaactacatggaaactgaacaacctgctcctgaatgactactgggtacataacgaaatgaaggcagaaataaagatgttctttgaaaccaacgagaacaaagacacaacataccagaatctctgggacacattcaaagcagtgtgtagagggaaatttatagcactaaatgcccacaagagaaagcaggaaagatccaaaattgacaccctaacatcacaattaaaagaactagaaaagcaagagcaaacacattcaaaagctagcagaaggcaagaaataactaaagtcagagcagaactgaaggaaatagagacacaaaaaacccttcaaaaaattaatgaattcaggagctggttttttgaaaggatcaacacaattgatagaccgctagcaagactcataaagaagaaaagagagaagaatcaaatagatgcaataaaaaatgataaaggggatatcaccaccgatcccacagaaacacaaactaccatcagagaatactacaaacacctctacgcaaataaactagaaaatctagaagaaatggataaattcctcgacacatacaccctcccaagactaaaccaggaagaagttgaatctctgaatagaccaataacaggctctggaattgtggcaataatcaatagcttaccaaccaaaaagagtccaggaccagatggattcacagccgaattctaccagaggtacaaagaggaactggtaccattccttctgaaactattccaatcaatagaagaagagggaatcctccctaactcattttatgaggccagcatcatcctgataccaaagctgggcagagacatagccaaaaaagagaattttagaccaatatccttgatgaacattgatgcaaaaatcctcaataaaatactggcacaccgaatccagcagcacatcaaaaagcttatccaccatgatcaagtgggcttcatccctgggatgcaaggctggttcgatatacgcaaatcaataaatgtaatccagcatataaacagaacgaaagacaaaaaccacatgattatctcaatagatgcagaaaaggcctttgacaaaattcaacaacccttcatgctaaaaactctcaataaattagtgttggaagttctggtcagggcaatcaggcaggagaaggaaataaagtgtattcaattaggaaaagaggaagtcaaattgtccctgtttgcagatgacatgattgtatatgtagaaaaccccattgtctcagcccaaaatctccttaagctgataagcaatttcagcaaagtctcaggatacaaaatcaatgtacaaaaatcacaagcattcttatacaccaataacagacaaacagagagccaaatcatgagtgaactcccattcacaattgcttcaaagagtataaaatacctaggaatccaacttacaaggcatgtgaaggacctcttcaaggataactacaaaccagcgctcaatgaaataaaagaggatacaaacaaatggaagaacattccatgctcatggataggaagaatcaatatcgtgaaagaattggaaaaaactactttaaacttcatatggaaccaaaaaagagcccgcatcgccaagtcaatcctaagccaaacgaacaaagctggaggcatcatgctacctgacttcaaactatactacaaggctacagtaacccaaacggcatgcgtttgcaaagctcatctgtctgattatccagttacctcactgaacaagatcttggctaagtcctgcccatctatgacatcacccccttcttcagccactgcgagaaaggcagagagaggtgaggaagttgcagaagaaaagttggaagctagcagaggttggttcctgaggtttatggaaagaagccatttccataacataaaagcacaaggtaaagcagccagtgtcgttgtagaaactgctgcaagttatcaagaagatctagctaagaccactgatgaaggccactaa

SEQ ID NO: 14249 - DNA, 1674 bp, Homo sapiens
  SIMILAR (580)..(1128): 941254mologous to Homo sapiens putative p150,accession number U93572,Smith-Waterman Score=889.
atggcaaaatgcgctgaaaacctgggagtatcatcctatgcttctggggacatccgaggtgcaggaattaaaatcatattcatgaacagatatagaaaagctggggcacactctaaggaaagcaattacaatattaaagagactaaaaactacaaggagaagcagatgaagaaactgagaatgcctgcatgggtcctggataagatggtcacagcttacttcaaggttttccatgatgctgagaggaagccaggatgtttcagtctgaatgttcactgtatcactgacttttttggcaggctgaacagagcattaggacatgcaaaggccttaactaatacagcattatctggtttcaagaaaaatccccctgctgtatttcaggaagcacagaaggaggaaattcaaaccaaaggcaaagaagttgaaaactttgaaaaaaatttagacaaatgtatagctagaataaccaatacagagaagtgcttaaaggagctgatggagctgaaagcaaggctcgagaactacgtgaagaatgcagaagcctctggagctgatgcgatcaactgcaagataggactaaaccaggaagaagttgaatctctgaatagaccaataacaggatctgatattgtggcaataatcaatagcttaccaaccaaaaagagtccaggaccagatggattcacagctgaattctaccagaggtataaggaggaactggtaccattccttctgaaactattccaatcaatagaaaaagagggaatcctccctaactcattttatgaggccagcatcatcctgataccaaagcctggcagagacacaaccaaaaaacagaattttagaccaatatccttgatgaacattgatgcaaaaatcctcaataaaatactggcaaaccgaatccagcagcacatcaaaaagctgatccaccatgatcaagtgggcttcatccctgggatgcaaggctggttcaatatatgcaaatcaataaatgtaatccagcatataaacagaaccaaagacaaaaaccacatgattctctcaatagatatagaaaaggcctttgacaaaattcaacaatgcttcatgctaaaaactctcaataaactagtgttggaagttctagccagggcaattaggcaggagaaggaaataaagggtattcaattaggaaaagaggaagtcaaattgtccctgtttgcagacgacatgattgtatatctagaaaaccccattgtcccagcccaaaatctccttcagctgataagcaacttcagcaaagtctcaggatacaaaatcaatgtacaaaaatcacaagcattcttatacaccaacaacagacaaacagagagccaaatcatgagtgaactcccattcacaattgcttcaaagagaataaaatacctaggaatccaacttacaagggatgtgaaggacctcttcaaggaggactacaaaccactgctcagtaaaataaaagaggatacaaacaaatggaagaacattacatgctcatgggtaggaagaatcaatatcgtgaaaatggccatactgcccaagtatgcctgctcctcctttacttctcctatgattgcaagcttcctgaagccttcaccagaagcaggtgctgatttcatgtttcttgaacagcctgcagaaccatga

SEQ ID NO: 14250 - DNA, 1848 bp, Homo sapiens
  SIMILAR (2217)..(2816): 991254mologous to Homo sapiens similar to human bromodomain protein BR140(JC2069),accession number D87076,Smith-Waterman Score= 1071.
atggataaattcctggacacatacacccacccaagactaaaccaggaggaagttgaatccctgaatagaccaataacagactctgaaattgaggcaataattaatagcctaccaaccagaaaaagtccaggaccagacggattcacagccgaattctaccagaggtacaagcaggaactggtaccattccttcagaaaatattccaatcaatagaaaaagagggaatcctccctaactcattttatgaggccagcatcatcctgataccaaagcctggcagagacacaacaaaaaaagagaattttagaccaatatccctgatgaacatcgatgtaaaaattctcaataaaatactggcaaacagaatccagcagcaaatcaaaaagcttatccaccacgatcaagtgggcttcatcccagggatgcaaggctggttcaacatacacaaatcaataaatgtaatccagcatataaacagaaccaaagacaaaaaccacatgattatctcaatagatgcagaaaaggcctttgacaaaattcaacagcccttcatgctaaaatctctcaataaattagtgttggaagttctggccagggcaatcaggcaggaaaaagaaatgaagggtattcagttaggaaaagaggaagtcaaactgtccctgtttgcagatgatatgattgtatatttagaaaaccccatcatctcagcccaagatctccttaagctgataagcaacttcagcaaagtctcaggatacgaaattaatgtgcaaaaatcacaagcatccttatacaccaataacagacaaacagagagccaaatcatgagtgaactcccattcacaattgcttcaaagagaataaaatacctaggaatccaacttacaagagatgtgaaggacctcttcaaggagaactacaaaccactgctcaacgaaataaaagaggacacaaacaaatggaagaacattccatgctcatgggtaggaagaatcaatattgtgaaaatggccatactgcccaaggtaatttatagattcaatgccatcctcatcaagttaccaatgactttcttcacagaactgaaaacaactactttaaagttcatatggaaccaaaaaagagcctgcattgtcaagacaatcctaagccaaaagaacaaagctggaggcatcacgctacctgacttcaaactatactacaaagctacagtaatcaaaacagcatgcaacatgaatggactggatgctgttatccgaagtgaattgatgtgggaaggtaaaagcaaataccacatgttctcacttataagtgggaggctgcgtcagagactgcaacagtcagcacacttcctgtctgatcaggctccctccctcaagtcctctgcgatggctctggcgatgcttcgggactggtgcaggaggatgggtgtgaacgcagagcgctctctgctcatcctggatatccctgacgactgcgaggaacatgagttccaggaggccgtgcgggctgccctgtcgcccctgggcagggcctaccaggaactgagacccttttcagggagggagcagccaggctgcaaggaagagtcctttgagagctggatggagcacgccaaggatatgctgcagctgtggtaccatgcgtcggaaagggagaggaagagatggctgctggagagcttgggtggcccagccctggacgttgtgagcggcctcctagaggaagatcccaacttggcggcactggactgccaggtgctgctggactgctgggcggcggtgctggggcaggcgtttggaaaccgggaccctcgaatgacttccaggctgaagttcctgacctga

SEQ ID NO: 14251 - DNA, 2055 bp, Homo sapiens; identical to SEQ ID NO: 6261
  SIMILAR (194)..(433): 301254mologous to Drosophila melanogaster ovo protein,accession number X59772,Smith-Waterman Score=104.

SEQ ID NO: 14252 - DNA, 1554 bp, Homo sapiens; identical to SEQ ID NO: 8663
  SIMILAR (1)..(1386): 791254mologous to Homo sapiens putative p150,accession number U93565,Smith-Waterman Score=1815.

SEQ ID NO: 14253 - DNA, 2562 bp, Homo sapiens; identical to SEQ ID NO: 2291
  SIMILAR (1671)..(2030): 601254mologous to Mus musculus Pro-Pol-dUTPase polyprotein,accession number Y12713,Smith-Waterman Score=378.

SEQ ID NO: 14254 - DNA, 1873 bp, Homo sapiens
  SIMILAR (961)..(1647): 951254mologous to Homo sapiens putative p150,accession number U93572,Smith-Waterman Score=1099.
atgaaggcagaaataaagatgttctttgaaaccaacgagaacaaagatacaacataccagaatctctgggacacattcaaagcagtgtgtagagggaaatttatagcactaaatgcccacaagagaaagcaggaaagatctaaaattgacaccctaacatcacaattaaaagaactagaaaagcaagagcaaacacattcaaaagctagcagaaggcaagaaataactaaaatcagagcagaactgaaggaaatagagacacaaaaaacctttcaaaaagttaatgaatccagcagctggttttttgaaaggatcaacaaaattgatagaccgctagcaagactaataaagaaaaaaagagagaagaatcaaatagatgcaataaaaaatgataaagggtatatcaccaccgatcccacagaaatacacactaccatcagagaatactacaaacacctctatgcaaataaactagaaaatctagaagaaatggataaattcgtcggcacatacactctcccaagactaaaccaggaagaagttgaatctctgaatagaccaataacaggctctgaaattgtggcaataatcaatagcttaccaaccaaaaagagtccaggaccagatggattcacagccgaattctaccagaggtacaaggaggaactggcgggcagagacacaaccaaaaaagagaattttagaccaatatccttgatgaacattgatgcaaaaatcctcaataaaatactggcaaaccgaatccagcagcacatcaaaaagcttatccaccatgatcaagtgggcttcatccctgggatgcaaggctggttcaatatatgcaaatcaataaatgtaatccagcatataaacagaaccaaagacaaaaaccacatgattatctcaatagatgcagaaaaggcctttgacaaaattcaacaacctttcatgctaaaaactctcaataaattagtgttggaagttctggccagggcaattagtcaggagaaggaaataaagggtattcaattaggaaaagaggaagtcaaattgtccctgtttgcagacgacatgattgtatatctagaaaaccccattgtctcagcccaaaatctccttaagctgataagcaacttcagcaaagtctcaggatacaaaatcaatgtacaaaaatcgcaagcattcttatacaccaataacagacaaacagagagccaaatcatgagtgaactcccattcacaattgcttcaaagagaataaaatacctaggaatccaacttacaagggatgtgaaggacctcttcaaggagaactacaaactactgagcaaggaaataaaagaggatacaaacaaatggaagaatattccatgctcatgggtaggaagaatcaatatcgtgaaaatggccatactgcccaaggtaatttacagattcaatgccatccccatcaagctaccaatgactttcttcacagaattggaaaaagctactttaaagttcatatggaaccaaaaaagagcccgcattgccaagtcaatcctaagccaaaagaacaaagctggaggcatcacactacctgacttcgaactatactacaagactacagtaaccaaaacagcatggtactcataccaaaacagagataatagatcaatggaacagaacagagccctcagaaataacgccgcatatctacaactatctgatctttgacaaacctgagaaaaacaagcaatggggaaaggattccctatttaataaatggtgctgggaaaactggctagccatatgtagaaagctgaaactggatcccttccttacaccttatacaaaaatcaattcaagatggattaaagacttaaaacgttag

SEQ ID NO: 14255 - DNA, 3413 bp, Homo sapiens
  SIMILAR (2254)..(2388): 801254mologous to Homo sapiens Human secreted protein sequence SEQ ID NO:103,accession number Y87064,Smith-Waterman Score =183.
atgggagactttaacaccccactgtcaacattagacagatcaacgagacagaaagtcaacaaggatacccaggaattgaactcagctctgcaccaagcagacctaatagacatctacagaactctccaccccaaatcaacagaatacacatttttttcagcaccacaccacacctattccaaaattgaccacatacacggaagtaaagctctcctcagcaaatgtaaaagaacagagattataacaaactatctctcagaccacagtgcaatcaaactagaactcaggattaagaatctcactcaaaacctctcaactacatggaaactgaacaacctgctcctgaatgactactggatacataacgaaatgaaggcagaaataaagatgttctttgaaaccgacgagaacaaagacataacataccagaatctctgggatgcattcaaagcagtgtgtagagggaaatttatagcactaaatgcccacaagagaaagcaggaaagatccaaaattgacaccctaacatcacaattaaaagaactagaaaagcaagagcaaacacattcaaaagctagcagaaggcaagaaataactaaaatcagagcagaactgaaggaaatagagacacaaaaaacccttcaaaaaattaatgaatccaggagctggttttttgaaaggatcaacaaaattgatagactgctagcaagactaataaagaaaaaaagacagaagaatcaaatagacacaataaaaaatgataaaggggatatcaccactgatcccacagaaatacaaactaccatcagagaatactacaaacacctccatgcaaataaactagaaaatctagaagaaatggataaattcctcgacacatacactctcccaagactaaaccaggaagaagttggatctctgaatagaccaataacaggagctgaaattatggcaataatcaatagtttaccaaccaaaaagagtccaggaccagatggattcacagccgaattctaccagaggtacaaggaggaactggtaccattccttctgaaactattccaatcaatagaaaaagagggaatcctccctaactcatttcatgaggccagcatcattctgataccaaagctgggcagagacacaaccaaaaaagagaattttagaccaatatccttgatgaacattgatgcaaaaatcctcaataaaatactggcaaaccggaatccagcagcacatcaaaaagcttatccaccatgatcaagtgggcttcatccctgggatgcaaggctgattcaacatacacaaatcaataaattgtaatccagcatataaacagagccaaagacaaaaaccacatgattatctcaatagatgcagaaaaagcctttgacaaaattcaacaacgcttcaggctaaaaactctcaataaattaggtattgatgggacgtatttcaaaataataagagctatctatgacaaacccacagccaatatcatactgaatgggcaaaaactgaaagcattccctttgaaaactggcacaaggacagggatgccctctctcaccactcctattcaacataggtgtttgggaagttctggcccaggcaattaggcaggagaaggaaataaagggtattcaattaggaaaagaggaagtcaaattgtccctgtttgcagatgacatgattgtatatctagaaaaccccatggtctcagcccaaaatctccttaagctgataagcaacttcagcaaagtctcaggatacaaaatcaatgcacaaaaatcacaagcattcttatacaccaataacaaacaaacagagagccaaatcatgagtgaactcccattcacaattgcttcaaagagaataaaatacctaggaatccaacttacaagggacatgaaggacctcttcaaggagaactacaaaccactgctcaatgaaataaaagaggatacaaacaaatggaagaatattccatgctcatgggtaggaggaagaatcaatctcgtgaaaatggccatactgcccaaggtaatttacagattcaatgccatccccatcaagctaccaatgactttcttcacagaattggaaaaaaactactttaaagttcatatggaaccaaaaaagagctcgcatcaccaagtcaatcctaagccaaaagaacaaagctggaggcatgacactacctgacttcaaactatactacaaggctacagtaaccaaaacagcatggtactggtaccaaaacagagatatagatcaatggaacagaacagagccctcagaaataatgccacatatctacaactatctgatctttgacaaacctgaacaaaaacaagaaatggggaaaggattccctatttaataaatggtgctgggaaaactggctagccatatgtagaaagctgaaactggatcccttccttacaccttacacaaaaatcaattcaaaatggattaaagacttaaacgttagacctaaaaccataaaaaccctagaagaaaacctagacattaccattcaggacataggcatgggcaaggacttcatgtctaaaacaccaaaagcaatggcaacaaaagccaaaattgacaaatgggaactaattaaactaaagagcttctgcacagcaaaagaaactaccatcagagtgaacaggcaacctacaaaatgggagaaaattttcgcaacctgctcatctgacaaagggctaatatccagaatctacaatgaactcaaacaaatttacaagaaaaaaacaaacaaccccatcaaaaagtgggtgaaggacatgaacagacacttctcaaaagaagacatttatgcagccaaaaaacacatgaaaaaatgctcaccatcactggccatcagagaaatgcaaatcaaaaccacaatgagataccatctcacaccagttagaatggcaatcattaaaaagtcaggaaacaacaggtgctggagaggacgtggagaaataggaacagttttacactgttggtgggaccgtaaactagttcaaccattgtggaagtcagtgtggcaattcctgagggatctagaactagaaataccatttgacccagccatcccattactgggtatatacccaaaggactataaatcatgctgctataaagacacatgcacacgtatgtttattgcggcactattcacaatagcaaagacttggaaccaacccaaatgtccaacaatgatagactggattaagaaaatgtggcacatatacaccatggaatactatgcagccataaaaaatgatgagttcatatcctttgtagggacatggatgaaattggaaaccatcattctcagtaaactatcgcaagaacaaaaaaccaaacaccgcatattctcactcataggtgggaactga

SEQ ID NO: 14256 - DNA, 3752 bp, Homo sapiens
  SIMILAR (99)..(224): 801254mologous to Canis familiaris Rab22a protein,accession number Z22820,Smith-Waterman Score=172.
atgcacattgttgtagaaacagctctgtcagcttcatggcagaacaaggccaagcccccagctagggttctgcttcaggtggtccccaatgtgtggttccttgtggctgttgtgtgggaactgtatccatctttggatctcatggatcgttccatagaatgcagttcctcaccagcaacggaacaaagctggacagagaatgactatgacaagctgagagaagaaggcttcagacgatcaaattactctgagctacaggaggacattcaaaccaaaggcaaagatgttgaaaactttgaaaaaaatttagaagaatgtataactagaataactaatacacagaagtgcttaaaggagctgatggagctgaaaaccaaggctcgagaactacgtgaagaatgcagaagcctcaggagccgatgcgatcaactggaagaaagggtatcagtgatggaagatgaaatgaatgaaatgaagcaagaagggaagtttagagaaaaaagaataaaaagaaatgagcaaagcctccaagaaatatgggactatgtgaaaagaccaaatctacgtctgattggtgtacctgaaagtgatggggagaatggaaccaagttgaaaaacactctgcaggatattatccaggagaacttccccaatctagcaaggcaggccaaagttcagattcaggaaatacagagaatgccacaaagatattccttgacaagagcaactccaagacacataattgtcagattcaccaaagttgaaatgaaggaaaaaatgttaagggcagccagagagaaaggagcacccagattcataaagcaagtcctgagtgacctacaaagagacttagactcccacacattaataatgggagactttaacaccccactgtcaacattagacagatcaacgagacagaaagtcaacaaggatacccaggaattgaactcagctctgcaccaagtggacctaatagacatctacagaactctccaccccaaatcaacagaatacacatttttttcagcaccacaccacacgtattccaaaattgaccacatacttggaagtaaagctctcctcagcaaatgtaaaagaacagaaattataacaaactatctctcagaccacagtgcaatcaaactagaactcaggattaagaatctcactcaaaaccgctcaactacatggaaactgaacaacctgctcctgaatgactactgggtacataacgaaatgaagctagaaataaagatgttctttgaaaccaacgagaacaaagacacaacataccagaatctctgggacgcattcaaagcagtgtatagagggaaatttatagcactaaatgcccacaagagaaagcaggaaagatccaaaattgacaccctaacatcacaattaaaagaactagaaaagcaagagcaaacacattcaaaagctagcagaaggcaagaaataactaaaatcagagcagaactgaaggaaatagagacacaaaaaacccttcaaaaaattaatgaatccaggagctggttttttgaaaggatcaacaaaattgatagatagatcactagcaagagtaataaagaagaaaggagagaagaatcaaatagacacaataaaaaatgataaaggggatatcaccaccgatcccacagaaatacaaactaccatcagagaatcctataaacacctctatgcaaataaactagaaaatctagaagaaatggataaattcctcgacacatacaccctcccaagactaaaccaggaagaagttgaatctctgaatagaccaataacaggctctgaaattgtggcaatagtcaatagctttaccaaaccaaaaagagtcccaggaccagatggattccacagccgaatttctaccagaggtacaaggaggagcttgtacccattccttctgaaactattccaattaatagaaaaagagggaatcctccctaactcattttatgaggccagcatcatcctgataccaaagcctggcagagacacaacaacaacaaaaaaagaattttagaccaatatccctgatgaacatcgatgcaaaaatcctcaataaaatactagcaaaccgaatccagcagcacatccaaaagcttatccaccatgatcaagagggcttcatccctgggatgcaaggctggttcaacatacacaaatcaataaacgtaatccagcatataaacagaaccaaagacaaaaaccacatgattatctcagtagatgcagaaaaggcctttgacaaagttcaacaacacttcatgctaaaaactctcaataaattagatattgatgggttggaagttctggccagggcaatcaggcaggagaaggaaataaagggcattcaatcaggaaaagaggaagtcaaattgtccctgtttgcagatgacatgattgcatatctagaaaaccccatcgtctcagcccaaaatctccttaagctgataagcaacttcaacaaagtctcaggatacaaaatcaatgtgcaaaaatcaccaagcattcctatacaccaacaacagacaaacagagagccaaatcatgagtgaactcccagttcacaattgcttcaaagagaataaaatacctaggaatctaaacttacaaggggtgtgaaggacctcttcagggagaactacaaactactcactgatcaaggaaataagagaggacacaaacaaatggaaaaacattccatgctcatggataggaagaatgaatatcatgaaaatggccatacttgcccaaggtaaatttatagattcaatgccatccccatcaagctaccaatgactttcttcataggattgggaaaaatcttacttttaagttcatatggaaccaaaaaaagagcccacattgccaagacaatcctaagacaaaagaacaaagctggaggcatcacactacctgacttcaaactatactacaaggctacagtagccaaaacagcatggtactggtaccaaaacagagatatagaccaatggaacagaacagagccctcagaaataatgccgcatatctacaactatctgatctttgacaaacctgagaaaaacaagcaatggggaaaggattccctatttaataaatggtgctgggaaaactggctagccatatgtagaaagctgaaactggatcccttccttacaccttatagaaaaatcaattcaagatggattaaagatttaaacgttagacctaaaaccataaaaaccctagaagaaaacctaggcattaccattcaggacataggcgtgggcaaggacttcatgtccaaaacaccaaaagcaatggcaaccaaagccaaaattgacaaatgggatctaattaaactaaagagcttctgcacagcaaaagaaactaccatcagagtgaacaggcaacctacaaaatgggagaacattttcgcaacctactcatctgacaaagggctaatatccagaatctacaatgaactcaaacaaatttacaagaaaaaaacaaacaaccccatcaaaaagtgggtgaaggacatgaacagacacttctcaaaagaagacatttatgcagccaaaaaatacatgaaaaaatgctcatcatcactggccatcagagaaatgcaaatcaaaaccactatgagatatcatctcacaccagttagaatggcaatcattaaaaagtcaggaaacaacaggtgctggagaggatgtggagaaataggaacactttga

SEQ ID NO: 14257 - DNA, 1690 bp, Homo sapiens
  SIMILAR (1240)..(1509): 871254mologous to Homo sapiens TAR DNA-binding protein- 43,accession number U23731,Smith-Waterman Score=403.
  misc_feature (1)...(1690): n = a,t,c or g
caattccttagtagccacgtcacaaaaatgggtgaaattaatttttaacgtatgacacnnnnnnnnnnnnnnnnnnnnnnnnnnnnnnnnnnnnncacatctaataaaagtgtgcttttttcctagtcttctaaaactggtgtgtgttttaatatttcagtctagattagctgtatttcacatgcatagcagccacatgtggccaatggctacttggctggacagcacagacctagagtggaggtcacacccgcagatttcagccccacccccccaagaactaagatctgcccgaatgtacttggtgaaatcaaacaccgccagttatttttaagcactccaaacactaagaaccgctgagtaagcggacgccttgctgggtgcggtcgagtgctagaaagcaaaagttgaggttttctgttcacccaagttcaggtaccggctcaggacctcggttacctcccccatcctccggaaagaagagagtacttcagccagagagaggagagaacaattagttaaatctcgaggagagggcgtttcggcacaaatcttcagagcaccttccccatttaaaagtacatttcaggcacagttcatgcggaatcaagacaaaaagcctactccacgtttctcctccaacaaccttaatcttcccgtatccgcccctctggggtaacccatcaaactgagctcggccaccgtgctcggtccatagtgggccgtatccccaaggcctagcgtcgataattgcacacgggagtccgggaaacgttcgcggagtacacgtttgaattaatgactccgaaggggggatcagccgaccttccaccgcatcccacaaagaaactccgcgcccgccgacaccggcccgacacgccgaccttgccgctacccgtccgcgttcactcacaacttccccgtccaggcgccgggccgcgagcgcttccagggcagggcctagcgttgggggcttgggtctccggcccagcgggagagccccaagggcggaggtcgcgctccccgctggtctgagtcccgcgggcctggctgggccaccgccgagcggacgaagcacaggcgcccttccgcccgcagcggccccgaccacttccgggccacggcctcgacacctcctaatgcgcccgccccgggccacactctttcttctcggagcccgcaccgcgctgccagaccaccgccgcactgcggggctgaggagtggaccggcttcacgatgcgtccttcctggaggatttctcaatcgttcattgtgaaggattcctagcctctcctcagtggacagccaagagcctcctctcagctgggagccttcctcccattcactgcagtctccctgaactgcttccagagcccagcttctctggccaatggccaaggactcaaacaggcactgttctttcagcacagaaacacagaaaccaagtgccttggtacaaacagaaggctgcattctttggctaggatctggagacagggtgaaacctggcaaaaagatggaatgtgttttatcccagtacctgttttgatgtggctgactcttgttggtggtaacactgggcattttgacacagatggagggttctctgtctctcctctcaattgtcatccctggttctccatcacgtggtccaggtgtgcaaatgatagggctccaatagctctccat

SEQ ID NO: 14258 - DNA, 1854 bp, Homo sapiens
  SIMILAR (34)..(540): 621254mologous to Homo sapiens HSPC004,accession number AF070660,Smith-Waterman Score=429.
atgatagctcgtactaggtacaaaagacaaccagttcgtaaaggaacagatctgaagcctccagaagataacactgttaggatatttgatgggctgaatagatgtagaagacatttagacaactggcaaggttctaggcattacatttataacaagttcatagaagagcatattgttaaagtgctggctggtgttcctaagaagattgcattagagaaaatatacttattagataagctttgttctgacatgagctatagtgctgttagccatgagttcagtgttaatgaatgcatgcaatatctttatacagaaacatatataaaacaagtaagctggtcctttgatttgggtgtctgtattcttcggatcctgatgggtaaatcttcagaaccaattttcttcagttttaaatgtgtaaagtctttcagggcaaggaatcatggctccctaaaggggaacagagagaatgtgcctttgaaaaacaacaaggatgagaggggagattctttcaacctgggaaagagagagacctctgctagagccccaggacgtgggagaccggggtccttggcaccaccgagagtttcagcccggaaggagaattaccttccgtgttccggagccctccctgacagcagaaatggaactggtagaaggagttgcaggacagtcacagaagcagcactcagacatatgaaccatggctcaagtgctacaaagtttgcagcggtattgagaggcacttctaatggaataagggctggaggaaaaaaggccaccaatattggaaaggtctcagaggtccaccagaagccagatgaaagtcccggtgaattttatgagacgttctgtgaggcttactggctttacacaccatttgacccagaggctgcaggaaagtcagtaaacatctatactgactcaaggtatgcttttgccactttgcatgcccatggatccatatataaggaaagaggatcattaacaactgaaggaaaggaaatcaaaaataaaaaggaaatagagcacctcttagatgctgtatgggctccaaaagaagtagcagtcatccattgtaaagggcatcaaacagaggagggctgttccggttttctgggattctcttcaggccctattcatctggttcacttccgcacccggagatgtcactcaaggaggttggagaacagcaaagatgagtgtgtgctccttcttcttggatctctgaccttgaggggcaccaacctgatgccagtaggaatgctcctgtttagagtgtctgacagcccctgttggagggtctcacttgggtggcacagggagcatgacccatttaatgaacattttggctgtcccttgatggaggaggtgtgcttcactgggggtaaacccactggcctgggatgcctggattcctcagaactagaaggacgaaagactaagtctgctgtcctagaggattccaagttcaatatcaaggtgctggcaaatccagtgtctggaccgcagaatgctgaagatttcttccctggagagagtaaggcacaggatcactggactcacaggtacacacacaatgaagatgctagggatacctcactgcaaacagggagtaggggacacctcagtgcaaaaaactttagcatgttgggtgctgaggtcctagaggttgattcccctgttggctctcaagacaatggcaaccctgtcattactatccagacaagacgttacaagaatcttttctgcgaaatcatattagatcagcctaatttaaaggacatcagagaaaactcccacccacatgctctgagccatcaatcaactgtactagccccaattcttatatga

SEQ ID NO: 14259 - DNA, 2416 bp, Homo sapiens
  SIMILAR (578)..(949): 741254mologous to Homo sapiens cytokeratin 18,accession number X12881,Smith-Waterman Score=413.
aaagtgtgtaaaagagatggtctcgggagagaccaaggcgggcacctctggcaaagcttagacagaaggctgccccggctgcctccggagactcagactcagaaggaagcacccctcaggcaacaccacgcagagaggagccagagcccttgactgaaaagccaagggaggaactccagggtgatgaggtcggccgccttaggtcggtccgtgcccaagcaatgcagatgccactctgagaaacatggggaaataaacgctggagagaaaaaggccaccaatatcggaaaggtctcagaggttcgccagaagccagataaaagtcccggtgaattttatgagaggctgtccagcttatccaggtggctactaaggtgtttgtaaatcagaaggaggaggccaagagaaaagctagatgcagagctaaggaaaaggcagacttgctggcggtggccttagttggaagagaaactggttttgtgagaggatgtggtcgtggttgcggtcatgatagaggacaaactaggtaaaaccaggaagctaagccaggacaagagggccaacttaggcttaagcatgcccatggagccatatataaggaaagaggattgttaactactgaaggaaaggaaatcaaaaataaaaaggaaatagagcagctcttagaagctgtatgggctccaaaagaagtagcagtcatccattgcaaagggcatcaaacaggaggacatgacaaggccagagaaaacagaaaggcagaaagagaagccaaaagagctgcaatgacagcgataactaagaaggaagaggaaacccttaccatgcccttattggagcttcctcttacagaaccccctaactactcctctaatgaaaaggcttggtttgagcaggaaagtggaagttaccagaaaggaagttggtggaagttctcaaatgggaggctcgccagctatcccagaagcaatagcccctggttcataaaacagtttcatcaaggaacacatatgggaaaaactgcattagagactcttgtaggatggcatttctattgctgagcctaactgccatcactcgagccatgtgaaaacctgcatgtgggctttactgagctgcctcgaaccggaggctaccggtgcatgctagtgtttgtctgcactttctcagggtgggttgaggcatttcccaccaggacaaagaaagctcgggaagtaaccagaatcttactaaaggacattattcctagatttcgactgcctctaactttaggatcagacaatggcccagcatttgtggcagaaatagtacaacagctaacacagaggttaaaaatcaaatgaaaactgcatacagcttatcacccatagagttctatgacccagagttcttgccctatgacttcttatttgaagtccaaatttggtgaacccctaatgccatcatatacaaaccccacagaaactggggtcagtaaacttgtaaacaaaacgcaagtattcacttacgcgcataaagggcccgtctccatatattttgatgcctgccaagctgcacatctcagtaaactaaataatatttggaccatctgtaaaaatctaggacaagaaagagtcagccagcagagccaccaaggccataacagaagaatccaaaaaggagtgccctgattgtgataatcagtggaccacacatgaatttaatcagcacctatacactggaagggctgctctgtttgccagccaagaggagaagatagggtacacaactggaacatgctacccactcaatctgacaatactaaagccaaatatgactttctggactaaagggcataaaggattactaacctttgatcaggcaggagctctcctaggacttggtattcctctggtcatcacaaagaaaacccaaaggactcaagttcaacttagcccaatacaacagttcaggttttataaatctttcaatgaacactttaattctgaagtatcaaaaattcaaattcctcctatatcaactgaaaatctgtttgtccagctagccaaaagtattgctaacaatttaggagttacttcctgttatgtatgtggaggtgctaatatgagagatcaatggccctgggaagccagagaattgatgctgcaagacaattttaccttgcctgaatttgttacaaaattcaatgcaaatccaagtgtttggctattaaggaaccccatcattggaaaatactgtattgcctgttggggcaagtcctttcagaaccagataggggaaacaacttgcctaggtcaacaatattttgaagaatctgagaacagaacacaatggagaagctttatagatgattcctctgtgtcactttaatccctttttgcagttcccaacactaaatcaatcatggtaccaattagaa

SEQ ID NO: 14260 - DNA, 1071 bp, Homo sapiens
  SIMILAR (91)..(2): 661254mologous to Medicago sativa proline rich protein,accession number L36120,Smith-Waterman Score=127.
  misc_feature (1)...(1071): n = a,t,c or g
atgtggcccaatgtcacccaaattccctggacagcatctccagcagccagttttgtatcagctgtatttggacagtgtccccactggtggctctcggcatcttgcaagcagacctttctcagatccatttgtctaatttccacttgtgaaaagcaaatggaattgattttctgcaatgatactaaatacaacgctgttataatgttcagaacagttatgccctacaactgttcttctcaaacaggggactcctcagatccccagggtcacaaaccagtgtgccccaggaggacgcaacgtttccggaccaacgggcacatcttcttggggctcaatttgaatagatggtctttcctcatgcgtcacctcaacaaggtcatccttgaccacccatttgcaactgcaactccaccccctcacaaactccctcataaaattccacgacccatttggtcactgacctctcggggaacatcaggttgttccctgaaccaaggatccaggcctgcttcagcagaccctggggccacacaagctgccacgaacccaggacccaggcccatccctagggacccagtctccaggcaggaccagtgccagcggactaaggatctaggcctgcccccagtgaacccagggtctaagcaccnaggctggccttcatggactcaggatccaggactgcccgtacaggcccaggtaccaggatggtccccacaaactaaagatcctacctctaccactacagactcaggctttaagcacaccccaatgccaggccagccactgcgaactcaggctcctaccccaaccctattgatccagttattgcccctgacccgtgagaacaggattgctcaagcagccatccaaggactacctgaatcgggatcatccgagagctcattcaatactagatttctgagtcaaacagaatcagaattactggacccagtcagacacttgcggggaccaaaaggagaatcacccggaaacaaagccccaaaaatgcacagacacagcggtattaaaagggtgatgcgggaaaacgaccgccgattacttgaatga

SEQ ID NO: 14261 - DNA, 414 bp, Homo sapiens
  SIMILAR (261)..(377): 841254mologous to Branchiostoma californiense proprotein convertase aPC6C isoform,accession number AF184617,Smith-Waterman Score=158.
  misc_feature (1)...(414): n = a,t,c or g
agagctctgactctttgatagaggcttccagcaccccatctgtctgcccctaaaaaacgaaagagagccactctccactgtctactatatgttaggtactaggatttttctcattatagcacttcattcctttcttgggggggactggannnnnnnnnnnnnnnnnnnnnnnnnnnnnnnnnnnnnnnnnnnnnnnnnnnnnnnnnnnnnnnnnnnnnnnnnnnnnnnnnnnnnnnnnnnnnnnnnnnnnnnnnnnnnnncgggaggtttctgtcctccctgagctcgccttaggacacctgcgttaccgtttgacaggtgtaccgccccagtcaaactccccacctggcactgtccccggagcgggtcgcgcaagaccgaacgcgcggccgggcgcttggcgccagaagcgag

SEQ ID NO: 14262 - DNA, 376 bp, Homo sapiens
  SIMILAR (367)..(519): 1001254mologous to Homo sapiens Amino acid sequence of a human secreted peptide,accession number Y12917,Smith-Waterman Score =265.
gaactttttttttactgcagaaaacatttttataactttagaacttttctaaaatactactttgtcagctgaacaatatagaaaagtgcagaggcaagtgcctttccagaaccgcgtggtgacttagaagcggggcttgcgcttgcggccggtgtactgggtcaaaaagcgacgtcgctatgaacgcttggccgccacaagccagttatccctgtggtaacttttctgacacctcctgcttaaaacccaaaaggtcagaaggatcgtgaggccccgctttcacggtctgtattcgtactgaaaatcaagatcaagcgagcttttgcccttctgctccacgggaggtttctgctcgtgccgaattcctcagcgcgga

SEQ ID NO: 14263 - DNA, 1656 bp, Homo sapiens
  SIMILAR (671)..(883): 951254mologous to Homo sapiens Amino acid sequence of a human secreted peptide,accession number Y12917,Smith-Waterman Score=368.
  misc_feature (1)...(1656): n = a,t,c or g
ggccacagcaacgcggcatccacaggtctcgagtgccgaagtccttcaggattggggcaacgtcccctctagagcatgggccgaggccggggtggggtttggctccagccaaccgcacacagcctacgcgccgttgctgagcaacgcttgcccgctgaatcccgaggttttagctctagtcaagtgccaaaagagcccaatgtgtgttcgggtttcaattctccagtcagcgtcagagttggaggcctcaattttaaagaaggcaaagccatggtcatcgttgcgggtaaggaacaacgcagaagcctcttccacccccaaatttcgacctgcttctgggtcggggtttcgtacgtagcagagcagctccctcgctgcgatctattgaaagtcagccctcgacacaagggtttgtctacgaatggtttagcgccaggttcccccacgaacgtgcggtgcgtgacgggcgagggggcggcgcgcctttccggccgcgccccgtttcccaggacgatatgtcactccgcaccggaccccggtcccggcgcgcggcggggcacgcgccctcccgcgcgcgcggggcgcgtggagggggggggggcggcccgccggccggggacaggcgggggaccggctatccgaggccaaaccgaggctccgcggcgctgccgtatcgttccgcctgggcgggattctgacttagaggcgttcagtcataatcccacaagatggtaactttcgcccccattgggctcctcaancccaagcacattacaccaaatgtctgaacctgccggttccgtcgtccgtactgagcacggattaccatggcaaccaaacacaatcatcaagtaggggtaaaaacttaaccttgtctcacgacgggtcttaaccccagctcacggttccctattagtgggggtgaacaatccaacgccttgggtggaattctgcttcacaatgataggaagagccgacatcgaagggatcaaaagccggacgtcgctatgaacgctttggccgccacaagccagttatccctgtggtaacttttctgacacctcctgcttaaaaacccaaaagggtcagaaggatcgtgaggccccgctttcacggtctgtattcgtactgaaaatcaagatcaagcgagcttttgcccttctgcttcacggggaggttttctgtcctcccttgagctcgccttaggacacctgcgttaccgtttgacaggtgtaccgccccagtcaaactccccacctggcactgtccccggagcgggtcgcgcccggccggcgcgcggccgggcgcttggcgccagaagcgagagcccctcggggctcgcccccccgcctcaccgggtcagtgaaaaaacgatcagagtagtggtatttcacccgggggcccgcagggccggcgggaccccgccccgggcccctcgcggggacaccgggggggcgccgggggcctcccacttattctacacctctcatgtctcttcaccgtgccagactagagtcaagcccaacagggtcttctttccccgctgattccgccaagcccgttcccttggctgtggtttcgctggatagtaggtagggacagtgggaatctcgttcatccattcatgcgcgtcactaattagatgacgaggcattt

SEQ ID NO: 14264 - DNA, 705 bp, Homo sapiens
  SIMILAR (87)..(155): 601254mologous to porcine endogenous retrovirus pol,accession number Y17013,Smith-Waterman Score=82.
cggctcctggccaggcctggacgatggatcggcaaccaggatcctcgcctgcccctggccaggcctgggcgatggaccagcagctcccaaagcgaacctgccgcttgtgaggtggaagccccagtgctttcgaggggagggtctctgaggctcctcctgcttctcagccaccctcttgactggcctagacttgtgggcgtgctgcagcagcaggtccactgcctctgcgaggttgtccacgtacccatcagccttcacttccggatggtgctcgtcactgggcccaacagaggaggcaccgggctcctggataaactgccctctggctgggattctgggggcagcaacctctccaaagccttcagccattccccaggcatctcctgaggtctcactggatgctgaggacacaggaatgaagccatgagacagtgcagaggcctccgggccctgccaggggactttgtggaaggggctgtgggctgagtcctgcttgtatggggctacggccgcttcccctcctgcacagtctccgagcacagcactcacgagcctcacatccctctcccttccatcctccaaggaagaagtggtcacccccatccgcacccgctccatcagcaccctcacccgcacccgcttcattaacaccctcacccgctccaccagcaccctcacccgcacccacacccgcacccgctccat

SEQ ID NO: 14265 - DNA, 1257 bp, Homo sapiens
  SIMILAR (80)..(658): 781254mologous to Homo sapiens reverse transcriptase homolog= pol {retroviral element},accession number S61070,Smith-Waterman Score=764.
  misc_feature (1)...(1257): n = a,t,c or g
cccacgcgttcgcctacgcgtccgcagagcatgagggggaggaatcactgatgacaggcactggcctgcccagctgggggcctttgtttattcatttggtgggcacttcctgggtgcctgctctgggtcatgcctgtgggggggaccactgagggcaggaaacctggcctgtccctccaggaagcgaagtcaacactggcacctgcagatgaagtggcagagcagcccccatctttgatggcatggggtggttggggggcacattctgcatgctcagaagagagagcaactcgccctgtggaaggagcatacagtgggagatggggacaggcccagtgacgagcaccatccggaagtgaaggctgatgggtacgtggacaaccttcgcagagccagttggacctgcttgcttgcagcacgccgacaagttgatggcctcctgggagagccccgcctcctccacccctgcctctcctccacccctgcctcccctccacccctgcctctcctcctctgctccacccgcccaggagagccccacctcctccacccgtgcctttccttcacccctgcctcccctccacctgacccagtgcccagaccaaccaaggccctgacaggcctgccttctgccctctgccctgcatgggcaggcatttgttccctacctgggtggcctgctcccctgcctgggccctgacttcagctccctgtagtgaagtccaggagggtgggacaggcctgtcaggcctctgggaatctcccaaatcccagaactcaccactcaccatgggcctttaaatgcagtaaattccaccctaaccaagatttcaggggcactatgccccactgcctcctcttcagactctttgcatttcagtgaagacccctggaagaaaccccaggggcntccctatgcacaagatcttgcagccccagaacccaagtcagcctccctgcgaactgccccaggcacactgccccaccaccccacccccgaaacaatgcccagcccgctgctttttctatcctcccagtcacctttgcagacaaagacccaggggcagctcccgagggcactgtgaaggctcccatgcccacacagtgagaactgtagcctctgcgtccaagggaacacagggtactttctggacccactgctggacagacttgaaggtgtcatgcccgggtgtgtgcaggaggaaactaacagttcagtaaactctgccttgaccagcaaaaaaaaaaaaaaagggc

SEQ ID NO: 14266 - DNA, 1506 bp, Homo sapiens
  SIMILAR (218)..(159): 901254mologous to Homo sapiens Human secreted protein, SEQ ID NO: 5576,accession number G01495,Smith-Waterman Score=108.
atgtccaggaataatggtgaggtgggagctcctgtatcactggaagagctggaacgatcaaatattagggatcagggtctgcgaggattgtgggggctctggggattgccagaaattaaggggagctctggaaataacgggggtcccgtatcacaaggagacaacggaggctacgggggacggcagggagagcgaaggtcgcggagggtggggaccgagtcgggccacgggtcactcaccggctccgccgcagccgccgcacagcgcaggcgcagaactgcgctccgccgagccccaccagcaggccgcaactgcgcagccgcaacgttagcgccgcgcgggtaccccagcttcctggggccacaacggcgcacgcgcaaaaactccatcgcgcgcatgcgcgtgcctcgggttgtacccgatacatcagcccacagcaaggcgggctccagcagcccggagccatgggcccggccctcctgcactccccaggaagggggctgcccacggcccaaggagcgtgagtcaccacccccttcggccctgcagccggtccagctgcctcgcctggccttgtctccaccacccccagcccctccactgccacccccaccgccactggcccaagtggcaccctcaccccctagccccccaccccctcctcggcctccacccacgctctcggcctcagacccctccctggacttcctgcgggcccagcaggagactgccaacgccatccgggagctggccggcacccttcgacagggactggccaaactgagcgaggccctcagcgctctgctgccccttctgccaggaaccccagttgactccctgcctccacctctgcccccacccccacccccaccgccacctcccaggcctgtcctgcccccaccggcccccaaggtggagatcaccccagagcccgtgtccgtggtggctgctgtggtggacggggcagtggtggcagccaggggagtgatcattgccccaaggagcgaggagggggcaccccggccccccccagccccgctccctccgcacgactcccccccacacaagcggagaaaaggtttccctacacggaaaaggcgcggccgatggaaatctccgtgaaatctactatctatgatcctgcctgcaacccctctccccagcttggcgcagtcgaggggggcgatgctctctgcccatcccagctgcaccctagctccccttccctaacagttcctgttcttgacttgaagagaattgacccgtgggggactccccacctccccaacccagactttggagcgggtgggagttgtaagacaaatcaaaatacggatgacaaagaggatatagccgtgtataccccagggagaggaggcgccgagttctgatgggagaggtacaggttgggttctctgcctaccattgctgtctctgacttccagagctcaaccccctcctttctcccagtggtgacaagatatcaataaacttatttttaataca

SEQ ID NO: 14267 - DNA, 772 bp, Homo sapiens
  SIMILAR (259)..(570): 551254mologous to Sus scrofa domestica polyprotein,accession number U77600,Smith-Waterman Score=300.
  misc_feature (1)...(772): n = a,t,c or g
tttaattgtattaaaaataagtttattgatatcttgtcaccactccccgaaaggagggggttgagctctggaagtcagagacagcaatggtaggcagagaacccaacctgtacctctcccatcagaactcggcgcctcctctccctggggtatacacggctatatcctctttgtcatcccgtattttgatttgtcttacaactcccacccgctccaaagtctgggttggggaggtgggggagtcccccaccgggtcaattctcttcaagtcaaagaacaggaactgttaggggaagggggagatgtgcagaaccgagaggttccctcccccaccccacatagggcaataataaataacatggaaattggatgggcttaggaagtcaagggttaagggaggcagccaggggaggacaagcactgttaccagagaaaggggttgggggggcccatttactgaggcccccccaccagagaatcaggtcactaactagcacagggagtgggtgctcacatccctggagcagggagctagggtgcagctgggatgggcagagagcatccgcccccctcgnactgcgccaagnctggggagaggggnttgcaggcaggaatcatacgatagtaccatttcacggagatatatccatcgcgccgcgccttttaccgtgtagggaaacccttttctccgcattgtgtgggggggagtcgtgcggaggnnttcctcggctngtgcttaggnatttaggcntcgcaggnttccgaccgacct

SEQ ID NO: 14268 - DNA, 486 bp, Homo sapiens
  SIMILAR (91)..(327): 961254mologous to Escherichia coli RecC1004,accession number AF176618,Smith-Waterman Score=406.
atgaaaggggaggtgtcctgcaagcagcatcaagatgctcttcaacaagttctctgggctatgctccaggatgccgacaaacaagtccgcagggccccaggacctgtggaaaatgaaaaccactgtgactttgtaaagctgcgggaaatgctcatttgtacaaatatggaggacctgcgagagcagacccataccaggcactatgagctttacaggcgctgcaaactggaggaaatgggctttacagatgtgggcccagaaaacaagccagtcagagtcttgctttttaagtccttgtctgactcaaaaagagttaaatatgatgaagaatggataagactgcctgtagagagaaatacatctagaaagaaaggtgactcagaaacagccttgagtccctttagtatttgtcagctggaggagcagataggagagcttgagaagggaggaggaggaaaaccagcagtgtcacgtcttggaacttga

SEQ ID NO: 14269 - DNA, 2428 bp, Homo sapiens
  SIMILAR (115)..(339): 891254mologous to Homo sapiens alpha-tubulin,accession number X01703,Smith-Waterman Score=352.
atgatgtggtctgtccttttacagccagtagtgctcgccgcagttgagcgacagggcgaagccctcgagttcctgattggtgtacctgaaagtgatggggagaatggaaccaagttggaaaacactctgcaggatattatccaggaggacttccccaatctagcaaggcaggcccacgttcagattcaggaaatacagagaacaccacaaagatactccttgagaagagcaactccaagacacataattgtcagattcaccaaagttgaaatgaaagaaaaaatgttaagggcagccagagagaaaggtcgggttaccctcaaagggaagcccatcagactaacagcagatctgtcggcagaaaccctacaagccagaagagatagggggccaatattcaacattcttaaagaaaagaattttcaacccagaatttcatatccagccaaactaagcttcacaagtgaaggagaaataaaatactttacagacaagcaaatgctgagagattttgtcaccaccaggcctgccctaaaagagctcctgaaggaagcgctaaacatggaaaggaacaaccggaacttctttggagtaactttcgccttcttcgtcggagggcagagcctcggcaaagcgcttcaggaaacctccataccgtttctgagagaagaggacctggaaaagactagcattttggagactgggaatggtgactgggaggccacaagagggctgcctgaagaatgtgctggaatgagggaaagagattgtcagcaaaacgaaaaataccaagtgcctcaattcgatcaatcaacgattaaaaatattgagtctgcaaaaggacttgatgtgtgggacagctggccgctgcaaaacgctgacggaacagtagctgaatacaacggctatcacgttgtgtttgctcttgcgggaagcccgaaagacgctgatgacacatcaatctacatgttttatcaaaaggtcggcgacaactcaatcgacagctggaaaaacgcgggccgtgtctttaaagacagcgataagttcgacgccaacgatccgatcctgaaagatcagacgcaagaatggtccggttctgcaacctttacatctgacggaaaaatccgtttattctacactgactattccggtaaacattacggcaaacaaagcctgaccacagcgcaggtaaatgtgtcaaaatctgatgacacactcaaaatcaacggagtggaagatcacaaaacgatttttgacggagacggaaaaacatatcagaacgttcagcagtttatcgatgaaggcaattatacatccggcgacaaccatacgctgagagaccctcactacgttgaagacaaaggccataaataccttggactcattccaacctacgacatcagcagcaatatttacctaatctccaaatcgtgtttgtggcaggctaactttagactaaattcagctttagcacaaagtcccgctatcactaacttccagttccggggccactctctgaagacacttgatctcttaaccatgaagaaccttgacagcaaggtaaacattataccagtgattgccaaagcagatacggtttctaaaactgaattacataagtttaagatcaagttcatgagtgaactggtcagcaatggcgtccagatataccagtttccaacggatgatgacactattgctaaggtcaacgctgcaatgaatggacagttgccgtttgctgttgtgggaagtatggatgagataaaagtcggaaacaagatggttaaagctcgccagtacccttggggtgttgtacaggtggaaaatgaaaaccactgtgactttgtaaagctgcgggaaatgttcatttgtacaaatatggaggacctgcgagagcagacccataccaggcactatgagctttacagggcgcttgcaactggaagaaatgggctttacagatggtggccccaaaaaacaagccagccagtgttcaagagacctatgaagccaaaagacatgagttccatggtgaacgtcagaggaaggaagaagaaatgaaacagatgtttgtgcagcgagtaaaggagaaagaagccatattgaaagaagctgagagagagctacaggccaaatttgagcaccttaagagacttcaccaagaagagagaatgaagcttgaagaaaagagaagacttttggaagaagaaataattgctttctctaaaaagaaagctacctccgagatatttcacagccagtcctttctggcaacaggcagcaacctggaggaaggacaagggccgtaagaactcccaattttttgtaaaacagaagttccagagcacaggaaggtcatcatccacaagccaactttattaaaaaaaaactagaagtgtgctttgattttgctggttaattgttttac

SEQ ID NO: 14270 - DNA, 425 bp, Homo sapiens
  SIMILAR (425)..(324): 971254mologous to Homo sapiens leucine carboxyl methyltransferase,accession number AF037601,Smith-Waterman Score= 167.
ggtggcaagtgagatttatttaaacaacgacatgtcaacaggaacaggaagaggaacatgtgcgaccactgtagtgaccaaggcttctcaagagtgtgggatgagacctgcggacgaggcccgcccaccgctcagggagcttgcaggtctcctccaggagggcaagtggcttcggcttctggctcggcataagcattcgacagattaataagttatctccttcagcccaagctcatttcctcctttggttgcccagcaaaggcagtaatgcgcatgagctgctccagagtcacatttcatccaggaattcaagtgattctatcctgtgactctaatgacttgcaggtctccactcccgccagttcacactggcgtctccgcaggttttcaatcatgatctgcccaaaccgatcacgcatgttcac

SEQ ID NO: 14271 - DNA, 677 bp, Homo sapiens
  SIMILAR (321)..(593): 851254mologous to Homo sapiens L protein (AA 1-558),accession number X16135,Smith-Waterman Score=390.
catccccacccaatccaagggcaccttacctcttccctgcatcattgcaaaaccctgcaaactggtctccccacttccagtatctccccattctaagccaacctagatccgtcctgacagccttccgtcagcaagcccagcccaggatttctatgccgcaagctcaaacacctttccggccacagatggagcgccttgaccaaaatatacgaagatcaaaccagccacaacattcccttaagccaaaactaatccagagcaaggccctaactctcttcaattctgtgaaggctgagaaagatgaggaagctgcagaagaaaagtttgaagttacgagagttgtccacatcaggggcctaattgatggtgtggtggaagctgacattgtggaggccttgcaggagtttggactcatcagctatgtgatggtaatgtctaaaaagagacaagcactggtggagtttgaagatgtgctagaggcttgcaacgcagtgaactacacagccgacaaccaaatacatattgccggtcacccagcttttgtcaactactctaccagccagaagatctcccgccccgggaactcggatgatccggagcgtgaacagtgtgcttctctttaccatcctgaaccccatctattcgatcaccacggatgttctttacactatcggtaa

SEQ ID NO: 14272 - DNA, 648 bp, Homo sapiens
  SIMILAR (542)..(646): 571254mologous to Homo sapiens Fragment of human secreted protein encoded by gene 14,accession number Y14479,Smith-Waterman Score=90.
atggagagttttggggtgctacctctatttcttggtgcggatgctggctacgtgggtgtcatcgcgggtgtgcgatgcttgttgtccggagtcgttccagtggatctagaggagttcaccggggacgtgttgttctccgcctgtgggccacggtcctttgaatccggatcaaagaagacagtcgtccagctattatttcgtgttatgccctctcgtgtagttagattggctacgacgtgtcgttgggatcccaagccttcgttggacctgtgccactttggtgggaacgaggcgtgctgccagacaccgttgtgtgaatgtgtgggagtgcggagggctgaaggagataacttattaatctgtcgaaggcttatgccgagccagaagccgaagccacttgccctcctggaggagacctgcaagctccctgagcgccaagttgtgaatgcaaaggaaaagttcttggaggaaatgaaaaagtgctactccagtgaacacatgaatgataagaaagcgaaactgtattattaccgatatggagaaagtttgagcggtctgtatagaagatcaaaccagccacaaccttcccttaagccaaagcctaatcgagagcagggccctaactctcttcaattatgtgatggctga

SEQ ID NO: 14273 - DNA, 772 bp, Homo sapiens
  SIMILAR (772)..(272): 461254mologous to Homo sapiens CGI-68 protein,accession number BC001214,Smith-Waterman Score=270.
  misc_feature (1)...(772): n = a,t,c or g
gtaatttgggtccctttaaaaggccgcccctttttttttttttggtggcaagtgagatttatttaaacaacgacatgtcaacaggaacaggaagaggaacatgtgcggaccactgtagtgaccaaggcttcttcaagagtgtgggatgagacctgcggacgagggcccgcccaccgctcagggagcttgcaggtctcctccaggagggtcaagtggcttcggcttctggctcggcataagccttcgacagattaataagttatctccttcagcccaaggcttcatttcctcctttgggttgcccagcaaagggcagtaatgccccnatgaagctgctccaagactcccaattttcatccagggatttcaagtgattctatcctgcttcacttcagcttcgaggtaacctgttgttacaacttccatcatgttcggacgggccgatgctgttttcccaccctttcgacaggagccaatctttctgagactgtaatgaccagcaggtctccactcccgccaggtcacactgggcgtctccgcagttattcaatcatgatctgcccaaaccgatcacccatgttcacctgttggtagtaatatgaacatggctctctcaaaactgttgggctgcccacttcaggaagtttgcngactgcctctgagtcatgtaaaccancacacattcagctattcaaggtgttggccaattgtgtatcatgttacattnccttagcttcctctccagttcaaacaggtnctcgagatctgctcc

SEQ ID NO: 14274 - DNA, 489 bp, Homo sapiens
  SIMILAR (138)..(61): 401254mologous to Homo sapiens Human prostate cancer- associated protein 30,accession number Y48333,Smith-Waterman Score= 50.
gtaaggagtggcattgaaacaacagtaactttcttgaaaaggttcctatcagagcagatctgtctgaggaaaaggggccagggaaggcgttctccaaatccaattaggccacagaaactcaattcgcgtagggccagcatgatctcagagctgctcttggtgttccagaagagtggtcgttggccttatgggatttgccagacagccgggggcagggaaagccacgagaggcccttcaatgaaatgccatctccagcagggggaagcagtggcctctacaccgagaagtgcaattcctttgggcttctgactctgttcatcagtcccaaggagctgatggcttggacagaactgaagacacggaaagcagcctgggccgggagtgggccacgtggggactactgtgtggagctgaccgcactccccagcatgctgggctccagctccccaagggccagcaccaacaggcgaggaagggtgtcattttaa

SEQ ID NO: 14275 - DNA, 459 bp, Homo sapiens
  SIMILAR (15)..(341): 501254mologous to Homo sapiens Human signal peptide containing protein HSPP-120 SEQ ID NO:120,accession number Y87343,Smith-Waterman Score=260.
cgtccagtgtggcggaattcacagccaccaacggctgcctaccgctgggcatccggctcccgcatgtggagtacgagcttttcaagatggaacaagaccccctcgggcaaagcctgctcttcatcggacaaaggcccaccgatggctcaagtcccgataccccagagaaacgtcccacctcctaccaagcacccctggtgctctgtcatggggaggcccccgacttctccaggccaccgcagcacaggccatcgctgcagaagcaccccagcacagggggtcttcacatagcccccttcccacttctgcccctagttctagggctggccttcctccactggctatgacattggacttgacatcaggatggcggctctggacacccattcaacccttcagactccctcctggcagctgtagggaaggaaccattctcctctgctctgtcatggatggatg

SEQ ID NO: 14276 - DNA, 2562 bp, Homo sapiens
  SIMILAR (1016)..(3940): 971254mologous to Homo sapiens putative p150,accession number U93563,Smith-Waterman Score=4937.
atggcaccaggtgtttctgggaaatggaatttgagaagtaacatgatcatccaacagttgaaagatagtttgaagctgaagtctactgtttggcccatcagctttaaccaaattctgatggactccaatttccttaacagcaaaccacagactgaaattaagaccaacttgccatggaaaggaagatctcccacgtggaagaaagtttgggcaccagagctggccttggtgggctccttcttccgcaaggactgggtggaacgagggaggctgggtgaccctcagctggaggccgaagctggagccggcggggtgagggttcgccactggctcccaatcgccccaaccaaagctcaagagggcccccttgtggaagctcccaagaacagctcggcaacaggacattcagtgagatctgggcacattcagaaccccttctacgcagtgatgctacaagctgtcatcatcccctcaccggctcctccaagcaccagtttcctcatcagcaaaatgggtgcattgacagaacccatgtcacgggtggttgtgtcgattatacctgtcaatcctttgggctctgccaaggtactgacacgctgccgctgtgaggactcaaggcccagccaagctcatctaggggtcactctagaggacctggagcttgtgctgcagcgcctgcttcccgtgtccatcttccagtcaccttctgccctgagcccaattcctccccctgcccacactgcaccggcggctggggaggccgggggcagctgcctgcgctgggaaccccactgccagcagcccttgccagatagagtgcccagcactgcgatcctgcctccacgccttaatggaccttggatctccacaggctgcgaggtgcgcccaggaccggagttcctgacccgcgcctacaccttctaccccagccggctctttcgagcccaccagttctactacgaggaccccttctgcggggaacctgcccactcgctgctcgtcaagggcaaagtccgcctgcgccgggcctcctgggtcacccggggagccaccgaggccgactaccacctgcacaaggtgggcatcgtcttccacagccgccgggccctggtcgacgtcaccgggcgcctcaaccagacccgcgccggccgggactgcgcgcggcggctgcctccggcccgggcctggctgcctggggcgctgtacgagctgcggagcgcccgggctcagggggactgcctggaggcgctgggcctcaccatgcacgagctcagcctggtccgcgtgcagcgccgcctgcagccgcagccccgggcgtcgccccggctggtggaggagctgtacctgggggacatccacaccgacccggcggagaggcggcactaccggcccacgggctaccagcgcccgctgcagagcgcactgcaccacgtgcagccgtgcccagcctgtggcctcattgcccgctccgatgtgcaccacccgcccgtgctgccgccccctctggccctgcccctgcacctgggcggctggtgggtcagctcggggtgcgaggtgcgcccagcagtcctgttcctcacccggctcttcactttccacgggcacagccgctcctgggaagggtattaccaccacttctcagacccagcctgccggcagcccaccttcaccgtgtatgccgccggccgctacaccaggggcacgccatccaccagggtccgcggcggcaccgagctggtgtttgaggtcacacgggcccatgtgacccccatggaccaggtcaccacggccatgctcaacttctctgagccaagcagctgtgggggtgcgggggcctggtccatgggcactgagcgggatgtcacagccaccaacggctgcctaccgctgggcatccggctcccgcatgtggagtacgagcttttcaagatggaacaagaccccctcgggcaaagcctgctcttcatcggacaaaggcccaccgatggctcaagtcccgataccccagagaaacgtcccacctcctaccaagcacccctgcccgggtccccagtcaagcacttggatgcggcagtgatgttcatcgctacaccttcagaagttgagcactttcttttcaatcaagtctcagaccagatgttgtctcctgaagatgtcaccattcgcatcccaaagagcagccccatttccctggtccttctgtcagtccactgcatcacagttcctcacactgagacccgtgaacggatcacctccatctaccagattcagcgaccctcgagaggcccagctgagtcagtgagaggccagacagccgggggcagggaaagccacgagaggcccttcaatgaaatgccatctccagcagggggaagcagtggcctctacaccgagaaggtctcaggagttaaatgttattcaggtgttcaaagtgacactgggaagcccaagacccctatctcttcatacatgtatttctcaaactacaatgagaaatgggccattcctttagagaaggagctgaaaatgacatataacattgtattttggcatggattctga

SEQ ID NO: 14277 - DNA, 1341 bp, Homo sapiens
  SIMILAR (118)..(660): 271254mologous to Gallus gallus progesterone receptor form B',accession number M32732,Smith-Waterman Score=110.
atgatggcacgtcgggaccccaaatcttgggccaagagactggtgagagcccagaccctccagaagcagcggagggccccagttgggccaagggctcccccgcccgatgaagaagatcccaggctcaagtgcaaaaactgcggggcctttggccacacggccagaagtaccacgtgccccatgaagtgctggaaggcagccctggttccagcgaccttggggaaaaaggaagggaaggaaaacctgaaaccacggaagccccggggtgaagccaacccggggcccttgaacaaggataagggagagaaggaagagagaccaaggcaacaagacccgcagaggaaggctctcctccacatgttttccgggaaacctccagagaagccgctgccgaatggaaaaggatccacggaatcttctgattatctgagggcgagtgtcaccccgggcccctggtctttttctcctctaggttgcaagcgggccaatgccggtccacacaaccaaaaagccagcctgagctcctcctcaagtcttggaccaaaggaaagacagactggggctgcggccgacatgcctcagcctgcagtcaggcaccagggccgcgagcctctcctcgtggtgaagccgacacacagccgccccgagggtggctgccgagaagttccccaggctgcctccaaaacccacggcctgctccaggcctccagaccccaggcacaagacaaacgtcctgcggtgaccccacagccctgcccgccagccgccacacacagcttgggcctaggctccaatctcagcttcgggccaggagccaagagacctgcccaggctccgattcaggcttgcctgaacttccccaagaaaccgagactgggtcccttccagatccccgaaagcgccatccagggaggtgagctgggggccccggagaatctccaacctccgccagccgcaaccgaacttggaccaagtacgtcgccccagatgggcaggaggacaccggcccaggtgcccagcgtcgaccggcagcctccgcacagcagaccttgcctgcctactgcccaggcctgcaccatgtcccatcactcagcggccggccatgatggggcccagcctctcagagtgctcttccggagactggaaaacggacgctggagctccagcctcctggcggccccctcatttcactctcctgagaagccgggagcctttctcgctcagagccctcatgtgtcagagaagtctgaggctccctgtgttcgtgtcccaccgagcgtcctctatgaggaccttcaggtttcctcctcctcagaggagagcgattctgacctggagtga

SEQ ID NO: 14278 - DNA, 714 bp, Homo sapiens
  SIMILAR (49)..(288): 361254mologous to Deinococcus radiodurans DNA gyrase, subunit A,accession number AE002030,Smith-Waterman Score=90.
atgtatggttaccggcgcttaagaagccccagagattcccagacagaaccgcagaatgacaatgaaggagagaccagtttggctaccacacaaatgaatccacccaaacgtcgccaagtggagcagggtcccagtacaggtgcaaaaaaaccctcaatttcaggagctccacacctgaattcataccagtccctggaacttccccagaagcagcaggattctggcactgaggagctcatgatagtcctggaacaagggacagaagtgaggttgagcctggaagaggtcatcctcatcttggccccagagacagtgctgcagctgaccctggagaacacagtccttgtgattgtccctgagcatgtcctgaggtcagaagatggcctgcagtcccctgtgcagatccagtacatcataccttccgttgatgacttcagcttggagttccatgctcaagatggagacatctcagacatgagaagagagaatgtgcctttttcacctgcagaagaagggaaggcagcacccctgtatcagcagcccttgatgataccccaagcaaaccacatggctgggatcagcccttctttcctacagcagcagaattccagcacagagacgttcatcatcgtggtcccggaacaagggacagaactcacactgagactggaagagtatgtcctcatcctgtccccacagacagccctgccctga

SEQ ID NO: 14279 - DNA, 1869 bp, Homo sapiens
  SIMILAR (381)..(803): 341254mologous to Arabidopsis thaliana arginine/serine-rich protein,accession number AF151366,Smith-Waterman Score=125.
gtattacgaccgtggcgccgagtaggccagcgtcttctgactgcgagtcggacggatcataagagcaggacgcaggtcccggatccagaatgggaccggagaaatgagcgggacccagaccgacgagacgagtggggcggtggtcccagacacatagtcagacggacgacacgagtggggcagtggtccctgagtacccatctgaccgatgatacgcggggggccgtggtcccggtcaggtggcccaacagtccacccctgaaaaaggcggtcataaaacccccaggagacgaagatgatggcacgtcgggaccccaaatcttgggccaagagactgagtcctgtgtagccacgtttggctgcgttgttgacatcggcttcaccatcgtgccccttggaaccccgagtccttcctttcagagttcctccgtcacacgggctttgcgagggaacatcgtacccgaactctcccggcacttaacggcccccatgccgctcaagtgcaaaaactgcggggcctttggccacacggccagaagtaccaggtgccccatgaagtgctggaaggcagccctggttccagcgaccttggggaaaaaggaagggaaggaaaacctgaaaccatggaagccccgggttgaagccaacccggggcccttgaacaaggataagggagagaaggaagagagaccaaggcaacaagacccgcagaggaaggctctcctccacatgttttccgggaaacctccagagaagccgctgccgaatggaaaaggatccacggagtcttctgatcatctgagggtcaccctggttgatttcctttcagcttcccgtctgcgggaggaaatcggggaacccctctttcttgccttcttggggtcagggactccacgatccttccaggttgcaagcgggccaatgccggtccacacaaccagtaagaggccgcgcgtggaccctgtcctcgctgatcgctcagctgccgaaatgtctggcaggggctccgtcttggcttcactgtctcccctcagaaaagccagcctgagctcctcctcaagtcttggaccaaaggaaagacagacaggggctgcggccgacatccctcagcctgcagtcaggcaccagggccgcgagcctctcctcgtggtgaagccgacacacagccgccccgagggtgactgccgagaagttccccaggctgcctccaaaacccacggcctgctccaggccgccagaccccaggcacaagacaaacgtcctgcggtgacctcgcagccctgcccgccagccgccacacacagcttgggcctaggctccaatctcagcttcgggccaggagccaagagacctgcccaggctccgattcaggcttgcctgaacttccccaagaaaccgagactgggtcccttccagatccccgaaagcgccatccagggaggtgagctgggggccccggaaaatctccaacctccgccagccgcaaccgaacttggaccaagtacgtcgccccagatgggcaggaggacaccggcccaggtgcccagcgtcgaccggcagcctccgcacagcagaccttgcctgcctactgcccaggcctgcaccatgtcccatcactcagcggccagccatgatggggcccagcctctcagagtgctcttccggagactggaaaacggacgctggagctccagcctcctggcggccccctcatttcactctcctgagaagccgggagccttcctcgctcagagccctcatgtgtcagagaagtctgaggctccctgtgttcgtgtcccaccgagcgtcctctatgaggaccttcaggtttcctcctcctcagaggacagcgattctgacctggagtga

SEQ ID NO: 14280 - DNA, 1519 bp, Homo sapiens
  SIMILAR (1209)..(1664): 311254mologous to Nephila clavipes dragline silk fibroin,accession number M92913,Smith-Waterman Score=86.
atggcagaagaacacacaatatccgaggatgcgcgcagcacattgtgttctacagatttgaccgactggtggtggcccaacaatccacccctgaaaaaggcggtcataaaacccccaggagacgaaaatgatggcccgtcgggaccccacatcttgggccaagagactgagtcctgtgtagccacgtttggctgcgttgttgacatcggcttcaccatcgtgccccttggaaccttgagtccttccttttcagagttctcccgtcacacgggctttgcgagggaacatcgtatcgctcaagtgcaaaaaatgcggggcctttggccacacggccagaagtaccaggtgccccatgaagtgctggaaggcagccctggttccagcgaccttggggaaaaaggaagggaaggaaaacctgaaaccatggaagccccggggtgaagccaacccggggcccttgaacaaggataagggagagaaggaagagagaccaaggcaacaagacccgcagaggaaggctctcctccacatgttttccgggaaacctccagagaagccgctgccgaatggaaaaggatccacggaatcttctgagcatctgagggttgcaagcgggccaatgccggtccacacaaccagtaagaggccgcgcttggaccctgtcctcgctgatcgctccgctaccgaaatgtctggcaggggctccgtcttggcttcactgtctcccctcagaaaagccagcctgagctcctcctcaagtcttggaccaaaggaaagacagacaggggctgcggccgacatccctcagcctgcattcaggcaccagggccccgagcctctcctcgtggtgaagccgacacacagcagccctgagggtggctgccgagaagttccccaggctgcctccaaaacccacggcctgctccaggccgtcagaccccaggcacaagacaaacgtcctgcggtgacctcacagccctgcccgccagccgccacacacagcttgggcctaggctccaatctcagcttcgggccaggagccaagagacctgcccaggctccgattcaggcttgcctgaacttccccaagaaaccgagactgggtcccttccagatccccgaaagcgccatccagggaggtgagctgggggccccggaaaatctccaacctccgccagccgcaaccgaacttggaccaagtacgtcgccccagatgggcaggaggactccggcccagcttggctaccacgcaaatgaatccacccaaacgtcaccaagtggagcagggtaccagtataggtgcaaaaacaccctcaattccaggagctccacactgaattcaggccagtccctggaaactccccagcctttttggagaatactgacggccatcttttcacgggagcagcaggattccagcaatgaggagctcatcatagtcctagaacaagggacagaagtgaggttgagcctggaagagttcatcttcatcttgccccagagacagcgctgcagctga

SEQ ID NO: 14281 - DNA, 1326 bp, Homo sapiens; identical to SEQ ID NO: 2017
  SIMILAR (1094)..(1180): 561254mologous to Homo sapiens Human secreted protein, SEQ ID NO: 7221,accession number G03140,Smith-Waterman Score=88.

SEQ ID NO: 14282 - DNA, 1120 bp, Homo sapiens
  SIMILAR (82)..(456): 301254mologous to Phaseolus vulgaris PVPR3,accession number M75856,Smith-Waterman Score=129.
accggaaccggaaccgggggcacgaggcggggagcagctcaacgaggactttgaggggtaggtggccgtccccacttgtttgcactgccctgcactctccagaacccagtctcgggcgatccaggccttgacggtgagaaggggagaggccaccatccgtcccccgccatgtgacgacaccaagggaggccaccgctttctcaacgagctcatcaaggtcgtgtctcccaaggttggtgcccccagcccaagctcagacctgccctgtcggatgtggggagaggaaagaggctggacagtgggcctgcccgaggaggtgaaaatcgcagaggcctaccagatgctaaagaagcagggtgaggcacacagagggtggggggcgaccagggcctgccttcccctcccccaccatgagcggccgaagaatgtgatctttgaagatgaggagaaatccaaggtgagactccaaggaggcacatatggggactctgagcccaggtgggggtccgtgggttccatcaaagagatggtgcaggaggtagcggccgagcccagagcacagggaggaggcgggatgggggtattgagctgggccaccaatgtgaaactgctcacggagatggtgatgagccacagccagggcggcgcagcagctggcagcagcgaggacctcatgaaggtgcacctgcctccctgcctaccccactccctgcccactccacagcccacgcggaccctgcggatgcggcccacgctcttccgactggcgagtgacacagaggacaatgatgaggccttaggtgagcccagggcaggtgctgaggtcaggtccccccctctccctccacctcctgcccccgtgcggggtgaggaggtcaacggtgatgccacagccggctccatccctggtgaggaggtggcaggagagctgggagggcacccatcaggctggaggggcacagagagttacccagctatgcccacccgccctggcgagcaggccagccctgagcagcccagtgcctcagtttccctgcttgacgacgagctcatgtctctgggtgaggaaggggccaggcctggaggagggcgggctcagcagcagatggggcatgatccc

SEQ ID NO: 14283 - DNA, 434 bp, Homo sapiens
  SIMILAR (67)..(162): 501254mologous to Rattus norvegicus huntingtin,accession number AJ224997,Smith-Waterman Score=77.
ggcacgaggcaggaagtgactgcgggagtggagccggcgagagagtggcagcggcggctgatggaagtgcagtgggggctggagagggcaccctactgtatccagcatgctccaaggccacagctctgtgttccaggccttgctggggaccttcttcacctgggggatgacaccagctggggcagctctcgtgttcgtattctctagcggacacaggccgatcttagatggaagccttggctttgctgcatgggtcatgctgccagcttcctattggcctcttctggccccagccgttgccatggtcacgtcctctggcggcttcggtgcctttgccttcttccctgtggctgccgcactcggattcgcggctacagcacttacgccgtttgctacccccctccactctcccccctttggctcctcccatcccg

SEQ ID NO: 14284 - DNA, 471 bp, Homo sapiens
  SIMILAR (337)..(86): 341254mologous to Rattus norvegicus neurotrophin tyrosine kinase receptor 1 TrkA L1 variant,accession number AF174586,Smith- Waterman Score=68.
  misc_feature (1)...(471): n = a,t,c or g
ctcngcgattcgtagaccatagtcagagtggtggaattcgaagcccagaatcataatcgtgtccctgatgtaaaggcattaatggagagtcccgagggacagttatctctggagcccaaatctgatagtcacttccaagcatcacacactgggtgccagagccctttatgttcagcccagcgtcacactcctcagagccccttcaccaatcatgctgcagctgctggcaggaagactcttcgcagctgcatggggctggagtggtttccagagctctatcctggttaccttggactaggggtgttgccagggaagcctcagtgttggaatgcaatgacccagaagccacaacttatcagtccccagggggaaagactctcgcaaggctggatcaggtgcaacaccaccataaggaagagtggattcggtggcatcacgatgctcttcacaggatacttcgtcctgtgttgg

SEQ ID NO: 14285 - DNA, 402 bp, Homo sapiens
  SIMILAR (178)..(17): 491254mologous to Caenorhabditis elegans coded for by C. elegans cDNA CEESS55F; coded for by C. elegans cDNA yk84a1.3; coded for by C. elegans cDNA yk78g7.3; coded for by C. elegans cDNA yk168g9.5; coded,accession number U80448,Smith-Waterman Score=141.
tgcccccagaggacgtggccatctcaactgctggggccagaagagaccaataggaagctgccaacatgacctgtccactagagaatacgaacacgagagctgccccagctgctgtcatcccccaggtgaagaaggtccccagcaaggcctggaacacagagctgtggccttggagcatgctggatacagccccttccaagctccaggtggctgcccttccaagtcccacactcttgtcctgatggcctccgaccccgggcctcgagcccaaccaaaggcaccgaaggagagaaaagccaactcactagggtgccctctccagcccccactgcacttccatcagcccccgctgccactctctcgccggctccactcccgcagtcacttcctgcttccacgaaa

SEQ ID NO: 14286 - DNA, 588 bp, Homo sapiens
  SIMILAR (193)..(2223): 921254mologous to Homo sapiens putative p150,accession number U93572,Smith-Waterman Score=3267.
cgtgtgcaatttttcttttaaaacaagttgtaagttgaaatatcaaatctgcacagcgctgtcccttcacagaaggcaagaaactgccggcacatcatgtcagaggccgccctcggtgctgtaggctgtggaagtgggcctccctcagggtctggttgatgtggaagtagaggccttggcacagcgcggactgctcgggcacgggctgaggcgtgttagggctggatccggccatggtctggctcaagctgccttccggcccgctggccctgtccgggctgttgatgctgctgctgctgctgctgctgctcccaccactgtcactgcctgaagacgcgcagaacgctttgtttcctcttagtctgttttctttactgtttctcattacaggtactgtctctgtgtcccaggaatcctgaaagacagggtttctgctacttcttttggtctgggggggaagatggttgtcttcttcgttgccattccttctccttttcctgggacggaggcgctcgctcatggcagctggcggatggaagctacgcggcgccgctccgcgaagagagggaacagagggggttgtgtttc

SEQ ID NO: 14287 - DNA, 629 bp, Homo sapiens
  SIMILAR (296)..(171): 421254mologous to Chimeric - Homo sapiens Human cytokine receptor gc chain-Ig fusion protein,accession number W31646,Smith- Waterman Score=79.
  misc_feature (1)...(629): n = a,t,c or g
caaggcccgagggggtgggcgtggcggccgccgaatacacaaccccctctgttccctctcttcgcggagcggcgccgcgtagcttccatccgccagctgccatgagcgagcgcctccgtcccaggaaaaggagaaggaatggcaacgaagaagacaaccatcttcccccccagaccaaaagaagtagcagaaaccctgtctttcaggattcctggggacacagagtctttcaggcagtgacagtggtggggagcagcagcagcagcagcagcagcattcaattagcccggacagggccagcgggccggaaggcatctttgagcaagaccatgggccggattccagccctaacacgcctcagcccgtgcccgagcagttccgcgttgttgccaaggctcttactttccacattcaaccaggaccctgaggggagggcccactttccacagccttacaggcaccgagggcggccttttgacattgatgttgccggcagttttcttggctttcttgtgaagggacagcgctgttgcagatttgataatttcaacttacaacttgttttaaaagaaaaatttgcacacgaaaaatgctgttggnttttcagtctatatttgaattacaggtta

SEQ ID NO: 14288 - DNA, 2676 bp, Homo sapiens
  SIMILAR (2624)..(2562): 611254mologous to Homo sapiens super cysteine rich protein; SCRP,accession number U63332,Smith-Waterman Score=94.
tttcctgctggagagggcaccctacggagttggcttttctctccttccgggcctttggttgggctcgagggccggggtcggacgccatcacgacaagagagtgggacttggaagggcacccacctggagcttggaaggggctgtatccagcatgctccaaggccacagctctgtgttccaggccttgctggggaccttcttcacctgggggatgacagcagctggggcagctctcgtgttcgtattctctagtggacaggtgagttgccttgctttggttctggatgttggtggggagcccgttggtaaaggggcactgtcccactccatggagcaggtttgtagacttttcagtgcccctggccacacccccaggcattgtgtactggggtttgttcgctgtcttcttattttctcaccttctccctgccaggccgggagaacagatgtctgcttgctgtagacaccttcatgcaccatcatctcccctcttgacccttgacagcctgataaaggtttacagttgtaattcacagggaaagcttgtgagagtctttccccctggggactgataagttgtggcttctgggtcattgcattccaacactgaggcttccctggcaacacccctagtccaaggtaaccaggatagagctctggaaaccactccagccccatgcagctgcgaagagtcttcctgccagcagctgcagcatgattggtgaaggggctctgaggagtgtgacgctgggctgaacataaagggctctggcacccagtgtgtgatgcttggaactgactatcagatttgggctccagagataactgtccctcgggactctccattaatgcctttacatcagggacacaatgatgattctgggcttctgctttcttttcttgaagaaatgttgtagctagagaggcaagactttgactacttgactgcgatacagaatgaaactggtaagtcgtctccctcggaatgaacaaacttaaatgtggtctttccccttgagactcctttcctgtgactgaatccctggtgttgaagttctcacagccatggctcatgacagtccgttcctgcttttctgttgcagacatacttttctctgcatttcctttgctcccacacgtctctactcccagggtaagtcctttctcttgtttctccatgacttggattttacctaatgagctcattttaaggcttaaaatgagggattctgtgttcttttctggagtctcagtaactgtaacatcagtagggactcctgagaggtgatccctgcctttggaatctctctcattgcttaataatgttcttacccttttaaccccatcactgacattctttggagaaatatgacaatcaccagtaggcacatctagtaattttactagaagttcctgtctttggggatcaattttgtccaatttgagatcaccagaggtagtttgtacatcattaggtagagttgaggaatattttctatcttgatttgacaaagaaggttctattgagccaaccagtaaagacgctccagcttctgaaggattacatcgactttctcctgatttaggcaaatctttggcaagttctcttttaggagaggttttctctgatgcgtaaaactgagccttggtttcttcttggaaagtagtcattggtttagtattttttaacattttgaaggatggttggattggattcttgatgtctttatctgcctttgtagtagctgctctttccaaaccaacagctggcagtggaaaggtcttcactgtctgttctggtttgtccaccaccaacttagaatttctttcttcattctctgtctctaactctttccctttagctttaattaaatctttgattggtcctttcatctttttagcacgtgggagtgtagctggcttggactgataaactttttgatcagtaggtatggttggtcctatcatcttacagtatggcaagtgggattttaatcgtttaaatggcttcttacagtaaggacacacttccattctgggtggattatcactcatcctattccagtcggtgcggttgggatggtgccactgcgcagccgcgagagggcggtaccacggcggcagcgacatgggggggcgcggagcagacgccggaagtagtggtggtacgggtccgactgaggggtactcgccaccggctgcgtccacccgagcggcaatggtctttccattcagcaaacagttcccaaacacctgctgtctgcccagcactgtcctgatgctcgagtaccctatgtcttcttcctctccttccggagttctttctgtcctcctcgggggtggtgcgtgttctccttccttgtcatttccacagtcctcctgggcctgccttcccagatgtctagaatcctttttcacacagatcttcaagacaggactctttgtatattgttgagagagattcttggccagagccttcataaatttatcttgcttgtgttcacagactagaaactgattgtagttcttgccttgattttcagacagtaccctgtttctttcttcttccttccagtcttcaggcagtgacagtggtgggagcagcagcagcagcagcagcagcatcaatagcccggacagggccagcgggccggaaggcagcttgagccagaccat

SEQ ID NO: 14289 - DNA, 680 bp, Homo sapiens
  SIMILAR (678)..(565): 971254mologous to Homo sapiens bA526K17.1 (novel protein),accession number AL157413,Smith-Waterman Score=190.
tttcgtctctgggcactggcaggctgcagagagccgcgttgccattcatccaccagaatccatccagagacagccttgcgggctgggatctttggagctttcctttggaaggattagcagtgcccgtctgtctggtgctctacacagtgctgtgaacatgaaattaaaggataaaaacaaaataaatccatgggtaggaaatcccagggcttcgtggcatcatttggcaatcatttgtactgtacagcatcatgcggtatgcctgcttcctccacgtccacacagacctggccccgggtgctccccctccattcgcaggaagctcacacggtggttgttcttggagaggtaggcgatgagggccacggccacgcccacataagacgccagtcccaatggtgatggacagcactgccaggaatagggcccgccgggagctggtgctggcctggtgcaagtcccccttggccacggctttgttggtctcatgggacaagtagaaggctgcgattcccagaggccagaagcagcagagcatggagaagacactgaggcccaggtggtccgcgggggcatcatgaggaaattgtcctcactctctgtgtcgcttgagtaagcgctctccagctcctggaactcctcctcctcctccacatcgtaggacagggtgtggattttta

SEQ ID NO: 14290 - DNA, 641 bp, Homo sapiens
  SIMILAR (408)..(488): 741254mologous to Homo sapiens hepatocyte nuclear factor- 3/fork head homolog 11A,accession number U74612,Smith-Waterman Score=103.
ttttttttttacgggtaaataaaagatgttcttttattcatttgcctgccaatccaaaaatacaaatatagttaattgtacataggaaggtattacttgttcagagttttgagtgtgtgaattacatatatgaacatctgagaaaatcctataagcagtttaatcaactgttccactccactccaagtgagtccataggcagaattgagttatggggagagcggcctagtaataattggtttgcgtaatacaaagttctactgggtagtgatgttgtagaagttcatatagaatcagctgagctttcagaaatggtgaaagggtggtaatagtcataacttagattgtaatttttttcccataggcttttaaaaaatattcatgaggttctttttttatttcaataggtttttggggaacaggaggtgtttggttacatgaataagttctctagtggtgatttctgagattttggtgcacccaccaccttgagcagtgaacactgtacccaatgtgtagtcttttatccttcagctccctccttcccgtttcccccagtccccaaagtccattgtgtcattcctcatagcttagttcccacttatgaatgggaacatacgatgtgaaacaattaaaattat

SEQ ID NO: 14291 - DNA, 1815 bp, Homo sapiens
  SIMILAR (3)..(1916): 1001254mologous to Homo sapiens dJ526I14.2 (KIAA0153 (similar to worm D2013.9)),accession number Z82214,Smith-Waterman Score= 3454.
atggggcggctggccaggcggggggctggcccccccacctccctcccggacggggtggctggccagggctctgtcaccattatccggagttgcatcctccacctgcccttgatcatcccagaacaggaagtgaagacctcctcccccgaggaaaatcagaggcgatgggcagaccgtgtcgaatctgaacatgacgtggcttgctgcagcaagcttactgccatgctaaacacttattcgcaagggctggttccctggaccagcagcatcagggtcatctgggaacgttttaggatcgtgaagtctcgtcagctcccaagacctgctgactcggaagctctggggacggggctggcagtctggcgggaagcctccaagacttgggaaggaaaggcagtgaagacctcacttgtctcctgctgggccgtgggcccaggtgctggcttcacggtggtgactcatgaacacacgaagaattgggatgctgatggctgcattggtgccacagctgtggctgtggctctcactgaaacagctcagcaaggaaaactggcacagggctccagagaaaagagggagagaggacaacggagagtgaaagagggaactaccaggattcaccccttatcccaggctgccttaccgaggaacgttcacaaaacttatatgagctcctccaccataacctacaagtcagaagggccatcagaagaggcttctgcctgtcctacgctgggctctggtccagccctcggcctgctcatggttggctgtgactccagatccttcctgttcctaaacggcctgcatgctggaccccgtggtgccctgaggaaagcaggcgtgctgaggggcactggtgaggagggccaggaggcgtttgcagaagccacagtgtctgcccctgtggacaagaccaacaaagccgtggccaagggggacttgcaccaggccagcaccagctcccggcgggccctattcctggcagtgctgtccatcaccattgggactggcgtctatgtgggcgtggccgtggccctcatcgcctacctctccaagaacaaccacctaggccacagacccaccacagtgcctatggctgcacatgctggcagctccacaggagagaatgaggaatgtgaagagctgaatccacgagacctgtgctcagctcccagagcaggctcgtacccagggctcccagggctgcagagagaccagctggcatctgcacaggattcagacttggctgtgttgactgagctggggatgctgcccccgaggatcctgcaggcagagggcaagaggacctctatgatgaggagctccctggctgggggctgtgcattccccaccctgcctgcctacagccctgccatgcctgagttacaaaagccggcccagggtgaaagtgatcctgccaagctgagacactcagagaacaaaggacatcttgaaggctggtggtggtcttcatccattcatttcatcaatagtgctcatggcaaacccgctgtcatcgtccggcccaggggaatctgggtgctgaacaccactcccctcagtgggcagtggggcccctacatcggagtttacactgcggccactgtagacatgaagtcccttggatcaggttccctggggctccagctggccctgcctctggcagcctcctggctcggagtcctcacggaggcagccagggtttttggggaacaggtggtgtttggttacatgaatagtttctttagtggtgatttctgggattttggtgcacccatcactcgagcagtgtacactgtacccaatgtgtag

SEQ ID NO: 14292 - DNA, 696 bp, Homo sapiens
  SIMILAR (184)..(678): 861254mologous to Homo sapiens NAG13,accession number AF194537,Smith-Waterman Score=719.
gaagtacagagaacgccaccaagatactcctcgagaagagcaactccaagacacataattgtcaggttcaccaaagttgaaatgaaggaaaaaatgttaagggcagccagggagaaaggtcggggttaccacaaagggagagccatcagcctaacagctgatctctcagcagaaactctacaagccagaagagagatcaacaaaattgatagaccactagcaagactgataaagaagaaaagagagaagaatcaaatagatgcaataaaaagtgacaaaggggatatcaccacagataccacagaaatacaaactaccatcagagaatactacaaacacctctacgcaaataaactagaaaatctagaagaaatggataaattcttcgacacatacaccctcccaaaactaaaccaggaagaagttcgctctctgaatagaccaataacaggctctgaaaatgtggcaatattcaatagcttaccaacgaaaaagagtccaggaccagatggattcacagccgaattctaccagaggtacaaggaggaacgggtaccattccttctgaaactattccaatcaatagaaaaagagggaattctccctaactcattttatgaggccagcatcatcctgataccaaagtcggggcagagacacaaccacaacagaggatttttagagcaatatcattga

SEQ ID NO: 14293 - DNA, 1302 bp, Homo sapiens
  SIMILAR (72)..(839): 691254mologous to Homo sapiens dJ526I14.2 (KIAA0153 (similar to worm D2013.9)),accession number Z82214,Smith-Waterman Score=772.
atgggactatgtgaaagaccaaatctacgtctgattggtgtaactgaaagtgacggggagaatggaaccaagttggaaaacactctgcaggacattatcctggagaacttccccaatctagcaaggcaggccaacattcagattcaggaaatacagagaacgccacaaagatattcctcgagaagagcaactccaagacacataattgtcacatttgccaaagttgaaatgaatgaaaaaatgttaagggcagccagagagaaaggtcgggttacccacaaagggaagcccatcagactaacagcggatctctcggcagaaactctacaagccaggagagagtgggggccaatattcaacattcttaaagaaaagaattttcaacccagaatttcatatccagccaaactaagctttataagtgaaggagaaataaaatcctttacagacaagcaaatgctgagagattttgtcaccaccaggcctgccctaaaagagctcctgaaggaagcactaaacatggaaaggaaaaaccgacagatcaacgagacagaaaatcaacaaggatacccaggaattgaactcggctctgcaccaagcggacctaatccgctgttctgtagacatctacagatgtctgtagatggtagacatctacagaactctccaccccaaatcaatagaatatacatttttttagccccacaccacacctattccaaaattgaccacatacttggaagtaaaactctcctcaaaaaatgcaaaagaacagaaattataacaaactatctctcagaccacagtgcaatcaaactagaactcaggattaagaaactcactcaaaactgctcaactacatggaaactgaaccacctgctcctgaatgactactgggtacataacgaaatgaaggcagaaatgaagatgttctttgaaaccaacgagaacaaagacacaacataccagaatctctgggacacattcaaagcagtgtatagagggaaatttctagcactaaatgcccacaagagaaagcaggaaagatctaaaatggacaccctaacatcacaattaaaagaactagaaaagcaagagcaaacacattcaaaagctagcagaaggcaagaaataactaaaatcaaagaagaactgaaggaaatagagacacaaaaaacccttcaagaaattaatgaatccaagagctggttttttgaaaggatcaacaaaattgatagaccactagcaagactaacaaagaaaaaaagagagaagaatcaaatagacgcaataaaaaattga

SEQ ID NO: 14294 - DNA, 383 bp, Homo sapiens
  SIMILAR (2)..(214): 951254mologous to Homo sapiens p40,accession number U93566,Smith-Waterman Score=336.
tgacggggagaatggaaccaagttgaaaaacactctgcaggatattatccaggagaactcccccaatctagcaaggcaggccaacattcagattcaggaaatacagagaacgccacaaagatactcctcgagaagagcaactccaagacacataattgtcagattcaccaaagttgaaatgaaggaaaaaatgttaagggcagccagagagaaagagaataaaatagctaggaatccaacttacaagggatgtgaaggacctcttcaaggagaactacaaaccactgctcaaggaaataaaagaggacacaaacaaatggaagaacattccatgctcgtggataggaagaatcaatatcatgaaaatggccatactgcccaag

SEQ ID NO: 14295 - DNA, 1539 bp, Homo sapiens; identical to SEQ ID NO: 3746
  SIMILAR (148)..(885): 251254mologous to Mus musculus This gene is isolated by means of differential display method using ttw, an excellent mouse model for ectopic ossification.~similar to megakaryocyte stimulating factor prec,accession number AB034730,Smith-Waterman Score=117.

SEQ ID NO: 14296 - DNA, 1118 bp, Homo sapiens
  SIMILAR (434)..(276): 451254mologous to Homo sapiens Human secreted protein encoded by Gene No. 5,accession number W73401,Smith-Waterman Score=72.
gagagagcacctggcggaagggatggctgtgggcacagcttcagcagacttaaacatttctgcctgctggctccgaagagagcaacagatctcccagcacagtgctcgagctttgctaagggacagactgcctcctcaagagaactccagctggcatccggcaggtgcccctctgggacgaaacttccagaggaaggagcaggcagcaatctttgctgttctgcagcctccactggtgatacccaggaaaacagggtctggagtggacctcgagcaaactccagcagacctgcagaagaggggcctgactgttacaaggaaaactaacaaacagaaagcaatagcatcaacatcaacggaaaggacgcccacgcagaaacccccattcaaaagtcaccaacatcaaagaccaaacgtagataaatccgcgaagatgaggaaaaaccagagcaaaaaggctgaaaattccaaaaaccagaatacctcttctcctccaaaggatcacaactcctcgccagcaagggaacaaaactggacagagaatgagtttgatgaactgacagaagtaggcttcagaaggtgggtaataacaaactcctccaagttaaaggagcatgttctaacccaatgcaaggaaactaagaaacttgataaaaggttagaggaactgctaactataataaccagtttagagaagaacataaatgacctgatggagctgaaaaacacagcaggagaacttcgtgatgcatacacaagtatcaatagctgaatcgatcaagcagaagaaaggatatcagagattggagaccaacttaatgaaataaagtgtgaagacaagatgagagaaaaaaagaatgaaaaggaatgaacaaagcctccaagaaatatgggactatgtgaaaagaccaaacctacgtttgattggtgtacctgaaagtgacggggagaatggaaccaagttggaaaacactcttcaggatattatccatggagaacttccccaatctagcaaggcaggccaatattcaaattcaggaaatacagagaacgccacagagatactcctcgagaagagcaactccaagacacataattgtcagattcaccaaagttga

SEQ ID NO: 14297 - DNA, 1217 bp, Homo sapiens
  SIMILAR (7)..(141): 551254mologous to Homo sapiens Human secreted protein, SEQ ID NO: 4473,accession number G00392,Smith-Waterman Score=107.
atgctgcctattctgggcagtaggcacccctctagcctagggcaggcccgaaagttggattataggccatccaagagccaatgcctagaacctgggaccccaagagcctgcttggtgctctacacccttgtggccaagctgatttataatgactatttcattcactactttgcccccagaggccttccacctatggagaagaatgtggtttttgttattgacataagtggcttcatgtttggtaccaagatgaaacaggatcacaacttctcactagcaagggaacaaaactggacagagaatgagtttgacaaattgatggaagtagacttcagaaggtgggtaataacaaactcctccgagctaaaggagcatgttctaacccaatgcaaggaagctaacaaccttgaaaaaaggttagatgaattgctaactagaataaccagtgtagagaagaacataaatgacctgatggagctgaaaaacacagcaggagaacttcgtgaagcatacacaagtttcaatagctgcaatgatcaagcagaagaaaagatatcagagattgaagatcaactcaatgaaataaaaccaaatctacgtctgattggtgtacctgaaagtgatggggagaatggaaccaagttggaaaacactctgcaggatattatccaggagaacttctccaacctagcaaagcaggccaaccgttcagattcaggaaataccagagaacgccacaaagatacttcctcgaggaagagcaactccaaggacacattaattgtcagattcaccaaagttggaaatggaagggaaaaaatgtttaaggggcagccaggggggaaaggtcggggtcaccctcaaagggaagcccatcacactaacaggcggatctctcggcagaaactctacaagccagaagagagtgggggccaatattcaacattcttaaagaaaagaattttcaacccagaatttcatatccagccaaactaagcttcataagtgaaggagaaataaaatactttacagacaagcaaatgctgagagatttttgtcaccaccaggcctgccctacaagagctcctgaaggaagcgctaaacatggaaaggaacaaccggtaccagccgctgcaaaatcatgccaaaatgtaaagaccatcgagactaggaagaaactgcatcaactaacgagcaaaatcaccagctaacatcat

SEQ ID NO: 14298 - DNA, 1554 bp, Homo sapiens
  SIMILAR (603)..(1001): 331254mologous to Homo sapiens human collagen type V alpha-2 chain,accession number M10956,Smith-Waterman Score=101.
atgcagctgtgcatagcggcagcagtgaggaccctggcctggcaggcccccacatcccttgctgagggctccaggggccagggctgctcaacaggaccaagaggaaatgaccacaggagcccccagctgctgggggtggcccccgcggtttcctgggccatttctgcagtcctcggggagcaccacgtgtgcctggctggggctgtgctctggggaaatggcaactgcgaggtcctcacagaccgggcccgggtcttaaccacagccgcatctcagcgccttgatattgctgagtggatgcccaaaaagcactgctgggtgaatgtgcgagtgaatgatgaagatggaggtggctgttggtgccagggcaaggccccaggagtctggggaggtggcaccaggcagttcaggctccacttccagacgccaagccattttctcactcccatctctcccgttgcccctatatctgagctgacctcctccctgagctctggtgaaattctagagagcccagaggtgcagctcacactcctgcgccacaaggcctttgcagtctccaccttcctgggacactccatcttagagctggtgctggtcactgggatctggtattggccgtggggacttgtccttggctgtggggacccagcgctggtccctgagacctggtactggccatggggacccgtccctggctgtgggtacccggtgctggtccctgagatctggtactggccatgggggcccgtccctggctgtgggtacccggtgctggtccctgagacctggtactggccatggaggcctgtccctggctgtgggtacccggtgctggtccctgagatctggtactggccgtgggggcccatccctggctgcagggactcagtattgtctatggggtctgtccctggcttcggggagccagtagtgcctgtggggcccatacctggtggtggggacctggtgctggaggatcctgacagcaaaaccacagaggcgacaggcctctccgtgccaggtctgcgctgttctccctggcctcggctcccacccacccggccccccagctacagacagcagcgattctccctcccactcaatggggccactgtccagcccatcattagtcttcagggctggcagatgacaccggccacgggcagtgtttcctccggccccagcacacaaggcacaaaagacaccatcctgccccaagaccctcctagtcacgtggcgcatgggaagcggtgccgggaatcttccagggcagtcccctgccccgggggagatcgtgttcaaatccccgaggaaatgctgctctttggccctttttctgaaaaaccccccaaggagaccttccaattcctcatcaaacaaactcacacgtacagcggactgggcatggccgccaccctcgggagccctcctgggaaagcttcccaaggctctgctgagctccgggaacaggtccctacctgtccgggaaccgggctggcactcaataaacaaatcaaagctcggcgccggaaggcagaactctgggactag

SEQ ID NO: 14299 - DNA, 912 bp, Homo sapiens
  SIMILAR (2)..(307): 1001254mologous to Homo sapiens beta-glucuronidase precursor (EC 3.2.1.31),accession number M15182,Smith-Waterman Score=535.
atggctgaaagggccaacgtagagctcaggctgtggcttcagtgggtggaagccacaagctttggaagcttccacatagtattgaacctgagagtgcacagaagtcaagaattggggtttgggaacctccacgtagatttcagaacatggaaactcctggatgcccaggattaccaaaccaataacaatgaccaggcagtagttgaaatctgtatcacaagaatcacaacagccatcagagagaccgagtccattgaaaagcatgcaaaggcccttgtggggctctgggactcctgcttggaacataacctgagaccctttgggaaagacgaagacactcctcatgcaaaaatcgcatctgatatcatgagttgcattttacaggccaaagcccgccagtttgcccgtgtgccacgcagcagccggcttcttcgcgcttaccgcgcggcccacagatgcggagaagagggcaagccagggcagaggatggcacgacaacgggaccaaacagtgacccctgcaggtgactggacgataacttggcctaggaccggccccccgccactgcaagctgcgttccctctgtgctcacaccctgcagcagtcaaagcactcccactcacacacgggctgcacacgcatagttgcagtacaccgaactcacacacactacacggaaggaaaaaagaaaaagactttgcagatgtgattaaagatttggggataggagattttccggcgttagcagtaggacccaatgcaatcacaagcatccttagaaagaaaggcagagggcccttccatgcttccgcatataagaggagaaggcaatgtgagcaggaagcagagactgaagtgatgtggccacaagccaagggatgccagcagccaccagaagctggaagaggctag

SEQ ID NO: 14300 - DNA, 511 bp, Homo sapiens
  SIMILAR (2)..(151): 541254mologous to Drosophila melanogaster Melted,accession number AF205831,Smith-Waterman Score=142.
tgatatcatgagttgcattttacagaattacaaccgacccccagtgatggcattagccatccccattgcagtgaaattcctccacagaggcaacaaggaactgtgcaggaatatgtctaactacctgtctctggctgcaattaccaaggcagattctcctggctgatcacacggaagttatagtaaagagcatactccaagtttgaagaactgcatttccgtgcttctggtcacctgttcaactaccaactgtggagatcttatctctgtgtactgagtggaacacgtcactcagtggggtatgaaaaacctgtcttcatttgcttccaaaagcaagaaatgtcttttgttagataaaatacatcagaaaatgtgtaatgacttcttaaatgtgaacatgatttggataacaagcataaatactagcataaaaagccaaatagtacacctctgttaattgttacaacatttgaatgaataagaagctcaaattagttcatgcaaaaaaaaa

SEQ ID NO: 14301 - DNA, 1668 bp, Homo sapiens
  SIMILAR (593)..(1114): 471254mologous to Drosophila melanogaster Melted,accession number AF205831,Smith-Waterman Score=379.
ttgaaaattgtttcctgcgtggctcgcccccgccccccattcttccctgggaaagtatagattttcacgaacacagggagttctgttttctctgttaaaaacaactctcctttactggagcaggctttgtgtttcacctcaggaaacagagcgttgcactgggaggtaactccgctgggtgaggtgcagcctgtcacctgaccggtctctggggctgccggtggcatcaggctgcattccttgaattcttccacccggcaccggctccgcaatgaacaacttcaggttcactgagctgagcggattccactcgctgtgccctcggagcctgcctgaatctcccgcccagtctcaaaccatgcagctgagtaactgcaagggcgcctttgaggagtagcacgcagagagtgtcaatgaagacctcaaagtctggagaaaaatgacctttcatggaataagaagtatacctccttctacatgtttttgtcttactgacctctgataactggaacacatgactctgggtctgtagaaagtcaactgatcaaactcatcctcaccatgcatcaactgttcagactggttttgggacaaaaagatctttcacgagctggggacctcttcttcttagaataactctgagattgaagacagccttacagaagctttggagcaaattaagataattagctcatcttcagattaccaaaccaataacaatgaccaggcagtagttgaaatctgtatcacaagaatcacaacagccatcagagagaccgagtccattgaaaagcatgcaaaggcccttgtggggctctgggactcctgcttggaacataacctgagaccctttgggaaagacgaagacactcctcatgcaaaaatcgcatctgatatcatgagttgcattttaccagaattacaaccgaccccccagtcgatggcattagccatccccattgcagtgaaattcctccacagaggcaacaaggaactgtgcaggaatatgtctaactacctgtctctggctgcaattaccaaggcagatctcctggctgatcacacggaagttatagtaaagagcatactccaaggtatggtgcgaaagttgagcttgggcacatgttttgggagatatttaaaagtattttcatcaagcatttatggtttgtgggaagcaagacctagagtattagaagcaaattaatttctctgttttgctgccagttgacctgtgaacatgcaaaaggttacttaatctggctgtctgtgtcccttcccaaggcagatgaattacttagactcattaaaagaattgtaagcattcttccaaatctgtgtttctcagtttgaagaactgcatttccgtgcttctggtcacctgttcaactaccaactgttggagatcttatctctgtgtactgagtggaacacgtcactcagtggggtatgaaaaacctgtcttcatttgcttccaaaagcaagaaatgtcttttgttagataaaatacatcagaaaatgtgtaatgacttcttaaatgtgaacatgatttggataacaagcataaatactagcataaaaagccaaatagtacacctctgttaattgttacaacatttgaatgaataagaagctcaaattagttcatgaaaaaaaaaaaaaaaaaaa

SEQ ID NO: 14302 - DNA, 1117 bp, Homo sapiens
  SIMILAR (1600)..(2388): 951254mologous to Cloning vector pSacBII SacB,accession number U09128,Smith-Waterman Score=1304.
gtaacgtgtccgtgtggtggaattcgctctcagaaaggtactgtgaccaccacttgcttggctctccaacttcctcccccatttccctcttgactcctgtttgccataacaccttctgtcccctagccttgcctcaggtccccgacgaatcctgcccttaatctgtgggggtggtaggtggcactggtttgaagagcttactggatctccctcagtgagtcagcctggagttgtgtttgaaaaccacaggccctgactgtggctgtcagacctcccagacaccacctgctgctgcctatcatcatcttcaggtgctgggctcccctgtgggcctcgtctgcccgccctctgctgcagctgtcccatgggcgcccgccctctctgacaccacaagagagcccatctagattccaggaaaaaactcatctttatttgccttcttcccactgaaggtaaaagcaacattaataaccacaacaaatacttagtgagtgcttactattattcatttacttgttggcccttccatccctggccatgatgagagacatgccatagcttactcctaaagagacctgaggacacacgtgcacaaacatattgggcatatcatcaatggcatcaaaactgattttccctgtctacccagaacaggcctgagggagagggaaaagcggatacccacctgtgtcgctgtttgcgtgccaagtccaggaacagtccatacagccctgctgcatcccacgacgctgtcacaaagcaggagttcatccgaggccaaggtgttgtcatgagaatattcgttaaagtagggacgctgactttgttcttgggcagattctcttcctgtggagtatccagcctgtttgcctagttttcctgttcttctggggtctgatctctatctgttttactgcagtccagttaccaaagtggtataagtaaaattgaaagaattctaaataccttttccccccacgttagctgcctcacgttaatgtggtcttacggtctgcaaataagtggtttgatgatttggcgactgcagttacccatactagctctcctaccactcactactgacagttaattattatcgaatatccacccacccagg

SEQ ID NO: 14303 - DNA, 1368 bp, Homo sapiens
  SIMILAR (1349)..(1125): 331254mologous to Homo sapiens Human secreted protein sequence encoded by gene 2 SEQ ID NO:87,accession number B08930,Smith-Waterman Score=76.
atggtgtccacaggcagtgtggatgttgtccagggaagtgagcgaaagaggtccttagtggaaaaaagattagaattcttgaacactatttggacagtctatataccggaagcccatcagtcacagagcaacaagccatgggcagccttccttctgaaatatgcaccaaaaacttgttctgatatctttccagaaatcccaccccagagaagtgaccagaaagccaaaagatatgttaaagagctattagatgaccagaatgacctgaaatatcttgaaaagagttatcagctgcatgcgatggctcacacctgtaatcccagcacttcaggaggccaaggaagagaatctgcccaagaacaaagtcagcgtccctactttaacgaatattctcatgacaacaccttggcctcggatgaactcctgctttgtgacagcgtcgtgggatgcagcagggctgtatggactgttcctggacttggcacgcaaacagcgacacagattaagggcaggattcgtcggggacctgaggcaaggctaggggacagaaggtgttatggcaaacaggagtcaagagggaaatgggggaggaagttggagagccaagcaagtggtggtcacagtacctttctgagagcagtcattggttattatgctctggaggagaggaggaaatacgtaacagagaccttcagagggaacgagcagatcgcacatttgttctttccatatgtccaggcactgccaatgatgcaaatgtcttctaaaggagcctgctcagctgaagccagggatgcccttgatacaaaaacacactttccacttgcaatgataccctcatatttactgctaaatgggaatattggagagctgccagagggcccggcgggaggctgcgcccagaatcctgggctttgggcctctggggcccggcgaggagatgaagaagtcaagcctcgagctctccggaggttcgatggccgccgggccagtgcgggctcagaggaagaccctgcaaaaaagagcgctcgcccccacccctggagccgaccctgcgcatcgccgtatcgcggggctggcggccagcgccttagaagagcctgctccgccgcaggaagaaagacgcccgacaggcgcccactgcccgaacccacgcgggggccagtcagccagcgggccgtgttgggaaagctccgcgcggcggcgggacataggatccccatcggggacctgggcgacggcctgagcttgggcgcccctccagctgggcgtcatctccacacagttcttcccttgcgccgcgaattcagcccctgtgaagacgctttgggcattggcgagcaacaggggaaaaaacgagtcacttaa

SEQ ID NO: 14304 - DNA, 1353 bp, Homo sapiens
  SIMILAR (1255)..(710): 561254mologous to Chlorocebus aethiops diphtheria toxin receptor associated protein,accession number D10726,Smith-Waterman Score=418.
gacctgtactgcgcggtggaattcaggaatttgcctatattaaggcattgtatgaaaggaaatttcttgttcctaagccaattgattacaatcgccatgcagtggacatggaactcataaatggttatccactatgttagatacaccatgttgaagatcctgcatcagtatatgatgaagctatggaactaattgtcgaacttgcaaatcatgggctgattcatggagattttaatgaatttaatctcattttggatgaaagtgaccatatcaccatgattgattttccacagatggattcaacttctcatcccaatgctgagtggtattttgacagagatgttaaatgcattatagatttctttatgaaacgtttcagctacgaaagtgagctttttccaacttttaaggatatcaggagagaagacactcttgatgtggaggtttctgccagtggctacacaaaggaaatgcaggcagatgatgaactgcttcatccattaggtccagatgataaaaatattgaaacaaaagagggatctgaattctcattttcagatggagaagtggcagaaaaagcagaggtttacgggtcagaaaatgaaagtgaacggaactgtctagaagaatcagagggctgctattgcagatcatctggagaccctgaacaaataaaggaagacagtttatcagaagagagtgctgatgcacggagttttgaaatgactgaattcaatcaagctttagaagaaataaaagggcaggttgttgaaaacaactctgtaactgaattttctgaggagaaaaacagaactgaaaattacaacaggcaagatggtcagagagttcaaggaggagtccctgctggctctgacgagtatgaagatgaatgccctcatctaattgccttgtcgtcattaaatagagaattcaggcctttcagagatgaagaaaatgtgggagctatgaatcagtattagaaccaaggactcctgagtatcacttctttcaggcagtgctgtaagctgttcaacaattcctccagaactggtgtaacagaaggtgaaacgtcagttgacaaaacagcaaaaatcagctgtcagacgtcgattgcagaaaggagaagcaaatatatttaccaagcaacgtagggaaaacatgcaaaatatcaaatcaagtttggaagcagccagcttttggggagaataatatatttaggatcttggatatgtttaatatattttttaaagttactgtaattcctttttgagccctcatttgtcttttttgagccaaggctatcatatattaataaataaaccctctttcatctataaaaaaaaaaaaaaaaaa

SEQ ID NO: 14305 - DNA, 2135 bp, Homo sapiens
  SIMILAR (734)..(811): 801254mologous to Homo sapiens Nkx-2.5,accession number AB021133,Smith-Waterman Score=108.
atgggaagtaaagtcaaagaagtggaagatgatagccagatgtctgatttggtgagaggaatgaatgccttcagcaaaacaggaagtggaggagtggagcagggaagaaccgggcagggagggacaaacgggcacataaagaaagcgaaagcccgagacagggacaggaggtttaagaagacaccccaaaggaaagttggaaacgataacttgcagctcccactcagatggacagagcagcatgcagagactcacattatgaacttctgctccaagaactacaacaggaacataccaggaaaaccaagagaatccatagacactttgaatgaagcagcttgccgcggcaggctcagtaagacagccagaaaactctggtcggaagctcaggatcagagaagtttccaggccacagagatgcaagcgtttctcttcagcgcaaagcgaatagcagcagaaaagaaaacaattattagaagacgggacctttgctctatctgggggaagcttctgccacgtcccgggtcccagagtgtgcctgctcagatcccagaaaacttgcaggaacaggaagagagagcaaagtggttacttaatgggaggagcaaatttttcccgcaaacaacttctactctaggcaaagtgacttccaacaagacaggggtaaaagaacctgagctagagtccagacaaccaaatctgttaaaggttgaaatgggcatgaagaaccatgaaattgttcccggcagtttgattgcttctatagccagccttaaacatggtggctgtaataaagttttaagagaattagtgaaacataaactcatagcttgggagcgtaccaaaactgtccagggctatcggttgacaaatgcaggatatgattacctagctttgaaaacactttcttctaggcaagtagttgagtctgttggaaaaccagatgggtgttggcaaaagaatcatatatttacattgttgcaaatgaagaaggacaacaatttgcattaaagcttcacagactaggaagaacctcgtttcgaaatttgaaaaacaaacgcgattatcataaacataggcacaatgtgtcttggctttatttatctcgtctctctgccatgaaggaatttgcctatatgaagttcaggacgctggaaataagagattatttttactgggtcaaaatcaacgtgttgacaggaccatgttcccccaagaggggctctagtggagaatttgttccttgccttttgcagctcctactgggatttggtgactgctggcattcttttggcttgtggcacatcactccagtctctgtctccatgcttacgttattgccttctctactcttggtgaagcaaaaaaagcccacattagattcacggatgggtcagtttgattttgtagttgaactacagctctatttgtgtgtccttgaaagagaagtgatcagggaatatcctcctgatgggcagatctttggaaggtattttgacagagatgttaaatgcattaaagatttctttatgaaacgtttcagctacgaaagtgagctttttccaacttttaaggatatcaggagagaagacactcttgatgtggaggtttctgccagtggctacacaaaggaaatgcaggcagatgatgaactgcttcatccattaggtccagatgataaaaatattgaaaccaaagagggatctgaattctcattttcagatggagaagtgccagaaaaagcagaggtttacgggtcagaaaatgaaagtgaacggaactgtctagaagaatcagagggctgctattgcagatcatctggagaccctgaacaaataaaggaagacagtttatcagaagagagtgctgatgcacggagttttgaaatgactgaattcaatcaagctttagaagaaataaaagggcaggttgttgaaaacaactctgtaactgaattttctgaggagaaaaacagaactgaaaattacaacaggcaagatggtcagagagttcaaggaggagtccctgctggctctgacgagtatgaagatgaatgccctcatctaattgccttgtcgtcattaaatagagaattcaggcctttcaggtatagacttctgtcgattgctttttaa

SEQ ID NO: 14306 - DNA, 1974 bp, Homo sapiens
  SIMILAR (2582)..(2815): 611254mologous to Homo sapiens PRO2221,accession number AF116695,Smith-Waterman Score=224.
atggggttgtggctccctggtgatgcgactcccgtttattttgcttttcattttggaataaatggatttagccatactgctcagcctgccccctctgctgtcctgcaggctctggcggtggccatccagcttggtggccatctggctgatccactcctccaggtggaccctctgtcctcatgtgaagtacagaggaacctggtgccggccgcagtcaacccctatgtgatgatctttctacccgccctctttcgtgtcttggtgctggctgctgtctttggccagctaaaagaatatcagcaaaggaagagccctggtattccagcaggagcaaagacaaaaaagaaaaaaactgacagtagccctgagacaaccacttccggtggttgccactcacctggggatagccagtaccaagaactagcagtagccctggagtcaagctcagtgacaatcaatcagctcaatgaaaacatagaatcattgaaacagcagaagaaacaagtggaacatcagctggaagaagcaaagaaaacaaacaatgaaatacacaaagcacaaatggagcagttagagacaatcaacatcctcacattggaaaaggcagacttgaagaccaccctttaccatactaaacgtgctgcccgacacttcgaagaagagtccaaggatctggctggccgcctgcaatactccttacagcgtattcaagaattggagcgggctctctgtgctgtgtctacacagcagcaggaagaggacagggggcactgcctgagctccccagatcaaaacttctcactcttcaccatccagtcctcgagctgcagagaagcggtcctccaccggcggttacagcagaccataaaggagcgggcgctgctgaacgcacacgtgacacaggtgacagagtcactaaaacaagtccagctagagcgagacgaatatgctaaacacataaaaggagagagggcccggtggcaggagaggatgtggaaaatgtcggtggaggctcgaacattgaaggaagagaagaagcgtgacatacatcggatacaggagctggagaggagcttgtccgaactcaaaaaccagatggctgagcccccatccctggcacccccagcagtgacctctgtggtggaacagctacaagatgaggccaaacacctgaggcaggaggtggaaggtctggagggaaagctccagtcccaggtggaaaacaatcaggccttgagtctccttagcaaggaacaaaagcagagactccaggagcaggaggagatgctccgagagcaggaggcgcagagagtgcgggagcaggagagactgtgtgaacaaaacgagaggcttcgggagcagcagaagatgctacaggagcagggtgagaggctgcgaaagcaggagcagaggctacgcaaacaggaggagaggctgcgaaaggaggaggagaggctgcaaaagcaggaaaagaggctgtgggaccaggaggagaggctgtggaagaaggaggagaggctacaaaagcaggaggagaggctcgcgctctcccagaaccacaagctcgacaagcagctggccgagccacagtgcagcttcgaggatctgaacaacgagaaaaagagcgcactgcagttggagcagcaagtaaaggagctgcaggagaagctagacgaggtgaaggagatgcagtacatggccacctatcagcagctgacctctgagaaggaggcgctgcacaggcagttactgctgcagacccagttcgtggaccagctgcagcagcaggaagcttggggcaaagcggagcacctagaagctgccagccaccagaaccaacagctagagacccagctaagcctcgtggctctccctggagaaggagatggaggacaacatctggacagtgaggaggaggaggcgcctcggcccacgccaaacatcccagaggacctggagagccgggaggccacg

SEQ ID NO: 14307 - DNA, 4136 bp, Homo sapiens
  SIMILAR (140)..(652): 301254mologous to Arabidopsis thaliana putative protein,accession number AL132977,Smith-Waterman Score=158.
gagctccgccacgcgaggtttcgggctcgtggttttgcttcctccggccaaggtccccgccgctgcatccctcgcggcttcccgtgcgctccgggccggagccgagccgcctgcgctgccacagccagcgcctccacacactcgcagacgctcacacgctctccctccctgttcccccgccccctccccagctccttgatctctgggtctgttttattactcctggtgcgagtcccgcggactccggcccgctatttgtcatcagctcgctctccattggcggggagcggagagcagcgaagaagggggtggggaggggaggggaagggaagggggtggaaactgcctggagccgtttctccgcgccgctgttggtgctgccgctgcctcctcctcctccgccgccgccgccgccgccgccgccgcctcctccggctcttcgctcggcccctctccgcctccatgtgccggatagcgggagcgctgcggaccctgctgccgctgctggcggccctgcttcaggcgtctgtagaggcttctggtgaaatcgcattatgcaagactggatttcctgaagatgtttacagtgcagtcttatcgaaggatgtgcatgaaggacagcctcttctcaatgtgaagtttagcaactgcaatggaaaaagaaaagtacaatatgagagcagtgagcctgcagattttaaggtggatgaagatggcatggtgtatgccgtgagaagctttccactctcttctgagcatgccaagttcctgatatatgcccaagacaaagagacccaggaaaagtggcaagtggcagtaaaattgagcctgaagccaaccttaactgaggagtcagtgaaggagtcagcagaagttgaagaaatagtgttcccaagacaattcagtaagcacagtggccacctacaaaggcagaagagagactgggtcatccctccaatcaacttgccagaaaactccaggggaccttttcctcaagagcttgtcaggatcaggtctgatagagataaaaacctttcactgcggtacagtgtaactgggccaggagctgaccagcctccaactggtatcttcattatcaaccccatctcgggtcagctgtcggtgacaaagcccctggatcgcgagcagatagcccggtttcatttgagggcacatgcagtagatattaatggaaatcaagtggagaaccccattgacattgtcatcaatgttattgacatgaatgacaacagacctgagttcttacaccaggtttggaatgggacagttcctgagggatcaaagcctggaacatatgtgatgaccgtaacagcaattgatgctgacgatcccaatgccctcaatgggatgttgaggtacagaatcgtgtctcaggctccaagcaccccttcacccaacatgtttacaatcaacaatgagactggtgacatcatcacagtggcagctggacttgatcgagaaaaagtgcaacagtatacgttaataattcaagctacagacatggaaggcaatcccacatatggcctttcaaacacagccacggccgtcatcacagtgacagatgtcaatgacaatcctccagagtttactgccatgacgttttatggtgaagttcctgagaacagggtagacatcatagtagctaatctaactgtgaccgataaggatcaaccccatacaccagcctggaacgcagtgtacagaatcagtggcggagatcctactggacggttcgccatccagaccgacccaaacagcaacgacgggttagtcaccgtggtcaaaccaatcgactttgaaacaaataggatgtttgtccttactgttgctgcagaaaatcaagtgccattagccaagggaattcagcacccgcctcagtcaactgcaaccgtgtctgttacagttattgacgtaaatgaaaacccttattttgcccccaatcctaagatcattcgccaagaagaagggcttcatgccggtaccatgttgacaacattcactgctcaggacccagatcgatatatgcagcaaaatattagatacactaaattatctgatcctgccaattggctaaaaatagatcctgtgaatggacaaataactacaattgctgttttggaccgagaatcaccaaatgtgaaaaacaatatatataatgctactttccttgcttctgacaatggaattcctcctatgagtggaacaggaacgctgcagatctatttacttgatattaatgacaatgcccctcaagtgttacctcaagaggcagagacttgcgaaactccagaccccaattcaattaatattacagcacttgattatgacattgatccaaatgctggaccatttgcttttgatcttcctttatctccagtgactattaagagaaattggaccatcactcggcttaatggtgattttgctcagcttaatttaaagataaaatttcttgaagctggtatctatgaagttcccatcataatcacagattcgggtaatcctcccaaatcaaatatttccatcctgcgcgtgaaggtttgccagtgtgactccaacggggactgcacagatgtggacaggattgtgggtgcggggcttggcaccggtgccatcattgccatcctgctctgcatcatcatcctgcttatccttgtgctgatgtttgtggtatggatgaaacggcgggataaagaacgccaggccaaacaacttttaattgatccagaagatgatgtaagagataatattttaaaatatgatgaagaaggtggaggagaagaagaccaggactatgacttgagccagctgcagcagcctgacactgtggagcctgatgccatcaagcctgtgggaatccgacgaatggatgaaagacccatccacgctgagccccagtatccggtccgatctgcagccccacaccctggagacattggggacttcattaatgagggccttaaagcggctgacaatgaccccacagctccaccatatgactccctgttagtgtttgactatgaaggcagtggctccaccttggggtccttgagctcccttaattcctcaagtagtggtggtgagcaggactatgattacctgaacgactgggggccacggttcaagaaacttgctgacatgtatggtggaggtgatgactgaacttcagggtgaacttggtttttggacaagtacaaacaatttcaactgatattcccaaaaagcattcagaagctaggctttaactttgtagtctactagcacagtgcttgctggaggctttggcataggctgcaaaccaatttgggctcagagggaatatcagtgatccatactgtttggaaaaacactgagctcagttacacttgaattttacagtacagaagcactgggattttatgtgcgctttttgtacctttttcagattggaattagttttctgtttaaggctttaatggtactgatttctgaaacgataagtaaaagacaaaatattttgtggtgggagcagtaagttaaaccatgatatgcttcaacacgcttttgttacattgcatttgcttttattaaaatacaaaattaaacaaacaaaaaaactcatggagcgattttattatcttgggggatgagaccatgagattggaaaatgtacattacttctagttttagactttagtttgttttttttttttttcactaaaatcttaaaacttactcagctggttgcaaataaagggagttttcatatcaccaatttgtagcaaaattgaattttttcataaactagaatgttagacacattttggtcttaatccatgtacacttttttatttctgtatttttccacttcactgtaaaaatagtatgtgtacataatgttttattggcatagtctatggagaagtgcagaaacttcagaacatgtgtatgtattatttggactatggattcaggttttttgcatgtttatatctttcgttatggataaagtatttacaaaacagtgacatttgattcaattgttgagctgtagttagaatactcaatttttaatttttttaatttttttattttttattttctttttggtttggggagggagaaaagttcttagc

SEQ ID NO: 14308 - DNA, 1835 bp, Homo sapiens
  SIMILAR (277)..(417): 471254mologous to Human T-cell lymphotropic virus type 1 Gag,accession number S74562,Smith-Waterman Score=146.
atgggggaggctgtgctcgagaaatcacccagtcttgctctatctgccactcagtgtcaccccagggctccttccggccgctgccttttccttcccaccaagcctggggccaggtgggtagaagcattcccaaccacttcagaaggtgcaaatgtcatcacacaaactctcatcatgcatataattccccatttcggactcccaacatccatccagtccaataacaggcccgccttcatcagccaaattaaccaaggcatctctacatccttagatgataacggaaaagtggttctagaaattgcttcaaacatcagttccagcccatgtaccagtccaaacctggaagggatgggacccaacaaaccttctaggagggccggagaacagtctccaactcgccgggggaccggaaagaggagccgagaagcgcccctcggcccccacgcagcggaggcgcggagtggcgggactgctgctctttgtgggtgcagcacgcacgacccggagcgccctccccgcggcgctgtccccggcgtcttcgtcgcgccgagcggccctggagcggggacccggaggaagcaaaaccacgagcccgaaacctcgcgtggcggagctcttggggagcgccatccgctccacttccacctccacatcctccaccggccaaggtccccgccgctgcatccctcgcggcttccgctgcgctccgggccggagccgagccgcctgcgctgccacagcagccgcctccacacactcgcagacgctcacacgctctccctccctgttcccccgccccctccccagctccttgatctctgggtctgttttattactcctggtgcgaagtcccgcggactccgcggcccgctatttgtcatcagctcgcttctccattggcggggaagcgggagagcagcgaaaaaagggggtggggaggggaggggaagggaagggggtggaaactgcctggagccgtttctccgcgccgctgttggtgctgccgctgcctcctcctcctccgccgccgccgccgccgccgccgcctcctccggctcttcgctcggcccctctccgcctccatgtgccggatagcgggagcgctgcggaccctgctgccgctgctggcggccctgcttcaggtacgcggcggtccccgcgggccgggccacgggcgggtatctcccccgggcgagaagttccgttacgcggctgctcctttctctgtccggctgcctgtgccctatatgcgccccgggggcgcctttgcctggagccttccgtacttttcataccctcgggagagagccagcgagccttttcatttaatctctactaagaggctcctccgcggcaggaagcacctgctccagtccgggcgcaggttccctcgccactgcacgctgcgggttcccagcccgggggcagcccaactttccgccgcctccaacccgaggatgcccccaggctcctcccgaccagccagcccaggcctggaggccacttcacacagcctcggccgggaccctctagctgggcgggtgcagtgccctggtcccaagtcggtctccgcctgccgtggggtccctcgaaggttgcgggaaaggggcgtgcccaccctcgccgcggggcaggaaaatccacggagggtccccctgcctgtcgccctcggggcaaggggagaggtgctctactgccagctggcagccccgaaaagtgcggacgcagctcggaagtgcctgctccgggggtggagacaggtggtgtggattaccccgctccgtggtcttcacgggtcagggcctggcgcgctccggcccgccggggggtga

SEQ ID NO: 14309 - DNA, 465 bp, Homo sapiens
  SIMILAR (201)..(440): 651254mologous to Mus musculus NK10,accession number X79828,Smith-Waterman Score=285.
tccgtgtcgtggaattcgacacggatcctctaaggcccagagtgtcccgagtagcggcagtggggagtgctcagggtacgctaatgatctgtgtcttgtaaagagcatattgctgggcttacatccgtttatcttgtttgactgttattttaatagcttggtgttctcaagagtctgccctttccgaggaagaagaggatacaaccaggcctcttgaaacagtgacatttaaggatgtggctgttgaccttacccaggaggagtgggagcaaatgaaacctgctcaaagaaacttgtatcgagatgtgatgctggagaactacagcaacctagtcacagtgggctgtcaagtcaccaaaccggatgtgatattcaagttggagcaagaagaggagccctgggtgatggaggaagaaatgtttgggaggcactgtccagaacccagaagaggagagaactgctgtg

SEQ ID NO: 14310 - DNA, 330 bp, Homo sapiens
  SIMILAR (106)..(903): 661254mologous to Homo sapiens p40,accession number U93569,Smith-Waterman Score=812.
atgtgcatgtccgtaaaggctgtagcaaataaaacattacaaagtggccagcagcacccagtagccttgtctgaaagttttgtagcaaatgcttctggtaagacaacccagtctgccacacaggatggattcctggcaaattctagagcacagatttccagcaagttccacagcaggaacaggacatggctaaggcaagaaacagtgacatttaaggatgtggctgttgaccttacccaggaggagtgggagcaaatgaaacctgctcaaagaaacttgtatcgagatgtgatgctggagaactacagcaacctagtcacagtgggctgt

SEQ ID NO: 14311 - DNA, 531 bp, Homo sapiens
  SIMILAR (42)..(728): 661254mologous to Homo sapiens NAG13,accession number AF194537,Smith-Waterman Score=745.
atgctgctaaacatcccccaacacacaaggcagtcccccagagcaaagaattatctggcccaaaatgtcaatagtgtcaaggcttggtgttctcaagagtctgccctttccgaggaagaagaggatacaaccaggcctcttgtacgtcttaagcatttatttgtttcctgcattattttgcagtgcagttacgtactcctacctctgacccctgagtaccagctaaacaagttcttgtatgttgtgatcacaatgcctaattttgatgacttcaaattaattagcattatgtttttacaggaaacagtgacatttaaggatgtggctgttgaccttacccaggaggagtgggagcaaatgaaacctgctcaaagaaacttgtatcgagatgtgatgctggagaactacagcaacctagtcacagtgggctgtcaagtcaccaaaccggatgtgatattcaagttggagcaagaagaggagccctgggtgatggaggaagaaatgtttgggaggcactgtccaggtgaataa

SEQ ID NO: 14312 - DNA, 543 bp, Homo sapiens
  SIMILAR (441)..(515): 601254mologous to Mus musculus Zfp64p,accession number U29498,Smith-Waterman Score=75.
atgccaaccacaacgacaagagagatgacacagaatagcagcgaaacaatcaagaacaaaaacggaaagaaacagagaaaacaaagaaagaacagcaagaaaaatcggagaaagcagaaagacgaagacaaaacaagaagacaaaacaaaagacaccacaagaaaaacgacataaacccagaagaggagagaactgctgtgcgtctgaaggatggcggagctccagctccacaggctgttcaggagcatgatgctggcatctgctccgcttctgggggtgctcaggaaacttacatcctggtagaaggcaaaggagaagccagcacttcacctggccagagcaaaggaagcagggaaggaggagtgggagcaaatgaaacctgctcaaagaaattgtatcgagatgtgatgctggagaactacagcaacctagtcacagtggctgtcaagtcaccaaaccggatgtgtattcaagttggagcaagaagaggagccctgggtgatggaggaagaaattttgggaggcactgtccaggtgaataa

SEQ ID NO: 14313 - DNA, 1230 bp, Homo sapiens
  SIMILAR (1)..(669): 951254mologous to Homo sapiens putative p150,accession number U93563,Smith-Waterman Score=1092.
ttcgtggctgccggcattcgcggctgcggggcccggaggtgggactgtcttcccggtgccgcgagggcgggtccggacagccttccccccagtccggcgcaccatgtccctgccttgtggctggaggcgccgcggacccaaagggagggaccatcccgggaagcagccccgagagcggaagtgcagaatggcttcctcgagagagtaaagtgcagcctctccagacactggggccccagtgggcgtgggcgaagttgctgggaggaggagttggcggaagcacttggaactcctttataagtggcagctgtgagattttaatttgatttgaaaatgagtaagtgcagaaagacaccacttcagcagctagcaagtcccgcgtcattcagcccagatattcttgctgacatttttgaactctttgccaagaacttttcttattggcaagccacttaataatgagtggcagttaccagatcccagtgagattttcacctgtgaccacactgaatttaatgcatttccttggatttgaagaactccctaaaatgaagtaaaaaaacctactggagtgataagaacctgggatgagtggcatgagcacacttgctttcactaataaagcggggaaaatcatttcctcatggtagaaaatctgtgaatgctgaactttggactcaagcatggtgtaagttccatgagattttgtgcagctttccacttattccacaggaagcttttcagaatggaaaactgaattctctacacctttgtgaagctccaggagcttttatagctagtctcaaccactacttaaaatcccatcggtttccttgtcattggagttgggtagcgaatactctgaatccataccatgaagcaaatgacgacctcatgatgattatggatgaccggcttattgcaaataccttgcactggtggtactttggtccagataacactggtgatatcatgaccctgaaattcttgactggacttcagaatttcataagcagcatgggtactgtgcacttggtcactgcaaatgggagtttcgattgccaatgaaacccagccggagaccagagaatggtaaaaggtcactgttacttcccatcgtggaattggctacatctgtccaaacatactcaatgtggaaatgaatttatcttcatgacaaagaaaaagcagtccctgacagccaagagcttgcctgacaccttcagctag

SEQ ID NO: 14314 - DNA, 410 bp, Homo sapiens
  SIMILAR (399)..(235): 671254mologous to Mus musculus contains transmembrane (TM) region,accession number AB030182,Smith-Waterman Score=168.
ttaagagaaaggaaattacaaactctcttgacgctgcagccagccgtggcactgtccctgccgccctggctggtgtccagtacttagaacccagggcaggtgctgccggccgcctggggggtgctgggtgggggcgcgtcccaaggcctgggagctcctgtcattgtcactggtcggtcgctgaggctggaggccacaggagcaggatcagctgtttcctcacttacgcaggcagctgtcctcttcctccgtaaacacgctgaccacctggcagccacagacaaagcccagaagcgcgatcaggatctgccggccaccggtgaagggccctcacatactggggctcagggcacagccagcacctgacaccaggtcctggccatggggggccccgaggcccactgctggca

SEQ ID NO: 14315 - DNA, 1143 bp, Homo sapiens
  SIMILAR (928)..(1095): 831254mologous to Homo sapiens Human secreted protein, SEQ ID NO: 5210,accession number G01129,Smith-Waterman Score=249.
tcaggccacgggctccttagatttggaattcagctcccaccgccagccgccggccatggagcctcgctcctggaagccccaggtccacctggtgtgttgcgtcgacaccaccgtgcgcaccaggaaaagccagggagcctcgagatcggtcagaagttcctccagcgacggcaccagccgtgctgcagtcacattggccctgcccccggagctcgcgatcaggatctgcaggcaactgtgtagggcctccacatagctgggctccagggcacagccagcacctgacaccagggcctggccatggggggccccgaggcccactgctggcacctcctcatgcagacagcctggccagcgctcacgccaccaggagcgatgccgggagaggctgaaggtcagtagctcgctgtcctcctcctccaggaaggcctccctgcccagaccccagaactcgctctcaggggcaccgggccccttcctcgtgtcgctggccaaagctgccatgtgacgtgtgtctgcctcgggacagtcttcccggctgcagccccaggtgtggttccaggaagcgggggcccgtctgcctggctgggcacctgccccagtgcccacctgtgctacactggccagagcagagagcccctttaagaggccaccgacttccaggtagaagcagatgatgaagacgttccaggtgacccagacggctgcccacagcgtgtagtgggtgccccgggaatgaggcggtgggacagccagctcaagggagccccagcgcaggtcggcgtacggacacagcatccctggctgagctgccgtgacctgtcctcgcctcaccgggctgacattacacgtggacagcacaggcctccacaccatgacatagcgcagccggtactggatggtgccgaagagtcccaggatgacgatgatgatgtggacaaagttggccaggatgggcgcccactggtagcccaggaagtcaaacacctgcctctccagggcggcgacttcctgacgctcatgcatcaccagctgccactggccatgctccaaactggggtaccgtccaggctggtgcctgtccttcatgaggtcatccgacgggcactggagtcttcgagtgcccacccttgctctccccat

SEQ ID NO: 14316 - DNA, 499 bp, Homo sapiens
  SIMILAR (319)..(257): 521254mologous to Arabidopsis thaliana F24O1.6,accession number AC003113,Smith-Waterman Score=55.
ttgtatgttttcttttcttttttttttttaagagaaaggaaattacaaactctcttgacgctgcagccagccgtggcactgccctgccgccctggctggtgtccagtacttagaacccagggcaggtgctgccggccgcctggggggtgctgggtgggggcgcgtcccaaggcctcgggagctcctgtcattgtcactggtcggtcgctgaggctggaggccacaggagcaggatcagctgtttcctcacttacgcaggcctgtggggacaaggtcagagagcacctgggggaacagggctggggcggccacttgggggctgccaccccctccccttggagaacctgaaatggaacaaagtccaagcagtggacggcttcaggcctttggcagaaaggagatgggtgggactgaggctctggaaagcccccactgcctctctctgtgccggcaggtcagcgtcttgtgcctgtttgctgacatctcagtggggtctggc

SEQ ID NO: 14317 - DNA, 1431 bp, Homo sapiens
  SIMILAR (277)..(432): 861254mologous to Homo sapiens Human secreted protein, SEQ ID NO: 5210,accession number G01129,Smith-Waterman Score=239.
ttttttttttttttttcgagggccatgttcctgtttatttaccaacttgatgatacctgggggagcctttgggactgtttgcccaaaacccccctttacaaaaatactgcctgctcgtcaccaccatgtgccctgccctatgccttggggcctggctctgctgttcctggtcaagcccaacccccaccccagggctccatcagcctcaactcctgggtggggtgggggttcttctggcacgagtttggggttaggaaccctccatgttcaacaggggccctcaccgctttgaggggtctcgggcctcacattgacttcctggggaggctgcatcccagcagcagtgctttgcagcccgagggtccagcagccccaggtgggcacctgaagggaggggctcctcgacgagacgacagcctgggggcagagctgtgacccccatgttgccagaggaggtgggcatgtggggttttgccttttcttttgtatgttttcttttcttttttttttttaagagaaaggaaattacaaactctcttgacgctgcagccagccgtggcactgccctgccgccctggctgggtgtccagtacttagaacccagggcaggtgctgcgggccgcctggggggtgctgggtgggggcgcgtcccaaggcctgggagctcctgtcattgtcactggtcggtcgctgaggctggaggccacaggagcaggatcagctgtttcctcacttacgcaggccaattacacctgcttggacaagagactggatggcttttcattgacatggtagagaggaaatggatcaaatccaccaatgaaatcaaagctgtcctcttcctccgtaaacacgctgaccacctgggcagccacagacaaagcccagaaggcgcgattcaggattttgcaggcaactgtgtagggcctccacatagctgggctccagggcacagccagcacctgacaccaggtcctggccatggggggccccgagggcccactgctggcacctcctcatgcagacagcctggccagcgctcacgccaccaggagcgatgccgggagaggctgaaggtcagtagctcgctgtcctttaagaggccaccgacttccaggtagaagcagatgatgaagacgttccaggtgacccagacggctgcccacagcgtgtacaccatgacgtagcgcagccggtactggatggtgccgaagagtcccaggatgacgatgatgatgtggacaaagttggccaggatgggcgcccagtggtagcccaggaagtcaaacgcctgcctctccagggcggcgtccagctgaaaagcagcagaggacgacgagcgcgcagcggccgcagcaggagcccatacgaaatcgtcgccccggatattccgggccggtaccgcaggcgtatcaaggaggtgtactagtt

SEQ ID NO: 14318 - DNA, 304 bp, Homo sapiens
  SIMILAR (237)..(302): 811254mologous to Homo sapiens Human secreted protein, SEQ ID NO: 7678,accession number G03597,Smith-Waterman Score=83.
cggcgctgagctcgatttctcgccgggccttagctgccttcccgcggggcagggctggggacctgcagcccgccatgcctgagcctcccacccactccatgggctcctgtgcggcccgagcctccccgacgagcaccaccccctgctccacggcgcccagtcccatcgaccacccaagggcgcgaagatctgcagcttcactcctgagcccagcaagaccacgagcccaccgggatggaacaaacaactccagacgcgccaccttaagagctgtaacactcaccgcgagggtccgcggcttcat

SEQ ID NO: 14319 - DNA, 814 bp, Homo sapiens
  SIMILAR (328)..(459): 881254mologous to Homo sapiens calbindin D28K,accession number S46006,Smith-Waterman Score=211.
tcatcgagccttagctaccttcccgcggggcagggctcgggacctgcagcccgccatgcctgagcctcccacccactccatgggctcctgtgcggcccgagcctccccaacgagcaccgccccctgctgcagggcgcccagtcccattgaccacccaagggctgaggagtgcgagcacacggcgtgggactggcaggccgctccacctgcagccctggtgcgggatccactaggtgaagccagctgggctcctgagttttttgggtccacgttgcttttatgagctataacagtcacctcgaagatctgcagcagcttcactcctgagcccagcgagatcacgagcccaccgggagtaaggaacgactccagatgctctgccttaagagctgtaacactcactgtgaaggtctgcagcttcactcctgagcccagcgatatcacgagcccaccgggaggaatgaacaactccagacgctctgccttaagagctgtaacactcactgcaaaggtctgcagcttcactcggccagggtccgcggcttcattcttgaagtcagtgagaccaagaacccaccaattccggacacagtagtgaaagtccaggttacacccttggcctcctttcatacctgaagggggctgttgagtgggggtaggagttccagctccccactcagggtccactgatacctggccgagaggtacaggaaggcttcttaatggtctccatgtgggttctactgacataagtggaggaggctcttttactcccaggaagtggctaaagtcctgactctcttccaagcctcct

SEQ ID NO: 14320 - DNA, 1782 bp, Homo sapiens
  SIMILAR (850)..(1167): 801254mologous to Homo sapiens dJ102D24.3 (PUTATIVE novel protein),accession number AL021391,Smith-Waterman Score=405.
tgtagggctatcaatgacttccaacagagctttcagaagccagaaactcgccgtgaatttgatctgtccgaccccctagcccttaagaaagatcttccagcccggcagtcagataatgatgttcggaatacgatatcaggaatgcagaaattcatgggagaggatttaaacttccatgagaggaagaaattccaagaggaacaaaacagagaatggtctttgcagcagcaaagggaatggaagaacgcccgtgctgaacaaaaatgcgcaggtaatgaaacagaagagacgagctggtctcaacgctctcttcaacaaaccaaccctacagttttttgtaacgaagacgacaacatccctgctctcttggggtgtgtcagcgggtgatggaatagtgaggagctatgaggaagacaaaacagggaccaggcacagagttatgccctccctgctccactggaactgccctggccaacctcaccagtgacctccatgtcgcccaatccaaggtcggtttttgaccttcatctggacctaacagtcgatcacctcctgctcctggaaatgcgcatgcaggatagagcaggacagcaaggggcacaccaccagcctgtcccaggaggcaaaggcacgaacggccacacgtgggaaggtgctcctgtggccaggtcgatctgattgcttcttgcctcctttcagaggccctctacacagagacgcaccaccagaaaggcagtttgtgcatctgtgaaagacttcaacaagagccaggtataggtactccgcgacctcgggctcgacgactggaggggaggatgagcccactacggcttcccaatcaccaacctcctgcgtggggacctgctctccgagaacccgcagcaggcagccagctccttcgggccccaccgcgtggtccctgaccgctggaagggcatgacccaggagcagctggagcagatccgcctagtccagaagcagcaaatccaggagaagctggtgactgccccgcccctttttccagagcccatagagccaggctctttgctcccactgccttccagggccaccctgctgtttgagcggcagcagtggcggcggcagcgcgacctgcgcagagctctggacagcagcaacctcagcctggccaaggagcagcatttgcagtgagtgctgggtgggaccagggccaggtgggggaccgggtggagggaccgcggggctgtggaggtgggaagagcactgagtctgctgggggagtcaggaaggcttcctggaggaggcttcattggtgagacccaggaggaggatggcactgcctattcagggacggctttccaggtagagagaggggctcctgggctgccccagaaaagcctggagtctcttggttatagacaggactccaagagttcagagctccagctacaagaagatgtcaaatgcaagcaaacaggtgaacttgcacctgaaaaacacagtatttatttacttatttatctagctcttggcttaaactcagcagtcgatcaagtaatgctgccacccccaggctggtgtgggaccacgggtgggacccaggggactgcctcaggacctgtaactagagtgtggattgtgatagcctccccgacgagcgccgccccgtgctccacggcgcccagtcccatcgaccgcccaagggctgaggagtgcgagcgcacggcgcgggactagcaggcagctccacctgcagccccggtgcggaatccactggatgaagccagctgggctcctgagtct

SEQ ID NO: 14321 - DNA, 543 bp, Homo sapiens; identical to SEQ ID NO: 6191
  SIMILAR (872)..(2146): 871254mologous to Homo sapiens unknown,accession number AF149422,Smith-Waterman Score=1932.

SEQ ID NO: 14322 - DNA, 930 bp, Homo sapiens; identical to SEQ ID NO: 2757
  SIMILAR (120)..(1): 821254mologous to Homo sapiens Human secreted protein, SEQ ID NO: 7420,accession number G03339,Smith-Waterman Score=159.

SEQ ID NO: 14323 - DNA, 1533 bp, Homo sapiens
  SIMILAR (280)..(798): 781254mologous to Homo sapiens Secreted protein encoded by gene 175 clone HEMAM41,accession number W88708,Smith-Waterman Score =612.
atggttcagcccctaggagagggcagcatctcccatacagtggctcctcacgtgctcctggctgtgcatcggcccccctggtttccagagctccaggcctgggcagaaatccatggggccaaaaggaagaaaagactgtcccaggttggcaaaggatcaaaggcgaatacgccccccgcgaccatccctctagaccgaaaccgagcctgcgccttcaccgaaagacgccggcaagtgggcccctgttccaccctgggtgtggaggcagccatcaacctcccggttcctggctcagccctggcgcataagaggggcaagcgcttgtggaataagtgggtgaaaggatgcccatgggtctcctttgtcctggctgcagcccctctttgcatcagtgccttctcggcagactcttcagctgaagccatagcccaggcaaaggacctcctcagccaggaggacttaaaagctgctatgagtgctgtgtccatgggatcaagggagtggtatttggagggggaaccactgcgacgaagggaggaaaatcaccatgggctggtggtctcgctggcttcaggagtgaagccgcagaccttcgcggtgagtgttacagttcttaaggcggcgcgtctggagttgttcattcctccccgtgggctcgtggtctctctggcttcaggagtgaagctgcagaccttcgcggtgagtgttacagctcataaaagcagcgtggacccaaagaactcaggagcccagctggcttcacctagtggatcccgcaccagggcagcaggtggagctgcctgccagtgccacgctgtgcgctcgcactcctcagcccttgggtggtcgatgggactgggtgccgtggagcagggggtggtgctcgtcggggaggctcgggccgcacaggagcccatggagtgggtgggaggctcaggcatggcgggctgcatgtcccgagccctgccccatggaaaggcagctaaggcctggcgagaaatcgagcacagcgccggtgggccggcactgctgggggacctagtacaccctctgcagccgctggcccgggtgccaagtccctcactgccttgtgcgagcagggctggccggctgctccgagtgcaggcccgccaaacccacgcccacccggaactccagctggcccccaagcgtgcacgcagccccggttcccgctcgcgcctctccctccacacatccctgcaagctgagggagccagctgtggccttggccagcacagaaaggggctcccacagtgcagcggtgggctgaagggctcctcaagtgccgccaaagtgggagcccaggcagaggaggcactgagagcgagcgagggctgtgaggactgccagcacgctgtcacctctcaactcagtctcccacatggcgtggccacccttgtgtctgttaaactctttctctacaaaaatgccatggtctttctttgtgcagtggtcaggaaaaaccccttgggcagatacaaaagttctttcaggcatctgtttccagaatag

SEQ ID NO: 14324 - DNA, 654 bp, Homo sapiens
  SIMILAR (437)..(285): 411254mologous to Myxococcus xanthus response regulator FrzZ,accession number AF049107,Smith-Waterman Score=105.
tcacctctttctgacacagtccaaagagactttgatagctttttgagtttctgatttgaccagatatcgaagcacatcttgtacatttccgttcccagtctgagagccaagcatttctttaagaagatctgatttcagttgaagggaaatgatagactgccagagatgcttgttgctgctggattggttcttgtttctagggccagactcaggagcccagctggcttcacctagtggaccccacactggggctgcaggtggagctgcctgccagtcctgtgccgtgtgcttgcactcctcagcccttgggtggtcgatgggactgggcgtcgtggagcagggggtggtgctcgtcggggaggctcgggccgcacaggagccctttgagtgggtgggaggctcaggcatggcgggctgcaggtcccgagccctgctcctcatctgtacccagtggacttttttggcagcctcccccatcttctcgtgtggctccatatctttatatcttctgtggcagacgtagcctgctgcctccccaaactctatcgtcctcttctccttcaaccatggaaacttgattttgtctgtggcatccatgtgcctctttgaaacactcacctcctcagactgccttgaatccaggcgtggccacat

SEQ ID NO: 14325 - DNA, 801 bp, Homo sapiens; identical to SEQ ID NO: 6226
  SIMILAR (739)..(1764): 311254mologous to Mus musculus Pro-Pol-dUTPase polyprotein,accession number Y12713,Smith-Waterman Score=459.

SEQ ID NO: 14326 - DNA, 2234 bp, Homo sapiens; identical to SEQ ID NO: 14013
  SIMILAR (80)..(238): 831254mologous to Gallus gallus paraoxonase 2,accession number L47573,Smith-Waterman Score=229.

SEQ ID NO: 14327 - DNA, 1218 bp, Homo sapiens
  SIMILAR (80)..(835): 481254mologous to Homo sapiens paraoxonase 2,accession number L48513,Smith-Waterman Score=408.
atgcagtatgccaagttgtcctatcggacccacctgtgcagccccattaattggctgttaccactcaacactgcagatttcatccgagttatccttgacttctctttctctttctcttacaccccacgtgctctccaccagccaatcctgttggcgctatattcaaagtctatccagaaactgaccatttctcagcatctcagcattaccaatgccatctgtgacatctctgaatggggagaggccacatctgcagccttgctttcttcatctctgcctgaccgtaaagcctcctccgcttgtcagtggatgtgggttgatctgaatcccgatttggtaaaggaaatcagtgcagcccggccactgagaggaagcgggtccatccacagctcccgcgcagatcccaattcgaggcataaggcaaggatggttaaacatccccgcttgctggcaattgctccaggcttgggcccatcagcaccaggcccttgccaggtgattgtactagttactagtccagcatcaaagcagaaggtccctagagaggctacgccaaccctgaagccaagctctgggaagaagtgtggcaagaaatcctgtgagctgtcgcagccactgagaagctctggacatgaagagactaccgttggtggccaaggggaagagagcccttgggtggttgatgggactgggcaccgtggagcagggggtggcgctcgtcggggaggctccggccgcaaggagcccatggagggcatggggggctcaggcatggcaggctgcaggtcccgagccctgcccagcgggaaggcagctaaggcccgccactcagtctatggtgttttgctactgcagaccaagctgactagtacaattttgcaggcacttcaaacaaaatgtccgggaaggagctatcatccttctgaattccccgtcctgatctgtggcagccccagccacacagatctgcagacaaccggaaaaaaacagccaatagcaacagatcaagaggcaagccagatcttggaattaacagacaagtcctataaaataactatgataaatacagtaaagaatttagagaagcatagagatataatggcagacaagtactctatattccacgatggctgggaccattctctgctcatcattgtccctccggcatctagcgcagaacatgccacagcagtaactcagtcagtgtttgtggagtga

SEQ ID NO: 14328 - DNA, 642 bp, Homo sapiens
  SIMILAR (3)..(569): 871254mologous to Homo sapiens HLA DP4 beta-chain,accession number J03041,Smith-Waterman Score=849.
atgaatggaaaaggcttgaaggaaagcctgccagccgctcagattgactttgcaagggggatcaccacaggtgggactacaggcacatgccactgtgtccggagttggtgggttcttggtctgactgacttgaagaacgaagccgcggaccctcatgactcaggagcccagctggcttcacccagtggatcccgcactggggctgcaggtggagctgcctgccagtcctgcgccgtgcgctcgcactcctcagcccttgggtggtcaatgggactggccgccctggagcagggggtggtgctcgtccgggaggctcgggcggcacaggagcccatggagtggcgttatgaacagaactttattttttccaacctaaaccaatcatcctgcattgggatggatggattgagggaaagatcatggtaccagatctgcaggcagctggggacagaagtcttcacttgcatggggccagtggcgctggccggccactccgagtgtggggccacacccacctggaactcgcgctggcccgtgatcgtctcccacgcctctccctccacatcttcctgcaagcagagggagccggctccgacctcggccagcccagagaggggctcccacagtgcggcggcgggctga

SEQ ID NO: 14329 - DNA, 807 bp, Homo sapiens; identical to SEQ ID NO: 6427
  SIMILAR (338)..(460): 451254mologous to Homo sapiens Human bcl2 proto-oncogene mutant protein fragment 14,accession number Y21166,Smith-Waterman Score=79.

SEQ ID NO: 14330 - DNA, 1449 bp, Homo sapiens; identical to SEQ ID NO: 8566
  SIMILAR (232)..(879): 781254mologous to Mus musculus Pro-Pol-dUTPase polyprotein,accession number Y12713,Smith-Waterman Score=869.

SEQ ID NO: 14331 - DNA, 1083 bp, Homo sapiens; identical to SEQ ID NO: 6196
  SIMILAR (789)..(878): 721254mologous to Homo sapiens ribosomal protein L27a,accession number U14968,Smith-Waterman Score=130.

SEQ ID NO: 14332 - DNA, 3411 bp, Homo sapiens
  SIMILAR (886)..(1341): 741254mologous to Mus musculus Pro-Pol-dUTPase polyprotein,accession number Y12713,Smith-Waterman Score=557.
atgagtgaagcccccagattcttcgttggaccagaagatacagaaataaatcctggaaattatcgacatttcttccaccatgcagatgaagacgatgaggaggaagatgattctccaccagaaaggcagattgtggttggaatatgttccatggcaaagaaatccaaatccaaaccaatgaaggaaattcttgaacggatctccttatttaaatatatcacagtagtagtatttgaagaggaggttattttgaatgaaccagtggaaaactggcctttatgtgattgtcttatttctttccattctaaaggatttccactggacaaagcggttgcctatgcaaaactcaggaatccatttgtaatcaatgacttgaatatgcagtatctcatacaagataggagagaagtatatagtattcttcaagctgaaggtattttacttcctcgttatgctattttgaaccgtgacccaaataatcccaaaggagtgaagctgcagaccttcgcggtgagtgttacagctcttaaggtagcgcgtctggagttgttcgttcctcccggtgggctcttggtcttgctgggctcaggtgtgaagctgcagatcttcgcgggctgcaggtggagctgcctgccagtcacgcgccgtgtgctcgcactcctcagcccttgggtggtcgatgggactgggcgccgtggagcagggggtggtgctcgttggggaggctcgggccgcacaggagcccatggagtggaatgtaatctgattgaaggggaagatcatgtagaagtaaatggggaagtttttcaaaagccatttgtagaaaagccagtcagtgcagaagatcacaatgtttacatttattacccaacttctgctggtggtggaagtcaaagactctttagaaagattggcagtagaagtagtgtttattctccagaaagcaatgtacgaaaaacaggctcatatatatatgaagagtttatgcccacagatggtactgatgttaaggtttatacagtgggtccagattatgcccatgctgaagctcgaaaatctccagcacttgatggcaaggtggaacgagacagtgaaggaaaagaagtaagataccctgttattctcaatgcacgagagaaattaattgcttggaaagtctgccttgcttttaagcaaacagtttgtggctttgatttgttacgggccaatggacagtcctatgtctgtgatgtcaatggcttcagttttgtgaaaaattccatgaagtattatgatgactgtgcaaaaatacttggaaatattgtaatgcgagaacttgctccacaatttcatattccatggtcaatacccttagaagctgaagatatcccaattgtaccaactacatctggaactatgatggaacttagatgtgtcatagctgttatacgtcatggggatcgaacaccaaaacaaaaaatgaaaatggaagaagtgctagatattgcacgacagcttcttatggagctagggcaaaataatgattctgaaattgaagaaaacaagccaaaacttgaacaacttaagactgtattagagatgtatggtcatttttctggaataaatcgtaaggttcagttgacctatctccctcatggttgtcctaaaacatctagtgaagaggaggacagccgaagagaagaaccatctttacttttggttctaaaatggggaggtgaattaactcctgcaggcagggtccaggctgaagaacttggaagagccttcaggtgtatgtatcctggaggtcaaggagattatgcaggatttcctggttgtggtttacttagattacatagcacctacagacatgacctcaaaatatatgcctctgatgaaggacgagtccagatgactgcagctgcttttgcaaaggggcttttagctttggaaggagagcttacacccattcttgttcaaatggtgaaaagtgcaaatatgaacggtcttttggatagtgatagtgactctctgagcagttgtcagcaacgtgtgaaggcaaggcttcatgaaatacttcagaaagacagagattttactgctgaagattatgaaaagcttactccatctggaagcatttctcttatcaaatcaatgcatttaattaaaaaccctgtgaagacctgtgataaagtttattccttaattcagagtttgacttctcaaatcagacatcgaatggaagatcctaaatcatcagatattcagctttaccatagtgaaacattggagcttatgctacgtagatggtccaagttagagaaagactttaaaacaaagaatggaagatatgatattagtaaaatccctgacatatatgactgtataaaatatgatgtccagcataatggttccttgaaattagaaaacacaatggaattatataggctttcgaaggcattagcagatattgttatccctcaggaatatggtataactaaagctgaaaaactggagattgccaaaggctactgtactcctctggttagaaaaattcgctcagaccttcagaggacacaagatgatgacactgtaaataaacttcatcctgtgtattctagaggtgttctgtctcctgaacgtcatgttcgtactagattatattttaccagtgaaagtcatgtacattctttgctgtctattcttcgctatggtgccttatgcaatgaatcaaaggatgaacagtggaaacgagctatggattatttaaacgttgtcaatgagctcaactacatgactcagattgttatcatgctttatgaggatcctaataaggatctttcctcagaagaacgctttcatgttgaattacactttagtccgggagccaaaggttgtgaagaagacaaaaatttgccatctggctatggatatagaccagcttccagagagaatgaaggcaggagaccttttaaaattgataatgatgatgaaccacatacttctaaaagagatgaagttgatcgagctgtgatattgtttaaaccaatggtatcagagccaattcatatacacaggaagtctccacttccaagatctaggaagacggctacaaatgatgttgtatctgaaaatgctaattacctgagaacaccaagaactcttgtggaacagaagcagaatcctactgtagcctctacagctttacgttccagtccaataatgagaaaaaaagtatctttaaatacgtatacacctgcaaagatcctcccaacaccaccagctaccttaaagagcactaaagcaagcagcaaaccagctacaagtggaccttctagtgcagttgttcctaatacctcatctcggaaaaagaatataactagcaaaacagaaacgcatgaacacaaaaaaaacactgggaaaaagaaatga

SEQ ID NO: 14333 - DNA, 972 bp, Homo sapiens
  SIMILAR (728)..(606): 481254mologous to Homo sapiens Human secreted protein encoded by gene No. 3,accession number Y38388,Smith-Waterman Score=83.
ttatactaggatcttcccctgtataagggattgttttctcttatcttggtctcctcgttcctcatcgattgttgttcctgcagcaattaccgagcagcgaaaatgcagtggaatggccactttacaggagggaagccgtttccaatactcacgaagtacaactcctaacctggtgggcttgggcatctggccaaaggctctgagatgagggaaggagaagctgtcacattctaaggcctgggctccaaaatcccagaacagcaattcctctgcttcatcttggtccaaccagtcacaggcccagcctagattcaaaggggaagacataagtcccatctcttgatgggcagagaggccttgagctagatacagagtgccgattggtgtatttacaatccttgagctagacataaaggttctccacgtcctcaccagagcagctagatacagagtgtcgattggtgcattcacaaaccttgtgctaaacacagggtgctgattggtgtatttacaaaccttgagtggggctgcaggtggagctgcctgccagtcctgcaccctgtgctcgcattcctcagcccttgggtggtcaatgggactgggcgccatggagcagggggtggtgctcgtcggggaggctcgggctgcacaggagcccatggagtgggtgggaggctcaggcatggcaggctgcaggtcccgagccctgccccgtgggaaggcagctgctcccttccctctcccataggtcccccctttaaaagggcccactctgtgctccaaaagggaagcagtacccttatggtaggaacctgtgcttcttccccaaaggtagttccattccatttgcttagcttctagcactgtcgcgcatagaggtgggcacttaataaatgctgccaaccatgtcaaggtaatgagagcagttaaatgagcagctgaactccatttattcagaagtgcttgttgcat

SEQ ID NO: 14334 - DNA, 1513 bp, Homo sapiens; identical to SEQ ID NO: 8569
  SIMILAR (449)..(694): 951254mologous to Homo sapiens ribosomal protein L26,accession number X69392,Smith-Waterman Score=398.

SEQ ID NO: 14335 - DNA, 1608 bp, Homo sapiens; identical to SEQ ID NO: 6195
  SIMILAR (250)..(663): 551254mologous to Homo sapiens Zen GTPase interacting protein ZIP,accession number Y06518,Smith-Waterman Score=314.

SEQ ID NO: 14336 - DNA, 1830 bp, Homo sapiens
  SIMILAR (709)..(1827): 921254mologous to Homo sapiens putative p150,accession number U93569,Smith-Waterman Score=1771.
atgaagccgcagaccctcgcggtgagtgttacagctcttaaggtggcgcgtctggagtctgtcccttctgatgttcggatgtgttcagagtttcttccttctggagtgaagctgcagatcttcacggtgagtgttacagctcttaaggcggcgcgtctggagttgttcgttcctcctggtgggctcgtggtctcgctggcttcaggagtgaagctgcagaccttcgcggtgagtgttacagctcttaaggtggcgcgtctggagtttgttccttctgatgtccagatgtgttctgagtttcttccttctggagtgaagctgcagaccttcgcggtgagtgttacagctcttaagacagcgtctggagttgttcattcctcccggtgggctcgtggtcttgctgggttcaggagtgaagctgcagatcttcgtgactcaggagcgcagctggcttcacctagtggatcccgcatgggggctgcaggtggagctgcctgccagtcccgcgccctgcgctcgcactcctcagcccttgggttgtcaatgggactgggccccatggagcagggggtagtgctcctccgggaggctccggccgcacaggagcccttggagttggtgggaggctcaggcatggtggactgcaggtcccgagccctgccccgcaggaaggcagctaaggcccggcaagaaatcgagcacagcgctgacagatcagtgagacagaaagttaacaaggatatccaggaattgaactcagctctgcaccaagtggacctaatagacatctatctccaccccaaatcaacagaatatacattcttctcagcaccacaccacacttatttgaaaattgaccacatagttggaagtaaagcactcctcagcaaatgtaaaagaacagaaattataacaaactatctctcagaccacagtgcaatcaaactagaactcaggattaagaatctcactcaaaaccgctcaactacatggaaactgaacaacctgctcctgaatgactactgggtacataacaaaatgaaggcagaaataaagatgttctttgaaaccaatgagaacaaagacacaacacaccagaatctctggggcacattcaaagcagtgtgtagagggaaatttacagcactaaataaccacaagagaaagcaggaaggatctaaaattgacaccctaacctcacaattaaaagaactagagaagcaagagcaaacacattcaaaagctagcagaaggcaacaaataactaagatcagagcagaactgaaggaaatagagacacaaaaaacccttcaaaaaatcaatgaaaccaggagctggttttttgaaaagaccaacaaagttgatagaccgctagcaacactaataaagaagaaaagagagaagaatcaaatagatgcaataaaaaatgataagggggatatcaccactgattccacagaaatacaaactaccatcagagaatactataaacacccctacgcaaataaattagaaaatctagaagaaatggataaattcctcgacacatacaccctcccaagactaaaccaggaagaagctgaatctctgaatagaccaataacaggctctgaaattgaggcaatcattaatagcttaccaaccaaaaaaagtccgggaccagatggattcacagctgaattccaccagaggtacaaggaggagctggtactattccttctgaaactattccaatcaatagaaaaagagggaatcctccctaactcattttatgaagccagcatcatcctgataccaaagcctggcagagacacaacaaaaaaacaatga

SEQ ID NO: 14337 - DNA, 574 bp, Homo sapiens
  SIMILAR (454)..(570): 691254mologous to Homo sapiens Human secreted protein, SEQ ID NO: 7083,accession number G03002,Smith-Waterman Score=134.
caaaatgtggctggaatcaggagaccggagagaccaatgaggggaacaggacgattgtatttaggtggccaccagctcagcagattaatacccagaggctgagcaatgagcaaagaaagggcttgacttttattcatgtgaccaaagggtgttggccgggccttagctgccttcccgcggggcagggctcgggacctgcagcccgccatgcctgagcctcccacccactccatgggctcctgtgcggtccgagcctccccgacgagcaccaccccctgctccacggtgcccagtcccatcaaccacccaagggctgaggaatgcgagcgcatggcacgggactggcaggcagctccacctgcagccccagtgcgggatccactaggtgaagccagctgggctcctgagttctttgggtccatgctgcctttatgagctgtaacatttatcgcgaagatctgcagcttcactcctgagcccagcgagaccacaagcccaccaggaggaacgaacaactccagacacgctgctttaagagctgtaacactaaccgcgaaggtctgcagcttcactc

SEQ ID NO: 14338 - DNA, 566 bp, Homo sapiens
  SIMILAR (440)..(541): 581254mologous to Human coxsackievirus B3 polyprotein,accession number AJ304427,Smith-Waterman Score=127.
tcagcttgcagggaggtgtggagggagaggcatgagcgggaaccggggctgcgtggggcgcttgcgggccagctggagttccgggtgggtgtgggcttggtgcgccctgcactcggaggagccggccagcccggcgctgcgctcgatttctcgccgggccttagctgccttcccgtggggcaaggctcgggacctgcagcccgccatgcgtgagcctcccacccgctccgtgggctcctgtgcggcccgagcctcctcgacgagcgccaccccctgctccacagcgcccagtcccatcgaccacccaagggctgaggagtgcgggcgcacggcgcgggactggcaggcatgatgaactgatagttgcattgccattcatgatgatcccctggcattcgtccattcagccattcaccattcacccattcaactggaattttggttgaatgccggaattgtgtccacaaattgtggatggatagttggttggctggctggatggctggctggatggctggctggatggatggtgaatggctggcggcggttcggttgctttgaagcat

SEQ ID NO: 14339 - DNA, 601 bp, Homo sapiens
  SIMILAR (136)..(5): 651254mologous to Homo sapiens Human secreted protein, SEQ ID NO: 7678,accession number G03597,Smith-Waterman Score=141.
gagtgaagctgcagacctttgcagtgagtgttacagctcttaaggcagagcgtctggagttgttcattcctcccggtgggctcgtgatatcgctgggctcaggagtgaagctgcagaccttcacagtgagtgttacagctcttaaggcagagcatctggagtcgttccttactcccggtgggctcgtgatctcgctgggctcaggagtgaagctgctgcagatcttcgaggtgactgttatagctcataaaagcaacgtggacccaaaaaactcaggagcccagctggcttcacctagtggatcccgcaccagggctgcaggtggagctgcctgccagtcctgcgccgtgcgctcgcgttcctcagcccttgggtggtcgatgggactgggtgccgtggagcagggggtggtgctcgtcggggaggctcgggccacacaggagcccatggagtgagtgggagactcaggcatggcgggcttcaggtcccgagccatgggctggttgtctcttctaccccagatcctatatgtcatcttcttgcccactccacaccatccactctgacctctttgctgttcttcaaggacgcacaaagtcat

SEQ ID NO: 14340 - DNA, 924 bp, Homo sapiens; identical to SEQ ID NO: 14009
  SIMILAR (457)..(600): 971254mologous to Homo sapiens Human 5' EST secreted protein SEQ ID NO:360,accession number Y12329,Smith-Waterman Score=254.

SEQ ID NO: 14341 - DNA, 691 bp, Homo sapiens
  SIMILAR (669)..(589): 601254mologous to cercopithicine herpesvirus 15 EBNA2-like protein,accession number AF200187,Smith-Waterman Score=90.
gtggcatgggagacttcctggggctcatgatggggagggcatcaatcatcaaatcagatgaaaattcctgaaggcattgacctttagtgaattctaggtctggtatcaatggctgcctcttcctcgagttgctggagtccagtggctgcaatccttgagctagatacagagtgccaattggtgtatttacaatccctgaactagacataaaggttctccaaggccccaccagagtagctagatacagagtgtccattggtgcattcacaaaccctgagctagacacagggtgctgattggtgtatttacaatccctgagctggacataaaggttctccacgtccccaccagactcagaaacccagctggcttcacccactggattctgcaccgggactgcaggtgcagctgcatgccagtcctgcgccatgcgcccgcactcctcagcccttgggtggtcaatgggactggccgcagtagagcaggggacagcactcatcggggaggctcgggctagtggatcccgcaccagggctgcaggtggagctgcctgccagtcccacgccgtgcgctcgcattcctcagcccttgggtggtcgatgggactgggcgccatggagcagggggtggtgcttgtcggggaggctcgggccacacaggagcccttggagtgggtgggaggctcaggcat

SEQ ID NO: 14342 - DNA, 1085 bp, Homo sapiens
  SIMILAR (948)..(1085): 671254mologous to Homo sapiens Human secreted protein, SEQ ID NO: 7420,accession number G03339,Smith-Waterman Score=146.
actggtgcactcacaaaccttgagctaaacacagggtgctgattggtgtgtttacaaaccttgagctagatacagagtgccgattggtgtatttacaatccttgagctagacacagagtgctgattggtgtatttacaatccttgagctagacataaagactctccacgccctcaccagagcagctagatacagagtgttgactggtgcactcacaaaccttgagctaaacacagggtgctgattggtgtatttacaatccctgagctagatataaagactctccacgtccccaccagactcaggagcccagctggcttcacctagtggatcccgcaccggggctgcaggtggagctgcctgccagtcctgtgccgtgtgctcgcattcctcagcccttgggtggtcgatgggactgggcgctgtggagcagggggtggtgctcatcggggaggctcgggccgcacaggagcccatggagtgggtgggaggctcaggcatggcgggctgcaggtcccgaaccctgccacgagggaaggcagctcttccgcagtagtccctgggcctagagggaggcaacttgtatggttttagcagcagagcattagtagtgaaacaaatccgatcccagtgggatgccaaatgacggagattcatatctctggccttcagaataccatgattttggtttccttggccccttttagtcaaggcaggagcacctgggatgcatggcaccaagtcccaggtgggccctgaacctggcccaggaaaccgttgtttcctcctaggcctctgggcctgtgatgggaggggatgctgcaaaggtctctgacatgccctggcgacattttccccattatcttggtgattagcatttggctccttgtaacttatgcaaatttcggcagctggctttaatttctccccagaaaatgggttttccctttctttattccagttcccaacaagttcctcatcttcatctgaggccacctcaacctgaactttattgtctataccactatcagcattttggtcaaagccattcaagaagtctctagaaagtgtcaaactttcccacat

SEQ ID NO: 14343 - DNA, 1182 bp, Homo sapiens
  SIMILAR (136)..(5): 681254mologous to Homo sapiens Human secreted protein, SEQ ID NO: 7083,accession number G03002,Smith-Waterman Score=147.
gagtgaagctgcagaccttcacggtgagtgttacagctcttaaggcggcgcttctggagttgttggttcctcctggtgggctcgtggtctcgctggcttcaggagtgaagctgcagaccttcgcagtgagtgttacagctcataaaagcagtgtggaccccaagaactcaggagcccagctggcttcccccagtgaatcccgcacgagagctgcaggtggagctgcctgccagtcccgcgccgtgcgcccgcactcctcagctcttgggtggtcgatgggactgggcgccgtggagcagggggtggcgctcgttcggggaggctcgggctgcacagaagcccatggagggggtgggaggctcaggcatggcgggctgcaggtcccgagccctgccccacgggaaggcagctaaggcccggcgagcaatcgagcacagcaccggtgggctggcactgctgggggacccagtacactctccgcagccactggcccgggtgctaagtccctcattgcccagggccagcagggctggctggctgctccgagtgcggggcccgccaagcccacgcccacccggaactccagctggccggcaagcgccgcacgcagccccggttcccgctcgtgcctctccctccacacctccctgcgagctgagagagtgggctccagccctggccagcccagaaaggggctcccacagtgcaggggggaggctgaagggctcctcaaatgccaccaaagtgggagcccaggcaggggagaagaattgtggcattcacgatagaagtgggggtgttgagggaagatctgttttgaatggtgatcctactttgaacattttgggtgtagagcagtacgaggccatcaggtatccaggtggagatggcatactgctgagccagcaggaaaaggcaacaggacgaggggcaggatttgccactggaatgtcagcaggccatacctcaggcgttcagctccatggagcaaagacagtagtgatcacgttccttgacaacagtgctagtgtgcggggagcttttagttttccttttctctgctccttgaaccaagaatccagcatcagcatcagcatcagcatcagcatcagcatctgctcagctgtaggccatgattgtctgtactgtttaccagcagctcatgtaatatgcttgatgtaa

SEQ ID NO: 14344 - DNA, 1686 bp, Homo sapiens
  SIMILAR (331)..(1686): 881254mologous to Mus musculus voltage-gated potassium channel Kv1.7,accession number AF032099,Smith-Waterman Score=1983.
atggtcgtcacgcctggaatcccagcactttggggggccgaggcgggtggatcgcctgagacagccacaaccaaagtcccggagatccgtgatgtaacaaggattgagcgaatcggtgcccactcccacatccggggactggggctggacgatgccttggagcctcggcaggtagagcagaggaggctggggtgtgagggcctctccatgaaggtcttgggtaccgccctgccgggctatttttacgcgcggacaccggacaccggacaccgggctggggcggcggcggcggcggcgcaggcggccgaggcggggccgcaccggggccgggcgtcggggccacacgtcggttcgcgggtcgccggggctgcgcgcgccatggagccgcggtgcccgccgccgtgcggctgctgcgagcggctggtgctcaacgtggccgggctgcgcttcgagacgcgggcgcgcacgctgggccgcttcccggacactctgctaggggacccagcgcgccgcggccgcttctacgacgacgcgcgccgcgagtatttcttcgaccggcaccggcccagcttcgacgccgtgctctactactaccagtccggtgggcggctgcggcggccggcgcacgtgccgctcgacgtcttcctggaagaggtggccttctacgggctgggcgcggcggccctggcacgcctgcgcgaggacgagggctgcccggtgccgcccgagcgccccctgccccgccgcgccttcgcccgccagctgtggctgcttttcgagtttcccgagagctctcaggccgcgcgcgtgctcgccgtagtctccgtgctggtcatcctcgtctccatcgtcgtcttctgcctcgagacgctgcctgacttccgcgacgaccgcgacggcacggggcttgctgctgcagccgcagccggcccgttccccgctccgctgaatggctccagccaaatgcctggaaatccaccccgcctgcccttcaatgacccgttcttcgtggtggagacgctgtgtatttgttggttctcctttgagctgctggtacgcctcctggtctgtccaagcaaggctatcttcttcaagaacgtgatgaacctcatcgattttgtggctatccttccctactttgtggcactgggcaccgagctggcccggcagcgaggggtgggccagcaggccatgtcactggccatcctgagagtcatccgattggtgcgtgtcttccgcatcttcaagctgtcccggcactcaaagggcctgcaaatcttgggccagacgcttcgggcctccatgcgtgagctgggcctcctcatctttttcctcttcatcggtgtggtcctcttttccagcgccgtctactttgccgaagttgaccgggtggactcccatttcactagcatccctgagtccttctggtgggcggtagtcaccatgactacagttggctatggagacatggcacccgtcactgtgggtggcaagatagtgggctctctgtgtgccattgcgggcgtgctgactatttccctgccagtgcccgtcattgtctccaatttcagctacttttatcaccgggagacagagggcgaagaggctgggatgttcagccatgtggacatgcagccttgtggcccactggagggcaaggccaatggggggctggtggacggggag

SEQ ID NO: 14345 - DNA, 763 bp, Homo sapiens
  SIMILAR (424)..(272): 701254mologous to Arabidopsis thaliana RuvB DNA helicase-like protein,accession number AB013390,Smith-Waterman Score=181.
caccacctccccttcgatgatctccgtctcctccgtgatgcgaacgccgatggaaccgccggaaaggcctgcgtcagcgcctcggtcttgctacatctgcgggaaaaagtatttcccgtgccgccgatgacatgtaatgggcgtgtcaaggacccagggcctggcgccatgcccatggcgatggccgtcttcccccgtgcccggctggccagcaataaggactgcccgaccggcaatcttcccttcccggatcatctccagcaccacgccatgccgcccgccgtgccgccagctgacccaccatgccttgcgaagcctgccgaggctccaaggcatcgtccagccccagtctccggatgtgggagtgggcaccgattcgctcaatccttgttacatcacggatctccgggactttggttgtggctgtaacggttgccatgatgctcaccaactgccagagtcctagcggaaacggaaacgcgcgaggagcgagatgttctggctcctctaggctagctggttcttcaaagatctcgatggttcctcataaatatgtaaatattgtgggggcgtggcgggactttatgccccgccctcccaccgaggctgcgctggaagacgggcgtccggaactcctgggtccattcccaatgtctcctggctcctcctccttttgctcagccccaccaccgccccgctcaggccgattgcaaaattcttagctgttctttgagtaaccacacgtcctccacgccctcgtgcc

SEQ ID NO: 14346 - DNA, 1216 bp, Homo sapiens
  SIMILAR (1090)..(365): 531254mologous to Homo sapiens Human adult blood secreted protein g21_1,accession number Y31829,Smith-Waterman Score=529.
tttttttttttttttttttgagatttcccaggactggctttaatttgaaaaatctgattggggtctcttcccgtatcaaagaaggaacagcccaagctatgaccccagggccagggaattcagtccccaccagaccctgtcattccatcactaggggggtaattcaagggctccccccttgccgagccctgaaacgaggaggcacggatgtgaagttgcccaggaactagattctgtctctccaaaagtggcccaagccctgttctctgtactagggaagccagctgtgtcttttcgaggacagttggtccagccagcaggctcagttcagataccagacaaccattccagcacgagggctcagcggccttgggccccggcggtcgctcccagttgcctgtgtgcccaccagcacatccatgaggtagtccaattcggcctcgtccaagctccggagcttcctcctttgcccgggcccatccttcagggcctggtttgaggccctccagaggctggtgcccaaaagttcattgtcatacatagaggtgtcaatatcctcaaacaggccctcaagcccatcgtccagtagacagccagtggctgggcccagcaggtccaaggcacccaggctgggcgctgctcccccgatgctactggcctgtgggcccctcgtctgccaagggttggggagcctgactcaggccctcaatgtggctgaggtcctccaggaggctggccatggaggctgaaagggcagcgtccgagcttgccagtaagttagtcagccacactgggggctgcaggtgggctaggcacaggtggcaaggccacccccgggttcaaaggaccccctgaatgccccgcagagtgttcacgactcagactcaggtgccgcaaggtccggcttcactctgctgcaggcttgtggtggagcttgagcactgagaggtcaaagagggagcttagaggccacggccgggggtgcctgtgccaccgctgcgtggccaggatctagccaccaggagtcgactgccagaggttccttctcctcctcctcctcccgtttccgcttcagacccttgctcagcatcttgctcactagcggccaatcagaacgaagaggtagccacccacaaccaatcaggaaacggcggcggcagcatcgcttgttggctgtcctccggaaacccgcgcctgggtcgcgcccacgcgtccg

SEQ ID NO: 14347 - DNA, 1177 bp, Homo sapiens
  SIMILAR (197)..(649): 561254mologous to Rattus norvegicus chaperonin 60,accession number U68562,Smith-Waterman Score=345.
gtatctttggacaccatagtttaatttggtttacatgtcgcacgtctctgatgagggagccctttctgaatccgcatcagccacagcagcttcttggcctcctcatggctttttgcagcattttgttccagggagaccacaggtgccaatttgtttataccttctagggcaaaagactggatgacatatggctccactcttaaggcaggtaacaggatcgcctataccaccaaaaacacctggaagaggcatcaggaatatgaagaggaacgagaagaggagatacaagaccctcatggctgatggctgggagcttcaccaggagctgagtctggggaggacatcaagccttccaccttataaaggtcctggtccctggtcaccaggcttccagaaggttagcaaaggtgctaatccagtggaaatcaagagaggtgtgatgttagctgttgatgctgtaattgctgaacttaaaaagcagtctaaacctgtgaccaaacctgaagaaattgcacaggttgctacaatttctgcaaatggagacaaagaaattggtaacatcatctctgatgcaatgaaaaagtgtggaagaaagggcatcatcacaaaaatttctagtgtccagtccattgtaactgctcttgaaattgccaatgcttactgtaagcctttggtcataattgctggagacattgatggagaagctctaactacactcatcctgaataggctaaaggttggtcttcaggttgtggcagtcaaagctccagggtttggtgacaatagaaagaaccagcttaaagatacggttattgctactggtggagaagttggagaggtcactgtgatcaaagattatgccatgctcttaaaaggaaaaggtaacaagtctcaaattgaaaaatgtgttcaagaaatcattgaccagtcagatgtcacaactagtgaatacgaaaaggaaaaactgagtggagaaactttcagatggagtagctgtgctgaagagtcatccttggagcttctgcacaaagatttaccccctgacctgagcaccaggacaggaaccataggtgctcagatagcaaactgggaggagagaagcacaaaacaaaagtgtgcccatggacattgcaataaagtataccaggaagttcttggaattcttcagagagtttag

SEQ ID NO: 14348 - DNA, 764 bp, Homo sapiens
  SIMILAR (3)..(575): 811254mologous to Homo sapiens chaperonin (HSP60),accession number M34664,Smith-Waterman Score=720.
ctaccactgctactgtactggcacgctctatagccaaggaaggcttcgagaagattagcaaaggtgctaatccagtggaaatcaggagaggtgtgatgttagctgttgatgctgtaattgctgaacttaaaaagcagtctaaacctgtgaccacccctgaagaaattgcacaggttgctacgatttctgcaaacggagacaaagaaattggcaatatcatctctgatgcaatgaaaaaagttggaagaaagggtgtcatcacagtaaaggatggaaaaacactgaatgatgaattagaaattattgaaggcatgaagtttgatcgagggttatatttctcatccttttattaatacatcaaaaggtcagaaatgtggaatttccagggatgcctatgttctgttgagtgaaaagaaaatttcttagtatccagtccattgtacctgctccttgaaattgcccatgctcaccgtaagcctttggtcataatcgctgaagatgttgatggagaagctctaagtacactcgtcttgaataggctaaaggttggtcttcaggttgtggcagtcaaggcttccagggtttggtgacaatagaaagaaccagcttaaagatatggctattgctactggtggtgcagtgtttggagaagagggattgaccctgaatcttgaagacgttcagcctcatgacttaggaaaagttggagaggtcattgtgaccaaagacgatgccatgctcttaaaaggaaaaggtgacaaggg

SEQ ID NO: 14349 - DNA, 3288 bp, Homo sapiens
  SIMILAR (1)..(1083): 991254mologous to Cloning vector pZC320 SopA,accession number U26464,Smith-Waterman Score=1872.
atgaaactcatggaaacacttaaccagtgcataaacgctggtcatgaaatgacgaaggctatcgccattgcacagtttaatgatgacagcccggaagcgaggaaaataacccggcgctggagaataggtgaagcagcggatttagttggggtttcttctcaggctatcagagatgccgagaaagcagggcgactaccgcacccggatatggaaattcgaggacgggttgagcaacgtgttggttatacaattgaacaaattaatcatatgcgtgatgtgtttggtacgcgattgcgacgtgctgaagacgtatttccaccggtgatcggggttgctgcccataaaggtggcgtttacaaaacctcagtttctgttcatcttgctcaggatctggctctgaaggggctacgtgttttgctcgtggaaggtaacgacccccagggaacagcctcaatgtatcacggatgggtaccagatcttcatattcatgcagaagacactctcctgcctttctatcttggggaaaaggacgatgtcacttatgcaataaagcccacttgctggccggggcttgacattattccttcctgtctggctctgcaccgtattgaaactgagttaatgggcaaatttgatgaaggtaaactgcccaccgatccacacctgatgctccgactggccattgaaactgttgctcatgactatgatgtcatagttattgacagcgcgcctaacctgggtatcggcacgattaatgtcgtatgtgctgctgatgtgctgattgttcccacgcctgctgagttgtttgactacacctccgcactgcagtttttcgatatgcttcgtgatctgctcaagaacgttgatcttaaagggttcgagcctgatgtacgtattttgcttaccaaatacagcaatagtaatggctctcagtccccgtggatggaggagcaaattcgggatgcctggggaagcatggttctaaaaaatgttgtacgtgaaacggatgaagttggtaaaggtcagatccggatgagaactgtttttgaacaggccattgatcaacgctcttcaactgctgccccgatggtggattcgttaattgcgcgcgtaggagtaatggctcgcggtaatgccattactttgcctgtatgtggtcgggatgtgaagtttactcttgaagtgctccggggtgatagtgttgagaagacctctcgggtatggtcaggtaatgaacgtgaccaggagctgcttactgaggacgcactggatgatctcatcccttcttttctactgactggtcaacagacaccggcgttcggtcgaagagtatctggtgtcatagaaattgccgatgggagtcgccgtcgtaaagctgctgcacttaccgaaagtgattatcgtgttctggttggcgagctggatgatgagcagatggctgcattatccagattgggtaacgattatcgcccaacaagtgcttatgaacgtggtcagcgttatgcaagccgattgcagaatgaatttgctggaaatatttctgcgctggctgatgcggaaaatatttcacaacggagtaacctcggtgtgcggttgtatgcctgctgtggattgctgctgtgtcctgcttatccacaacattttgcgcacggttatgtggacaaaatacctggttacccaggccgtgccggcacgttaaccgggctgcatccgatgcaagtgtgtcgctgtcgacgagctcgcgagctcggacatgagtccttggatagctggggcacctctgaagacgctgacgctccttctaagcgacactcaacctctgacctctcagatgcgaccttcagcaatatcaggagagaagactggttgtattataagcagattctcaccaagaaggggaagaaagcgggcagcggcctgcgccagtggaagcgggtgtatgccgcgctgctggcgcgctcgctctcgctgagcaaggagcagcgggagcccgggccggcggcggcgggggctgtgggggccggcgcaggtgaggacaaggcggcgcccgtctgcatcggctcctgcctcgtggacatctacagcgagaccaagaggaggcacgtgttccggctgaccaccgctgacttctgtgaatatctctttcaggctgaggaccgggatgacatgctggggggatcagagcgatccgggagaacagcagggccgagggcgaggtttcggtgtgacaagggtgcaagggcagggctcatggaggacctggcgtcctcgggtgcggggaccagcagtcaccatcctgaccctaatgatgacagggattattgtgactgtgaccccggctgtgccaaccaagctctgatcagcaagaagcttaatgattatcgcaaagtgagccatagctctgggcccaaagctgattcctcccccaaaggctctcgcggcctggggggcctcaagtctgagttcctcaagcagagtgcggcacgtggcctcaggactcaggacctgcccgcagggagcaaagatgacagtgctgcagcccccaaaaccccctggggcatcaacatcatcaagaaaaataagaaggctgtcccaagggcatttggggtcaggctggaggactgccagccagccacggagaaccagcatgtccccttaatcgtggctgcatgctgtcacattgtggaggcacgagggctggagtccacaggcttttaccgagtgcctggcaacaatgcagtggtgtccagcctacaggagcagctcaaccgtgggcctggtgacatcaaccagcaggatgagcgctggcaagacctcaatgtgatcaacagcctgctcaagtccttcttccaaaagctgcccgagcctcttttcactgatgacaaatacaacgacttcattgaggccaactgcattgaggacgcgcgggagtggatgaggacgctgcggaagctgatccgggatctcccaggacactactatgaaacactcaaattccttgtgggccatctcaagaccatcgctgaccactctgagaaaaacaagatggaaccccggaacctggccctggtctttgggcggacactggtgaggacgtctgaggacaacatgacagacatggtgacccacatgcctgacctctacaagatcgtggagacactgatccagcacgcccctgtgggcagcaaggagcctcaggcagtgcccaacattgagtacctcctgcccaacattggcaggacagtgccccctggtgacccggggtcagcggacctgttggagatttaa

SEQ ID NO: 14350 - DNA, 422 bp, Homo sapiens
  SIMILAR (212)..(421): 431254mologous to Caenorhabditis elegans GTPase-activating protein,accession number U02289,Smith-Waterman Score=165.
ccatagctctgggcccaaagctgattcctcccccaaaggctctcgcggcctggggggcctcaagtctgagttcctcaagcagagtgcggcacgtggcctcaggactcaggacctgcccgcagggagcaaagatgacagtgctgcagcccccaaaaccccctggggcatcaacatcatcaagaaaaataagaaggctgtcccaagggcatttggggtcaggctggaggactgccagccagccacggagaaccagcgcgtccccttaatcgtggctgcatgctgtcgcattgtggaggcacgagggctggagtccacaggcatttaccgagtgcccggcaacaatgcagtggtgtccagcctacaggagcagctcaaccgcgggcctggtgacatcaacctgcaggatgagcgctggcaagacc

SEQ ID NO: 14351 - DNA, 2484 bp, Homo sapiens
  SIMILAR (472)..(711): 381254mologous to Caenorhabditis elegans homology with breakpoint cluster region protein; putative,accession number L16685,Smith-Waterman Score=122.
  misc_feature (1)...(2484): n = a,t,c or g
atgtctgtgacaggaggagccaatcccattgcccttgtccagaaagcgggcagcggcctgcgccagtggaagcgggtgtacgccgcgctgcgggcgcgctcgctnctcgctgagcaaggagcggcgggagcccgggccggcggcggcgggggctgcggcggccggcgcaggtttcggggtgaggagggtgcacaggcagggctcacgggggacctggcgtcctcaggtgcggggaccggcagtcaccatcctgaccctaatgatgacagggatgattgtgactgtgttaggatcgccttgagcaggctccggtgtggagtggaccccggctgtgccaaccaagctctgatcagcaagaagcttaatgattatcgcaaagtgagcctgagcgacagagaccctatctctaaagaaacaaagttctatggcttccgccttgtagttttggcccacgagccacacggaagtccttgcattgctctgggcctctcctttgggatgacagtgctgcagcccccaaaacccccntggggcatcaacatcatcaagaaaaataagaaggccgctccgagggcgtttggggtcaggctggaggagtgccagccagccacggagaaccagcgctggcaagacctcaatgtgatcagcagcctgctcaagtccttcttccgaaagctgcccgagcctcttttcactgatgaagaacttccattggctccctctttctgtcctgaggaagagaatggaggccgtggaggaggaccctccccccggtaccgcctggagcccatggacaccatctttgtcaagaatgtgaaggaagacggccctgcccatagggcggggcttcgcacaggagaccggctggtaaaggtgaatggggaaagcgtcattgggaagacctactctcaggtcatagctctgatccagaatagtgatgacactctggagctgtctatcatgcccaaggacgaggacatcctccagctgccagccgagagagagtcgggtggggaggcctccgagccacccagggttgtacggccggaacccagcacccgggccctggagcctcctgcggaggatcgcggcgatgaggtggtcctgaggcagaagcccccgacgggccgcaaggttcagctgacccccgcaagacagatgaaccttggatttggtgacgagtccccagagccagaggccagtgggcgaggggaacgcctgggcaggaaggtggcccctttggccaccaccgaagactctctggcttccatcccctttattgatatttgtgtcaggccctgtgcatggctccatgctctcctggactggatggcccagcagagggtgttggacatgcagggacaatccattgggatgggcgtgtcgtgggacagggagcttgaggagaagggctcagagaagggctatgatgagcccaccagccccagcattgacctccaagccaagcacgtccctgcctctgctgtggtctccagtgccatgaactcagcccctgtcctgggcaccagcccatcttccccgaccttcactttcaccctcggacgccattactcgcaggactgcagcaccagtgctcatttgaatatatttgctggaatatttgatatctccaatgaccatctccaggtttctacattggaatccaacttcacaagaatccacttgacccactatactggaggaaacttccctgcatggctagcctgggatgctgtgcccttctcttctgacctgctgaaccttggtgtccatgtcctggagacgggggcagggaccccttttctgggatcagcatgcagctcagatggtattgcctcccaaatgaacacagctgggctaccccagatccgggatctcccaggacactactatgaaacgctcaaattccttgtgggccatcctcaagaccatcgctgaccattctgagaaaaacaagatggaaccccggaacctgggccctggtctttgggccgacactggtgaggacgtctgaggacaacatgacagacatggtgaccccacatgcctgaccgcttacaagatcgtgggagacactgatccaagcacttcagactggttcttcagtgacgaagaggtacaagggaaaagagaacccctgtgggctgacaaggagcctcaggcagtgcccaacattgagtaccttcctgcccaacatttggcaggacagtgccccctggcgacccggggtcagcggacctgttggagatttaaaggattctaccacctgtagttcagccaagtccaagggttcgtgggcccccaagaaggagccgtacgcccgggagatgctggcgatctccttcatctcggccgtcaaaccgcaagcgcaagaagcggcgggagacgcgggggctgggcagcagcaccgacgacgactcggagcaggaggcgcacagagcctggggcgggggccacagcgccggggacatcaggagcggtcgc

SEQ ID NO: 14352 - DNA, 1533 bp, Homo sapiens; identical to SEQ ID NO: 14323
  SIMILAR (617)..(549): 821254mologous to Homo sapiens Human secreted protein, SEQ ID NO: 7115,accession number G03034,Smith-Waterman Score=101.

SEQ ID NO: 14353 - DNA, 756 bp, Homo sapiens
  SIMILAR (98)..(244): 331254mologous to Rattus norvegicus ETS domain transcription factor PET-1,accession number U91679,Smith-Waterman Score=85.
ctaagtacctgataaatggggttggtgtttattcatgagcaggtacttggagacggcgattagaacagccgcctgcgctgcctcgccaaggtacttaaatccgggcaggtgcagcgcggcgcgcggccccagctcacaaagcccgcggccgccgtggagcgggcacaagaagcgaacggcatcaccaggctggggtggacagagcgcggcctcccctatgccgccctcaagatcatggccggcctcggtagggggccccgaatttaggctctcagagacaccttccaggccatttactctttcagggatgaagtaggggtggcaagtgcactcctgggcacccgcactcttctgctctgtgatgtctttctctccagacacatgctgcttatgcaaataggcccattcacagccctgttccccatcccccagcacggtgatacttctgcgagagacttcttctaactgggattggcagccagaggatttgggagctcctaaagcctctgccagcccgccccccagcaccacaaggatcaccagattaaggagctcagagctacagctgaggcggctaaacccttcagactcttgccaccggggcttctgcttctcttttcgctgtcttctgactccagagcatgtcctgccaaaaactgtactcaggatccaacctgggtgcaaggtagcatgagaaccagggtaaaattctagccttcgtgctctgaacagcatctgatttcttctgggatgcat

SEQ ID NO: 14354 - DNA, 757 bp, Homo sapiens
  SIMILAR (309)..(656): 331254mologous to Hylobates lar dopamine receptor D4,accession number AB032907,Smith-Waterman Score=111.
tcttggctcccagtttccttctgggcagacattgcccctctgccctgaggacctgcttgtttgggggaagaggcctttagaggcaccagggtcatgccaggtgttggacatggtgaactgggaagtgctctccatctggccacagcgcagaagtatcaccgtgctgggggatggggaacagggctgtgaatgggcctatttgcataagcagcatgtgtctggagagaaagacatcacagagcagaagagtgcgggtgcccaggagtgcacttgccacccctacttcatccctgaaagagtaaatggcctggaaggtgtctctgagaggacggaaggtggccggaagagccccgtcccagctcagatgggcttccccgccatcttccggacaaagtgtcaagagcctcctcctcccgccggcgcggcgcctgtgccctggtcccggtgtccccgctcggtgccaccgaaggatctaggggctcgggccggggagggggtggaggggggagtggaggcgcgatacgaacccgtgggagcctccccaaccccgcagtcccagcggcaaactgtgcttggtcggacggatgcccgcgcggagctccacggcggccgcgggctttgtgagctggggccgcgcgccgcgctgcacctgcccggatttaagtaccttggcgaggcagcgcaggcggctgttctaatcgccgtctccaagtacctgctcatgaataaacaccaaccccatttatcaggtacttag

SEQ ID NO: 14355 - DNA, 534 bp, Homo sapiens
  SIMILAR (530)..(246): 351254mologous to rat cytomegalovirus Maastricht pr58,accession number AF232689,Smith-Waterman Score=74.
cggcacgaggaccattctgagccaacttttttgatctcgccatctttgctttgcttcctcttgccttcggcacccccgctgcctcggctgacgcctatcctctgcagcattacttgtacccgctgttcaaaggatggagccagttctgtttctccccgctccaggggccgccgcttgtcgggtctggcacccagcgttgcctcctcctcggcaggcagcagtatcatcgagtaggccttgctatctcttgtgtagcgaggtcggctcctgccggcagggtcagggctgctggtgtccccctcagccccaccaagctcctcaccacggctgggacgggttggcggccgcagtaggtcgccaaatgtagtttttcgggttcggggagctgccccagggctggtctctagatcagtccgtggaccccgcgttgaacgaggcttcttgaaggcaaagagggtgcccagcttctttcgcagtgtacgggggacaggagtggcgcccccctcagtggccgggtcctcctcgggggcccag

SEQ ID NO: 14356 - DNA, 2143 bp, Homo sapiens
  SIMILAR (1890)..(2132): 331254mologous to Mycobacterium tuberculosis proline-rich mucin homolog,accession number AF071081,Smith-Waterman Score=88.
  misc_feature (1)...(2143): n = a,t,c or g
ggaaaggagtgaccatttggtgccgcaaggggaaagtgagtagggaaggctgctccccagggccggacaaaccaagaaagccaggtcttcctcctgcctccatgggtcaggtccagcccttcaccagggctcccccaggtgcctttcccactctaggctcctggaagcaggctggtaggactggatgtgcataaggggcacctctggctggcaggcaggcaggcctggactctcagcaagagagtgggctcaagcagcttggttttggccctctccacagcttgtggggcaaaggcttatgtcccaaaggtgagctgcccaactgggacagagagcccctctggagaggaacagagtaaacaacttggaactcagctgaaaacagtgaagataaggcaacagaaaaatggggaggtggcccatgggtaaccaagtgcgancccaggcagacacccaaccccatgcagcaacacagctgtccccggaagcctcctgggccctcctcaagccactcccacaacctaagctcaggcacccgtccctcatcccctgacacaccccctgaaaggtagcaagcttcctcaagatactgcctggaagggcaacatcagccctggaaccctcatggggtttatctgcccattcggtttcaggactaaatagtgttgcccaaacccacagggataagggatagtcccggctctgctactaatttgctatgtgactttagccaagtcacttaatctcctgggcctgtttccttatttgtagcaagagaggaatgggggagatgttcactgaaccccattccagctgcaaaagcctgtggttttaatccaatcctgctaggctatgatcatttaaacagcctgatgtctccaacttctgggtttgggagctaggtagccccaggctgtcacaagagatgaatttcctttacagacaggacgcctcctaacaggccatggtctatgggtctgccagccccaaggaccaagaaaaagcagcagctataggatcatttcccaaggcagaattctgacagcacagggcccagggccactggccccatcaccagcagttggtccaattcaaacatttttcttgttgcccagctgtgggcccagtgaggcctggtgagcaatgggtatctcaggccacaccaaccattcccatgtccaccaatatggagcaggagcttgcaaagcccagattcaggcagtggactgaaagttcaacttccggccttgccatggctgaccttactctttgcatgggcggcttgtgcactcccctcgcaatgtgaagcacatatgcaaattccagccgtcctgctgctcctctgtgtagacttcctccctttcctcctccagggcagccagtcctctccacaggtgggccaccccaagtccggcaaccatctcagtctttcctttcctgattccccaatggtagcgggacacttttactctgccagctgtaaggatctatctgaaacagctgaagcatcctttctctcagagctgtgcagagatggtgaagatctaggcaggaagaaagcagcccctgtactcaagggcctctgtcctgggaatggagtcttctttccagcagcctgacacacagaagctctcaggacgaaggcagtctctggtctgtccagtctcaagagctaaggattacactccgggatggaggtcctggaccatcctgttgccccaaccacggctccgagctccgcattcgactgctgccccagtgtcttccagttggcagactcagcccctggctccctgggccaggtctgcaggaaggctctgtagggagaaagtgtcagccaagacctggtcaggcattggcgataggtccctcaactcacttgcttcctcttgccttcggcacccccgctgcctcggctacgcctatcctctgcagcattacttgtacccgctgttcaaaggatggagcagttctgtttctccccgctccaggggccgccgctagggacagagatgccgagttggagacagtccgcgccctgggtcccagaagcgccttcaccacccccatcagcaagcctcaccttgtcgggtctggcacccagcgttgcctcccctcggcaggcagcagtatcatcgagtag

SEQ ID NO: 14357 - DNA, 4207 bp, Homo sapiens
  SIMILAR (405)..(4085): 1001254mologous to Homo sapiens LAF-4,accession number U34360,Smith-Waterman Score=6388.
ttctgtgagaaagtgccattcagaaagctcgccagcgagaagagagctccacgtcagccctcagaagaaagacgtcaacgaccttactggggagagaaagaaaaggaacgggagctgagagggacagggtctcaccatgtcgcccaggcttgtcttgaactcctggcttaagtgatcctccagcctcagcctctcaaagtactgggattacaggcatgagccaccatgcctggcccagcctcttccctgagaactagcagctgatcacctgcctttccagaccggagacgggcggcaagtttgaagtcgacacccagaggccagtttgtcccccttcccgcgcgcgggcggcccgagcctcggcggcggcggtagcggcggcggcgacgctgacacctcccaccatggacagcttcgacttagccctgctccaggaatgggacctcgagtcactgtgtgtctatgaaccagatagaaatgcattacggaggaaagaacgagaaagaagaaatcaagaaactcaacaggatgatggcacgtttaattctagttactctctcttcagtgagccctacaagactaacaagggggatgaactctccaaccggatccagaacactttaggcaattatgatgaaatgaaagactttttaactgatagaaccaatcagagtcatctcgttggagttcccaaacctggggttcctcagactcctgtgaacaagatcgatgaacattttgttgcagattcaagagcccagaaccagccctcgtctatctgtagcactacaacttccacaccagcagctgtccccgtgcagcagagtaaaagaggcactatgggctggcagaaggctgggcacccaccctctgacggccaacagagagcaacacaacagggctctctcaggaccttgcttggagatggtgttggcagacagcagcctcgggccaaacaagtgtgcaatgtggaggtgggccttcagacccaggagaggccacctgccatggcggccaagcacagcagcagcggacactgtgttcagaactttcctccatccctagcttcaaaacccagcctggtccagcagaaaccgaccgcgtatgtgaggccaatggacggccaagatcaggcccctgatgagtctcctaagctgaagtcgtcttcggaaaccagcgtgcactgcacatcatacaggggagtccctgccagcaagccggagcctgccagagccaaggccaagctctccaagttcagcatccccaagcagggggaggagagtagatctggagaaaccaacagctgtgttgaagaaataatccgggagatgacctggcttccaccactttctgctattcaagcacctggcaaagtggaaccaaccaaatttccatttccaaataaggactctcagcttgtatcctctggacacaataatccaaagaaaggtgatgcagagccagagagtccagacaatggcacatcgaatacatcaatgctggaagatgaccttaagctaagcagtgatgaagaggagaatgaacagcaggcagctcagagaacggctctccgcgctctctctgacagcgccgtggtccagcagcccaactgcagaacctcggtgccttccagcaagggcagcagcagcagcagcagcagcggcacgagcagctcctccagcgactcagagagcagctccggatctgactcggagaccgagagcagctccagcgagagtgagggcagcaagcccccccacttctccagccccgaggctgaaccggcatcctctaacaagtggcagctggataaatggctaaacaaagttaatccccacaagcctcctattctgatccaaaatgaaagccacgggtcagagagcaatcagtactacaacccggtgaaagaggacgtccaggactgtgggaaagtccccgacgtttgccagcccagcctgagagagaaggagatcaagagcacttgcaaggaggagcaaaggccaaggacagccaacaaggcccctgggagtaaaggcgtgaagcagaagtccccgcccgcggccgtggccgtggcggtgagcgcagccgccccgccacccgcagtgccctgtgcgcccgcggagaacgcgcccgcgcctgcccggaggtccgcgggcaagaagcccaccaggcgcaccgagaggacctcagccggggacggcgccaactgccaccggcccgaggagcccgcggccgcggacgcgctggggacgagcgtggtggtccccccggagcccaccaaaaccaggccctgtggcaacaacagagcgagccaccgcaaggagctgcgctcctccgtgacctgcgagaagcgccgcacgcgggggctaagcaggatcgtccccaaatccaaggagttcattgagacagagtcgtcatcttcatcctcctcctcggactccgacctggagtccgagcaggaggagtaccctctgtccaaagcacagaccgtggctgcctctgcctcctccgggaatgatcagaggctgaaggaggccgctgccaacgggggcagtggtcctagggcccctgtaggctccatcaacgccaggaccaccagtgacatcgccaaggagctggaggagcagttctacacactggtcccctttggccggaacgaacttctctcccctctaaaggacagtgatgagatcaggtctctctgggtcaaaatcgacctgaccctcctgtccaggatcccagaacacctgccccaggagccaggggtattgagcgcccctgccaccaaggactctgagagcgcaccgcccagccacacctcggacacacctgcagaaaaggctttgccaaaatccaagaggaaacgcaagtgtgacaacgaagacgactacagggagatcaagaagtcccagggagagaaagacagctcttcaagactggccacctccaccagtaatactttgtctgcaaaccactgcaacatgaacatcaacagtgtggcaataccaataaataaaaatgaaaaaatgcttcggtcgcccatctcacccctctctgatgcatctaaacacaaatacaccagcgaggacttaacttcttccagccgacctaatggcaacagtttgtttacttcagcctcttccagcaaaaagcctaaggccgacagccagctgcagcctcacggcggagacctcacgaaagcagctcacaacaattctgaaaacattcccctccacaagtcacggccgcagacgaagccgtggtctccaggctccaacggccacagggactgcaagaggcagaaacttgtcttcgatgatatgcctcgcagtgccgattattttatgcaagaagctaaacgaatgaagcataaagcagatgcaatggtggaaaagtttggaaaggctttgaactatgctgaagcagcattgtcgtttatcgagtgtggaaatgcaatggaacaaggccccatggaatccaaatctccttattacctgatgtattcagaaacagtagagctcatcaggtatgctatgagactaaaaacccactcaggccccaatgccacaccagaagacaaacaactggctgcattatgttaccgatgcctggccctcctgtactggcggatgtttcgactcaaaagggaccacgctgtaaagtattcaaaagcactaatcgactatttcaagaactcatctaaagccgcccaagccccatctccgtggggggccagtggaaagagcactggaaccccatcccccatttctcccaacccctttcccggcagctccgtggggtctcagggcagcctctccaacgccagcgccctgtccccgtcgaccatcgtcagcatcccacagcgcatccaccagatggcggccaaccacgtcagcatcaccaacagcatcctgcacagctacgactactgggagatggccgacaacctggccaaggaaaaccgagaattcttcaacgacctggatctgctcatggggccggtcaccctgcacagcagcatggagcacctggtccagtactcccaacagggcctgcactggctgcggaacagcgcccacctgtcatagggacctcaccctggggccagagtgggctctggtctccacagatggctcaacgtttttggacactgtgctactgaaactcccagccacagcatttatagactgcggtgaacatttcctca

SEQ ID NO: 14358 - DNA, 1326 bp, Homo sapiens
  SIMILAR (895)..(1278): 921254mologous to Plasmid F resolvase,accession number AP001918,Smith-Waterman Score=585.
atgggtccttgttccttctcaattgcttctcctggggctaagggacaagaaaaggaaacagtcctgttggagcaaggaggcagagttgtggacctgcttataattggaggcctggccccaagcctctcccattggctgaactcaaccagaagtcctgccagcacaatgcattttgcagagggcagcctactactggggcacacaccgaacagagcagaggaagggagagaagtgatctgggtggggagcaagcagacagcaaccaatgcaaagtccttccaagaagagctcaccctggagctgaagcagaagtatggaggaaaacgcgcgggcggcccgagcctcggcggcggcggtagcggcggcggcgacgctgacacctcccaccatggacagcttcgacttagccctgctccaggaatgggacctcgagtcactgtgaagaaagctacaccaggaaaggagaagagtccagatacacccagacacatcacttctgtaaaaagctttgcagtttatgacctgctttggcagcaaccgtgcccctgtgggaggatgggtattgactgggctttccatgttacagctgaggaaactgaagctccaggatgtcacaacttgcttgagcgtgtcaagccgctggccatggcagggatgtctgcatggggcagatggtggcaggcaggctcctctgagtcttcccaggcagctcaggggcagcgaggacctcatacaaatgcacagtggccagacacagcccagagagaacaagaagtgcaaggaacagaagcttcagaaccacttaattcttcagcccaaggatcccatcatggacgaaattctctgcatctggccactttgccttccagcacattgattcttcttctgaggcccctcaggaagaaatttagaacaaacaacggtggtcagagtttagtccgcagtttcctcttatctgaggtctataggccagcagatccatttgaactgtcagagacaaaaactgacagagacaaagaacacccaatccagccttctcatgttgcaaaggaagacgttgaggctagagacaaggagcgcctcactccagggccccagaaaggtctccaactccctaggacagtggacaggctggggggaggggcacaagtactgaagttcttcgccagaggatactgtcagagagcccaaggcggagatggtccctatgccccatgtttccatggaaacataggaggagtgatgacagtcagcacagccacaccatctgctcgggacctggtgaatgatgaaaaaatacagaaagaaaggcacctcgaatcctag

SEQ ID NO: 14359 - DNA, 710 bp, Homo sapiens
  SIMILAR (548)..(892): 1001254mologous to Plasmid F Protein D,accession number M12987,Smith-Waterman Score=584.
ctgcagcgcggcagggggcagctcgcaaacctgtggcggtgacgtgagccccgccaacccggaaacggcggcggcggcggcaccggaggctccgaggctcctgcgctcccgcgccgcgctcccctcgcccgcccgggccgccaggcccagtcccagggcgcaaggctacttgcgtcagcagcgtgccgaagcaagatagcggaatcaggaagagagccggccggaagacacctgccctggccggaagatacgtacccctgaagatcgagaaagaggccatccggggttccaaccgatacaaaaactttacattgaagacatcagggtcagctgatggtggctttgtaaggtgtattaaagggacttgcgtcccagtctgtaggccgtgggagccagcggaggatttgtgtactagaaacggtggggccgggcgcgatggctcacgactgtaatcccagcactttgggaagccgaggcaggtggatcacttgaggccaggagtttgagaccagcctggccaacatggtgaaaccccatctcttctcaaaatacaaaaattaactgggcgaggtggcgcctgcctgtggaatcccagctacttaggaggctgaggcaggagaatcgcttgaacctaggaggtggaggttgcagtgagccaggatcgtgccactgccctccagcctgggcgacggagcgagactcagtctcat

SEQ ID NO: 14360 - DNA, 411 bp, Homo sapiens
  SIMILAR (188)..(232): 861254mologous to Mus musculus DMR-N9,accession number Z38011,Smith-Waterman Score=80.
cccgtgcggtggaattcgaggagggaaggagatgaacgagattaagacccaattcaccacccgggaaggtctgtacaagctgctgccgcactcggagtacagccggcccaaccgggtgcccttcaactcgcagggatccaaccctgtccgcgtctccttcgtaaacctcaacgaccagtctggcaacggcgaccgcctctgcttcaatgtgggccgggagctgtacttctatatctacaagggggtccgcaagggctcattgtcatccccaagccaggccagttctccaggtggaactgtagtgtagcgacctcactgctgcgcgcacagtctcccgggacttggactcgagggagtgacgaggaggagctccgagctgcgcctgagccgtgccagccggcggacctcagg

SEQ ID NO: 14361 - DNA, 477 bp, Homo sapiens; identical to SEQ ID NO: 2462
  SIMILAR (6)..(131): 311254mologous to Lycopersicon esculentum extensin (class I),accession number X55683,Smith-Waterman Score=65.
  misc_feature (1)...(477): n = a,t,c or g

SEQ ID NO: 14362 - DNA, 401 bp, Homo sapiens
  SIMILAR (357)..(31): 671254mologous to Homo sapiens hypothetical protein,accession number AL162044,Smith-Waterman Score=356.
  misc_feature (1)...(401): n = a,t,c or g
ccctctgcctggccaccaccaagtctgggaggtgtacccaacagctcattgagaacgggccatgatgacaatggcggttttgtggaatagaaaggggggaaaggtggggaaaagattgagaaatcggatggttgccgtgtctgtgtggaaagaagtagatatgggagacttttcattttgttctgtactaagaaaaattcttctgccttgggatcctgttgatctgtgaccttacccccaaacctgtgctctctgaaacatgtgctgtgtccactcagggttaaatggattaagggcggtgcaagatgtgctttgttaaacagatgcttgaaggcagcatgctccttgtttctttgttcacttgtttatctgctgaccttccctcnactattgctcgtgcc

SEQ ID NO: 14363 - DNA, 220 bp, Homo sapiens
  SIMILAR (36)..(161): 711254mologous to Homo sapiens Human secreted protein, SEQ ID NO: 7678,accession number G03597,Smith-Waterman Score=147.
tctttgggtccacgctgcttttatgagctgtaatactcactgcgaagatctgcagcttcactcctgagcccagcaagaccacgagcccaccgggaggaacaaacaactccagacgtgctaccttaagagctgtaacactcaccgtgaaggtctgcagcttcactccgtgagggtctgcggcttcattcttgaagtcagtgagaccaagaacccaccaatt

SEQ ID NO: 14364 - DNA, 1050 bp, Homo sapiens
  SIMILAR (313)..(1026): 331254mologous to Mus musculus Gag-Pol polyprotein,accession number U63133,Smith-Waterman Score=296.
ttagaagtccccatgatctgctgtctgaaagctggacaccccaaacagccactggcatagctcaaaggccaaagagccaatggggtagatcccagtttgggtctgaagccctgagaaccagaaacaaggatagacccactgtcttggaattccagccagctgccagtagcagcattgcatctccctgggatgagctccgtgggggcagggcaggcgatctgcaatctttgctgtttgggtgaccttgtcagtccttccagccttccggctttggaaaggacaggcccacctccctggaacagaggtcccaaagggagaggcaggctgccatctttgctgtttcacagccttcactggtgatacctccaggtactggaaaatctgaggtgaatgcagacaggagcaggcccccagcatactgcagcaacctaggcagatactccgggcctgggcctccttcactggtgatacctccaggtactggaaaatctgaggtgaatgcagacaggagcgggcccccagcatactgcagcaaccatttcccctctgcattgccctagtagaggtcctccatgaggtctctgtccctgcagcagacttctgcctggacatgcaggcatttccatacatcctttgaaatccaggtggaggttcccaaatcttaactcttgccttttgtgcacctgcaggcccaacaccacgtggaagccatgtcttggggcttgcaccctctgaagcactgacctgagctgtacctttgcctcttctcaccacagcaggagtttttgggtccacactgcttttatgagctgtaacactcaccgcgaaggtctgcagcttcactcctgaagccagcgagaccacgagcccaccgggaggaaagaacaactccagacgctctgccttaagagctgtaacactcaccgggaaggtctgcagcttcactccagaaggaagaaactccgaacacatctgaacatcagaagggacagactccagacgcgccaccttaagagctgtaacactcaccgcgagggtccgcagcttcat

SEQ ID NO: 14365 - DNA, 942 bp, Homo sapiens
  SIMILAR (437)..(285): 411254mologous to Myxococcus xanthus response regulator FrzZ,accession number AF049107,Smith-Waterman Score=105.
ttagtatttgttaaggttttgcatgtcagaacgtcgatattgcccaagacgtctgggtaaaaacttcttcagggtccttagtgctgattttttgtcacaagatgttaaatttctcatcagttgtttaggctggccaccacagtcctgtcttttcgggaagatctgcagcttcactcctgaagccagcgagaccacgagtccaccgggaggaacgaacaactccagacgtgctgccttaagagctgtaacactcaccgcgaaggtctgcagtttcactctctttgggtccaggctgcttttatgagctgtaacactcaccgggaagatctgcagcttcactcctgaagccagcgagaccacgagtccaccgggaggaacgaacaactccagacgtgctgccttaagagctgtaacactcaccgcgaaggtctgcagtttcactctgatatttatcccagcaaatccctccagtttttggagttttctcctcacatctggggctgcctgagccacaaatgccaaattaagagcacggctattttcaggggacgctgggtcaaaaggggtgtaaatccggtaagcctcctggaggcactctaaaaacgctcctagtgactcttcgggaacctggacgacttcagtcgccttagacaagtttatgggtttccgagaggctcccttaatacccatgaggagataccggtgaaaattgtccaaagctgtccttccacttgaggaatttgggtcccagttaggccgggtagagggaaaggcctcctcaaggaggtctctaccttcctcctcaggcctaccggctgatgcaaggaagtgctttctggcctcttttcggatacgctccctctcctcagaggtaaagagagttaaaaggagctgttggcagtcttgccaggtgggccgatgggtccggagtacggactccat

SEQ ID NO: 14366 - DNA, 3414 bp, Homo sapiens
  SIMILAR (587)..(333): 981254mologous to Homo sapiens Similar to chromosome 2 open reading frame 3,accession number BC000853,Smith-Waterman Score=443.
tcatttctttttcccagtgttttttttgtgttcatgcgtttctgttttgctagttatattctttttccgagatgaggtattaggaacaactgcactagaaggtccacttgtagctggtttgctgcttgctttagtgctctttaaggtagctggtggtgttgggaggatctttgcaggtgtatacgtatttaaagatactttttttctcattattggactggaacgtaaagctgtagaggcatctatgcagccagaagaggtcagctttttacgatgagtacgagcataatcctgtaggttaggtgcgcttgaagaacccccgagcaccgaggtgctaaacaggcccgcacagtgagaccctacagtaggattctgcttctgttccacaagagttcttggtgttctcaggtaattagcattttcagatacaacctgttgccatgagccaaaaatactggatgtgaaagccaatgatttgggggagacaggggaagaagtgatttgttcccctgatctgcgtcttcgacgcccagtacccacaccactggtataatgcagccaggtaccagtaccctctgggctagacacactcagggggctctcttcatcatttgtagccgtcttcctagatcttggaagtggagacttcctgtgtatatgaattggctctgataccattggtttaaacaatatcacagctcgatcaacttcatctcttttagaagtatgtggttcatcatcattatcaattttaaaaggtctcctgccttcattctctctggaagctggtctatatccatagccagatggcaaatttttgtcttcttcacaacctttggctcccggactaaagtgtaattcaacatgaaagcgttcttctgaggaaagatccttattaggatcctcataaagcatgataacaatctgagtcatgtagttgagctcattgacaacgtttaaataatccatagctcgtttccactgttcatcctttgattccatctccttcaccattcctccatcttcattctgagaatcattggtattgcataaggcaccatagcgaagaatagacagcaaagaatgtacatgactttcactggtaaaatataatctagtacgaacatgacgttcaggagacagaacacctctagaatacacaggatgaagtttatttacagtgtcatcatcttgtgtcctctgaaggtctgagcgaatttttctaaccagaggagtacagtagcctttggcaatctccagtttttcagctttagttataccatattcctgagggataacaatatctgctaatgccttcgaaagcctatataattccattgtgttttctaatttcaaggaaccattatgctggacatcatattttatacagtcatatatgtcagggattttactaatatcatatcttccattctttgttttaaagtctttctctaacttggaccatctacgtagcataagctccaatgtttcactatggtaaagctgaatatctgatgatttaggatcttccattcgatgtctgatttgagaagtcaaactctgaattaaggaataaactttatcacaggtcttcacagggtttttaattaaatgcattgatttgataagagaaatgcttccagatggagtaagcttttcataatcttcagcagtaaaatctctgtctttctgaagtatttcatgaagccttgccttcacacgttgctgacaactgctcagagagtcactatcactatccaaaagaccgttcatatttgcacttttcaccatttgaacaagaatgggtgtaagctctccttccaaagctaaaagcccctttgcaaaagcagctgcagtcatctggactcgtccttcatcagaggcatatattttgaggtcatgtctgtaggtgctatgtaatctaagtaaaccacaaccaggaaatcctgcataatctccttgacctccaggatacatacacctgaaggctcttccaagttcttcagcctggaccctgcctgcaggagttaattcacctccccattttagaaccaaaagtaaagatggttcttctcttcggctgtcctcctcttcactagatgttttaggacaaccatgagggagataggtcaactgaaccttacgatttattccagaaaaatgaccatacatctctaatacagtcttaagttgttcaagttttggcttgttttcttcaatttcagaatcattattttgccctagctccataagaagctgtcgtgcaatatctagcacttcttccattttcattttttgttttggtgttcgatccccatgacgtataacagctatgacacatctaagttccatcatagttccagatgtagttggtacaattgggatatcttcagcttctaagggtattgaccatggaatatgaaattgtggagcaagttctcgcattacaatatttccaagtatttttgcacagtcatcataatacttcatggaatttttcacaaaactgaagccattgacatcacagacataggactgtccattggcccgtaacaaatcaaagccacaaactgtttgcttaaaagcaaggcagactttccaagcaattaatttctctcgtgcattgagaataacagggtatcttacttcttttccttcactgtctcgttccaccttgccatcaagtgctggagattttcgagcttcagcatgggcataatctggacccactgtataaaccttaacatcagtaccatctgtgggcataaactcttcatatatatatgagcctgtttttcgtacattgctttctggagaataaacactacttctactgccaatctttctaaagagtctttgacttccaccaccagcagaagttgggtaataaatgtaaacattgtgatcttctgcactgactggcttttctacaaatggcttttgaaaaacttccccatttacttctacatgatcttccccttcaatcagattacattccactccatgggctcctgtgcggcccgagcctccccaacgagcaccaccccctgctccacggcgcccagtcccatcgaccacccaagggctgaggagtgcgagcacacggcgcgtgactggcaggcagctccacctgcagcccgcgaagatctgcagcttcactcccgagcccagcaagaccacgagcccaccgggaggaacgaacaactccagacgcgctaccttaagagctgtaacactcaccgcgaaggtctgcagcttcactccaattccggacacgctagtatccgtatcgttaccaaagccagggacctggaagtcatttttgactcccattgcctctccccagctcaattcatgaccatttctagctattccatctccaacatacatttcaaagccatgcacttcttccat

SEQ ID NO: 14367 - DNA, 1338 bp, Homo sapiens
  SIMILAR (481)..(651): 981254mologous to Homo sapiens Human secreted protein, SEQ ID NO: 6188,accession number G02107,Smith-Waterman Score=297.
atggcgcctgaactgagtagtaaggaacaacctgggtcagagtggaagaaggcatgccagatggaggggaccgtgtgtgcaaaggcacaaagagacttgttggatggctttgaccaaaatgccgatgatgatatggacaatgaaatccaggccgaaatggtctcagatggagatgaggaacttgttgggaactggagcaaagaacccaccaccctgggcgctgccacaatggggctgggcacagagaagcagttgggcatggggtgggcaggcagaaaggggcccattgaggacctggagcccctgccccaggctgcctgcaagctccatgcagtggctcatactacatgggaggaggcagtgcagtgtgggagtctgcccaggagaaacagtaacttgctgctggagcagggtgtcctagaggagaccaggaatttgttacaagaacatggtggagaaattgatcttgaaaagaagaggtggctgggcacggtggctcacacttgtaatgccagcactttgggaggccgaggagtgaagctgcagaccttcacggtgagtattacagctcctaaggcagcacgtctggagttgttcgttcctcccggtgggctcgtggtcttgctggcttcaggagtgaagctgcaaatcttcgcggtgagtgttacagctcataaaagcagtgtggacccaaagacccttgggtggtcgatgggactgggcgccgtggagcaggaggtggtgctcgtcggggaggctccggccgcacaggaaccaatggagtgggtgggaggctcaggcatgggggctgcaggtcccggagccctgccccgcgggaaggcagctaaggcccggcgagaaatcgagcacagcgccggtctgtacaagctgctgccgcactcggagtacagccggcccaaccgggtgcccttcaactcgcagggatccaaccctgtccgcgtctccttcgtaaacctcaacgaccagtctggcaacggcgaccgcctctgcttcaatgtgggccgggagctgtacttctatatctacaagggggtccgcaagcctggtccatcaggctctgacatggccagggagcgggcctgcgagtccccggaagagagacaggatctcatcctgttgcctaggctggagtgcggtggcgtgctcatcgttcactacagcctcaaactcctgggctcaaatgatcttcccacttcagccttcctagtggctggaactacagacacagcaaccatccgatttctcaatcttttccccacctttccccgctttctattccacaaaaccaccattgtcatcatggcccgttctcaatga

SEQ ID NO: 14368 - DNA, 1115 bp, Homo sapiens
  SIMILAR (727)..(242): 351254mologous to Mus musculus neural variant mena+ protein,accession number U72521,Smith-Waterman Score=140.
atgatttccttctgttttctgaaattctcccggcaagtcagtctgcatctgcaattctgcctgctctacctgccagtcaccgatgtccctgctgtctggacgtccctctgccaccggaggtgcctgggccggctcggctcccagtggctgctgcgtctgtgtggcgtccggttcagcatctctccctcttggggagatgggcagggccaacctgagacaggacagagtctagggaaaccaacgcagaagtggaagctgaccttccacctctctatgcacacgggcgacttgagccgactgctgggccctcaggggcaagtgctgtcctgtccacctccagtgagtactgcccagggccacatcccaagatgggccacagaagagtcactagctgtctctccacctgccagtcataaaggagtgaagctggagaccttcgcggtgagtgttacagctcttaaggcggcgcacctggagttgttcattgcgcgcctggagttgttcgttcctcccagtgggcttgtggtctcgctggcttcaggagtgaagctgcagacctttgcggtgagtgttatagctcataaaagcagtgtggacccaaagagtgaacagtagcaagatttattgcaaagagtgaaagaacaaagcttccacagtgtggaaggggaccccactagatacaaaggttctccacgtccccaccagactcaggagcccagctggcttcacctagtggatcccgcaccagagctgcaggtggagctgcctgccagtcctggtgccgtgcgcctgcactcctcagcccttgggtggtcgatgggactgggcgccgtggagcagggggtggcggtcgtcggggaggctcgggccgcacaggagcccatggagtgggtgggaggctcaggcatggcgggctgcaggtcccgagccctgccccgcgggaaggcagctaaggcccggccaacaccctttggtcacatgaataaaagtcaagccctttctttgctcattgctcagcctctgggtattaatctgctgagctggtggccacctaaatacaatcgtcctgttcccctcattggtctctccggtctcctgattccagccacattttg

SEQ ID NO: 14369 - DNA, 850 bp, Homo sapiens
  SIMILAR (1)..(498): 981254mologous to Homo sapiens KIAA0433,accession number AB007893,Smith-Waterman Score=860.
gttttttgtttgtttgtttttttttttttattgattattcttgggtgtttctcgcagagggggatttggcagggtcataggacaataatggagggaaggtcagcagataaacaagtgaacaaaggtctctggttttcctaggcagaggaccctgcggccttcccacagtgtttgcgtccctgggtacttgagatcaagggagtggtgatgactctcaaccagcatgctgccttcaagcatctgtttaacaaagcacatcttgcaccgcccttaatccatttaaccctgagtggacacagcacatgtttcagagagcacagggttggggataaggtcatagatcaacaggaatcccaaggcagaagaatttttcttagtgcaagaacaaaatgaaaaagtctcccatgtctacttctttctacacaagacacagcaaccatccgatttctcaatcttttccccacctttcccccttttctattccacaagtaccgccattgtcatcatggcccattctcaatgagctgttgggtacactcacttctcagatgcggcggctgccgggcggaggggcttctcacttatcagacggggtggctgccaggcagaggcgccccatcacctcccggacggggcggctggccgggcggggagctgaccccccaacctccctcccggacagggcggctggccgggcggggtgctgatccccccacctccctcccggacggggcggctggccgggcggggggctgaccccaccacctccctcccggacggggcggctggcccggcagaggggctcctcacttcccagtaggggtggctgggcagaggtgcccctcacctc

SEQ ID NO: 14370 - DNA, 712 bp, Homo sapiens; identical to SEQ ID NO: 488
  SIMILAR (614)..(381): 341254mologous to Pseudorabies virus glycoprotein gX,accession number U27488,Smith-Waterman Score=89.

SEQ ID NO: 14371 - DNA, 513 bp, Homo sapiens
  misc_feature (1)...(513): n = a,t,c or g
gaacttgtctttcttctaaagaacaacaatctttaggtcatgcagacctccctgatggcatccagaagtttcaccgaggggtgcagacagtgttgatcattggggatgtcacctcccggatacccacctcactcatgaaagcccccagttatgtgagagttcaagtcagtcggttgtgagagttcaggtctcccgccttcttgctttggccaaattgaatgtatctttctctgctcctaagcgctgatgtgtcaatgtttgccttactgtgaatcgggtacacggacctaaatactggggttctacaatgctgagacctgccgccacctgcttcttaaagcaggttgatccagcactgtattagggggttatgggcaacattatttgaattttttatggtacataaaagncaatatggtttagggtggggttccggtcctggttttttgaccttatataacactggtgganttctaaaagagagaggaataaaagaaggctgaatggaaagaa

SEQ ID NO: 14372 - DNA, 1338 bp, Homo sapiens; identical to SEQ ID NO: 493
  SIMILAR (1376)..(1741): 731254mologous to Mus musculus Pro-Pol-dUTPase polyprotein,accession number Y12713,Smith-Waterman Score=492.

SEQ ID NO: 14373 - DNA, 578 bp, Homo sapiens
  SIMILAR (470)..(348): 451254mologous to Homo sapiens Human bcl2 proto-oncogene mutant protein fragment 14,accession number Y21166,Smith-Waterman Score=79.
cagaaagatggcttagagaagccagcagtctgcaagtctggggaggatggagagtggtttggggttttgggtcggggtctaaggtgatcagatgcagaagcattacaccgtggcctggtttctttactcagcccctggggtagatcccagccccccgcgtaggtccttttgctggaaaaggaagatggagtggtgggacgaatctgaggagtcgttggaggaggagccacggaaggtgctcgcccctgagcctgaggagatctgggtggcggagatgctgtgtggcctcaagatgaagctgaagcgacggcgagtgtcgctcgtgctccctgagcaccacgaggccttcaacaggctgcttggtaggaggacaccccagagagcacctccaatcctgttctttccaaaaacaggaaacttccaataaccacacttttccaatgggaataataggccccagtgggtgagctctccacgtgggaggaatgtgaagtgatcactcatgagggacacttaggagatgataaaggattaggtcaacttgataaaggtcagcgcttgggataagaaagcttggt

SEQ ID NO: 14374 - DNA, 808 bp, Homo sapiens
  SIMILAR (223)..(375): 941254mologous to synthetic construct beta-lactamase coding region,accession number Z29589,Smith-Waterman Score=242.
cggacgcgtggataaaatgcagagtgtgcatgaagctatctgttacaatttgtggcactgatatttcacaaaagaattctgtcccaatctgagcccctgcattgtgccttcaaatcctcctggactgcaagtccgtaagaaacaggacctccaggttccgccccagggaggttggaattcagcaatataaaaagggtggtggtgccgcaggaaagggtggaactggaaacgctcctggtttcttacttttctccaaggactcctagaaggaccccacccccctccccccacccctgctcctatgaggacaacgcgatcactgaattcagctccatcaagaatgagccaggttcttctagatgatctgcacaaatgggttcctctccttctgcctggtgtctgccattagcattgggaataaagttcctgctgaaaatccacatctccccttgggttccggtgttcttggaagcgagagagacaatgtcacacttcaaggaggcagctctctagacaggaaagttattcacgtcccatgtcaattgagaaatgcaattttatctgctgcctttcattctataccctgcttctgaaccatcgtgttcaactgtgaaactcacactttggtgaccacgactccaaaactcacttaatacacccaaggtcagccccagtgatctgcttcatagcaaggactttgggtgggtctgcccagggagtagggcaccctcagagaatgtggctttggactttatcacagctggggccttttgtgtcacttaagatctaaacttgtaaccatgctaga

SEQ ID NO: 14375 - DNA, 1305 bp, Homo sapiens
  SIMILAR (370)..(783): 941254mologous to Cloning vector pSacBII SacB,accession number U09128,Smith-Waterman Score=684.
atgcgcgcgcgactcggggagacgctacagcccggcagctcccgagacacagctgttttggaaaatgctgcctgccttcaacgcctgtttctgactcttgcggtttcccgcatggctcccagcgagacgatccgtccgggatcccatccggctcccatccggaggcgatcccgtgaaaggatcgctgtccagaagaaggccatggacagaacggagactaggttccgtaagaggggacagattaagggaaagatcacgaccagccgtcaacctcacccccagaatgagcagagtccccagcggaccacctcggggtactccctccaggaggtggtggatgatgaagtgttgggatcatcagcccctggggtagatcccagccccccatgtaggtcccttggctggaaaaggaagaaggagtggtcagatgaatctgaggaggagccggagaaggagctcgcccctgagcctgaggagacctgggtagtggagatgctgtgtgggctcaagatgaagctgaagcaacagcgagtgtcacccatcctccctgagcaccacaaggacttcaacagtcagcttgcccctggggtagatcccagccccccgcataggtccttttgctggaaaaggaagagggagtggtgggacgaatctgaggagtcgttggaggaggagccacggaaggtgctcgcccctgagcctgaggagatctgggtggcggagatgctgtgtggcctcaagatgaagctgaagcgacggcgagtgtcgctcgtgctccctgagcaccacgaggccttcaacaggctgcttgaggatcctgtcattaaaagattcctggcctgggacaaagatctgagggtgtcggacaagtatctcctggctatggtcatagcgtatttcagccgggccggcctcccctcctggcaataccaacgcattcatttcttcctggctctctacctggccaatgacatggaggaggacgacgaggaccccaaacaaaacatcttctacttcctgtatgggaagacccgctctcgcatacccttggtccgtaaccgtcggttccagttatgccgttgcttgaacccgagggccaggaagaaccgctctcagatagccctgttccagaaacttcggttccagttcttctgttccatgagcggcagggcttgggtttcccgggaggagttggaggagaacaccggacccaggggagatgtggattttcagcaggaactttattccaatgctaatggcagacaacaggaaagaggagaggaaccatttgtgcagatcatctag

SEQ ID NO: 14376 - DNA, 1564 bp, Homo sapiens
  SIMILAR (1)..(219): 871254mologous to Drosophila melanogaster ubiquitin,accession number M33014,Smith-Waterman Score=311.
  misc_feature (1)...(1564): n = a,t,c or g
atggacagaacggagactaggttccgtaagaggggacagattacgggaaagatcacgaccagccgtcaaccgcaccgccagaatgagcagagtccccagcggagcacctcggggtaccccctccaggaggtggtggatgatgaagtgttgggaccatcagcccctggggtagatcccagccccccatgtaggtcccttggctggaaaaggaagagggagtggtcagatgaatctgaggaggagccggagaaggagctcgcccctgagcctgaggagacctgggtagtggagacgctgtgtgggctcaagatgaagctgaagcaacagcgagtgtcacccatcctccttgagcaccacaaggacttcaacagtcagcttgcccctggggtagatcccagccccccgcataggtccttttgctggaaaaggaagatggagtggtgggacaaatctgaggagtcggaggaggagccacggaaggtgctcgcccctgagcctgaggagatctgggtggcggagatgctgtgtggcctcaagatgaagctgaagcgacggcgagtgtcgctcgtgctccctgagcaccacgaggccttcaacaggctgcttgaggatcctgtcattaaaagattcctggcctgggacaaagatctgagggtgtcggacaagtatctccttgctatggtcatagcgtatttcagccgagccggcttcccctcctggcaataccaacgccttcatttcttcctggctctctacctggccaatgacatggaggaggacgacgaggactccaaacaaaacatcttccacttcctgtatgggaagaaccgctctcgcatacccttgctccgtaagcgtcggttccagttataccgttccatgaacccgagggccaggaagaaccgctctcacatacccttggtccgtaagcgtcggttccagttacgccgttgcatgaacccgagggccaggaagaaccgctctcagatagtcctgttccagaaacgtcggttccacttcttctgttccatgagctgcagggcttgggtttccccagaggagttggaggagaacaccggacccaggggagatgtggattttcagcaggaactttattccaatgctaatggcagacaccaggaaggaggagaggaaccatttgtgcagatcatctagaagaacctggaccattcttgacagagctgaatacagtgatcacgttgtcctccaaggagcaggggtggggtgggggtacttctaggagtcagttctgcaggctgtacaggaagcatggctggggaggcctcaggaaactgacaatcacggcagaaggcgaaggggaagcaggcacgtttctggccatggtggagcaggagagacagagagagtgaagcaggaggtgctgcatgcttctaaacaaccagatcccatgagcgctcactcacttcttaatattcctttgaaattccttatggcgcacaagtaggcgttaaaaaatacctggtttacgctgactggtggtcctctggtggtatagtggggctnttttctctataaatatttt

SEQ ID NO: 14377 - DNA, 1812 bp, Homo sapiens
  SIMILAR (157)..(570): 491254mologous to Homo sapiens mitochondrial ATP synthase subunit 9 precursor,accession number U09813,Smith-Waterman Score= 208.
ctccctgaagatgcttttggacaatggtctgaggttgggacagtggcaggagataccattcacccaggatctccaggacaagagatcagcctggcagttacatgtgttttttttcaaactggttgccaggttggcatgaacgatgacatcagagattccgaccttcctgattggagggaccggactccgtggtgcctggagatcagttggacaacagtatcttctcagagctgttctctactcctgacttctcctaggcttgagaattgataacatactcttctggatcctagaagtgtccagaagaaggccatggacagaacggagactaggttccgtaagaggggacagattacgggaaagatcacgaccagccgtcaaccgcacccccagaatgagcagagtccccagcggagcacctcggggtaccccctccaggaggtggtggatgatgaagtgttgggaccatcagatgaggggactggtggaagaagaggtgggataggattgactaagacgaaggaagggggccgggagctcgcccctgagcctgaggagacctgggtagtggagacgctgtgtgggctcaagatgaagctgaagcaacagcgagtgtcacccatcctccctgagcaccacaaggacttcaacagtcagcttgcccctggggtagatcccagccccccgcataggtccttttgctggaaaaggaagatggagtggtgggacaaatctgaggagtcgttggaggaggagccacggaaggtgctcgcccctgagcctgaggagatctgggtggcggagatgctgtgtggcctcaagatgaagctgaagcgacggcgagtgtcgctcgtgctccctgagcaccacgaggccttcaacaggctgcttgaggatcctgtcattaaaagattcctggcctgggacaaaggtctgagggtgtcggacaagatcccatcggagcccaccatcctgggagcatcacccaaaacccttcctctggcttctcggatttgcatccgaccttcgaatacccctccatcccgcaatttccaaatgagtacagtcaccccaacactgagctacctggccaatgacatggaggaggacgacgaggaccccaaacaaaacatcttctacttcctgtatgggaagacccgctctcgcatacccttgctccgtaagcgtcggttccagttatgccgttgcatgaacccgagggccaggaagaaccgctctcagatagtcctgttccagaaacttcggttccagttcttctgttccatgagctgcagggcttgggtttccccggaggagttggaggagaacaccggacccaggggagatgtggattttcagcaggaactttattccaatgctaatggcagacaccaggaagaaggagaggaaccatttgtgcagatcatctagaagaacctggaccattcttgacagagctgaatacagtgatcacgttgtcctccaaggagcaggggtggggtggggtacttctaggagtcagttctgcaggcttttaaagggtataaaattttatagcatgaaagatgatattttagtcatacattaatggcccaaaaataatgtcccatctttttactcatcatccctactgtggactaagaattaagtacaagtgggtattatatccaggaaaaatgtcaaaaagcaacctcatcataatcttctaattcacacacaaaggcaacagccagaacaagaattacgctaagtatctgaaacttggtggagccaaagcctctgaagcacaaaacagtcccgtgcttttctgag

SEQ ID NO: 14378 - DNA, 1314 bp, Homo sapiens
  SIMILAR (1123)..(800): 561254mologous to Homo sapiens homologue of yeast PMS1,accession number D38437,Smith-Waterman Score=259.
  misc_feature (1)...(1314): n = a,t,c or g
tgggggaggattatggattaggcttctggactcgtggttcgtgatgttgtcacgttagaaacagatctagcacggttacaagtttagatctgaagtgacacaaaaggccccagctgtgatgaagtccaaagccacattctctgaagggtgccctactccctgggaagacccacccaaagtccttgctatgaagcagatcactggggctgaccttgggtgtattaagtgagttttggagtcgtggtcaccaaaatgtgagtttcacagttgaacacgatggttcagaagcagggtatagaatgaaaggcagcagataaaattgtatttctcaattgctctgaactctagctagacttgacatgggacgtgaataaccttcctgtctagagagctgtctccttgaggtgtgacattgtctctctcacttccagaacaccggacccaggggagatgtggattttcagcaggaactttattccagtgctaatggcagacatcaggaaggaggagaggagccatttgtgcagatcatctagaagaacctggaccattcttgacaagagctgaatacagggatcacgcttgtcctccaaggagcaggggtggggttggggtacttctaggaaatncaaattttgcagggctgtacaggaagcatggctggnggaggcctcaggaaactgacaatcacggcagaaggcgaaggggaagcaaggcacgtttcttcttaatattcctttgaaattccttatggcgcacaggtagcgtagaaaataactgcttcacgctgactgtggtccctctggggtggggggtagggggttttctgggatgattttcccatcgtgatccaacaccagtcagagtcccaacccttcgctgatacacgggaggtagaaatggtgacatcactcagtgcacaaagtgaggctcagagcttccccccgaaaagccaaagtttcaacccgagttaggtcggcaaactctcgaatcttagatgtgtgatgtttcagagctgaaagagattaaggccttcgaagttttcttcttctaccccacatccattgcctgaaacttcaatgagatccactccatagtccttaagctttagatcaatattagtgggcaccagcatccagactgttttctacaatcttcttcaccgcagtgcttagactcagtactaccggcccagagcaaatctgatggactgacttccgatcaataggtttgatggccttagcaggttctgtactccagctctcagctcgctccaaggatgcaacaccggatccgcctcgggaactggaaaag

SEQ ID NO: 14379 - DNA, 1553 bp, Homo sapiens
  SIMILAR (839)..(2317): 521254mologous to Homo sapiens GAP-like protein,accession number AF251038,Smith-Waterman Score=1223.
atggcgatggtctggatgtgtgcaggacccacgctgcaccaactggaggacctacctggatttctgcaaatcacgctgaaaaaaggggctttatttcctctttggacacacaacgtaaggatgaaagaacaacaatctttaggtcatgcagacctccctgatggcatccagaagtttcaccgaggggtgcagacagtgttgatcattggggatgtcacctcccggatacccacctcactcatgaaagcccccagttatgtgagagttcaagtcagtcggtttgtccagaagaaggccatggacagaacggagactaggttccgtaagaggggacagattacgggaaagatcacgaccagccgtcaactgcacccccagaatgagcagagtccccagcggagcacctcggggtaccccctccaggaggtggtggatgatgaagtgttgggaccatcagcccctggggtagatcccagccccccatgtaggtcccttggctggaaaaggaagaaggagtggtcagatgaatctgaggaggagccggagaaggaagctcgcccctaagcctgaggagacctgggtagaggagatgctgtgtgggctcaagatgaagctgaagcaaccgcgagtgtcatccatcctccctgagcaaccacaaggacctaaacagtcagcttgcccctggggtagatcccagccccccgcataggtccttttgctggaaaaggaagatggagtggtgggacgaatctgaggagtcgttggaggaggagccacggaaggtgctcgcccctgagcctgaggagatctgggtggcggagatgctgtgtggcctcaagatgaagctgaagcgacggcgagtgtcgctcgtgctccctgagcaccacgaggccttcaacaggctgcttgaggatcctgtcattaaaagattcttggcctgggacaaagatctgagggtgtcggacaagtatctcctggctatggtcatagcgtatttcagccgggccggcttcccctcctggcaataccaacgcattcatttcttcctggctctctacctggccaatgacatggaggaggacgacgaggactccaaacaaaacatcttccacttcctgtataggaagaaccgctctcgcatacccttgctccgtaagcgttggttccagttaggccattccatgaacccgagggccaggaagaaccgctctcgcatacccttgctccgtaagcgtcggttccagttataccgttccacgaacccgagggccaggaagaaccgctctcgcatacccttgctctgtaagcgtcggttccagttataccgttccatgaactcgagggccaggaagaaccgctctcagatagtcctgttccagaaacgacggttccacttcttctgttccatgagctgcagggcttgggtttccccagaggagttggaggagaacaccggacccaggggagatgtggattttcagcaggaactttattccaatgctaatggcagacaccaggcaggaggagaggaaccatttgtgcagatcatctag

SEQ ID NO: 14380 - DNA, 507 bp, Homo sapiens
  SIMILAR (399)..(337): 471254mologous to Homo sapiens Human neuroendocrine-specific protein NSP-A mutant fragment 59,accession number Y21492,Smith- Waterman Score=47.
tttttttccatccataaatgttttattgaaatagtaaatgcataacccaagtctgattagaattggatttccagaagcccaatccagtggtcactctacaataacacagggtcttttttttccaaactccaaaccatggtgtgcctgccggggccacacctgtcaggctacacaagcagcagggaccccctgagacctgaacatcagatgtctggctggaggcttcagcaggtcttcaacgccatggccggcagttcctcaaagctaaagctggtgcgtgaatgagctgatcatgatgacagctttataacatgcacctgacagatggcacgttgacagtgaggggagcttctctgggctgggacagagaatggcaaatcaaccatcaccggagcaaggctcttccagcagagctgtgaggcactggttagaaagctgatgaccggctgtaatcttgaacagttacattaattaaaagctgcatctttatcaagcaacacttcccag

SEQ ID NO: 14381 - DNA, 2061 bp, Homo sapiens
  SIMILAR (247)..(498): 361254mologous to Plasmodium falciparum merozoite surface protein 2,accession number AF217025,Smith-Waterman Score=96.
atgtgggtacctaacgcgtacagtcaagccgtagtcggggagatcagtgtttacttgatgaggcggcgggcggcgcgtcggcgcagtaggacggagtataatgatgtggtagctaacgcgtacagagtagcagaagtccggcagctcagtgtttacttcatgaggcgcatggcgtccatcatcactgattatatcggaattggtgaggtggggtctttatctctattctcccctcgtgggccggtctacccgcgcatggggccagtagcttgggcgcggcaggcgcttgcggtaagtgccagcttccagcttcacccctaccccacctcccacctctgccctctttcaacccccacagaagaagcctggactacccacagctgcaaattcctgaattccctaattcgaggcaaggacctggtgtcttattcaaatgaatctgtttggcaaaagacccagctctcaaaaccagcctacttacaacagtctagaggggcctgccctggcgagagaatgtctcagggctccactgaagtacagaagagcagtagccaggcctcccagagggtcctgcatgtggggaaggaaaacctttctcagtaccgccttcgactttgccctggtgctgctcagtgtggtttcacccgtgccttccggggactggagatttttgagaatgaagggcagacggtgatcacagatcttgcagggacggcaggcctaaacctggactgtccaggggcgctggcccgtggccaccctgctgctggggtgatacggtccttagtgcgtggctacagacgtgccgcagtcctaccgggaaagatgccagctcatgtcctcaatgagcagctgcagaattgccgccgtctgaaggataaggatgcccaccaacatacgcagtcgcacccttgccgcagtccgcacagtaaagacgctcaccaggtcctccgcagccaaccgcagggtagtgtcacccaggtagctctcagtgccggcttcagcagcaccaggcaatccgcagggctaaggacgcctgccggggtcctccacagctatctgcaggccgtccgcagaggacgacaccagctaggtctcagtgcgcagctgcggcattcctgctatgcacaaagtaatgacgcccacccagcaccgcacacgggactgcgagaggagtgccgcaatattcagggtattgacgcccacccgggtccacagcagcctagagcagggaactgcggaaagagtgcaacaatcctcagggtattgacgcccacaccagtccaccgaagcattccgccgaggcgatacgccgctaggtctcagtgcgcagcttcagcatccctacaatccgcaggggtactgacggtcacccaggtcttctactgctgtatgcagggtcgggacacccagctacgtctcggttcgcgacttcagccgcaacatgatccgcgtagtaaggacgcctgcccgcccaggtcttccatgtaccgctgcggctctggcgcagactgcagcgtaaacacccctggtcggctgtgctcgcaccggatccgaagcggactctgcattcaggctcacgcgctctggaagggaagggcgctggagatgagggtggccgtgcgtctgcgagctgtgaagcctgtgtttgtgactgtaatctcactcacgggtgacagggccctgaggatgactccgtgtcctagactgcgggtattaacatggggcctcttccgtgcctttccgaggcgaaagcctggggtttgccagccgtggccacacctgtcaggctacacaagcagcaaggaccccctgagacctgaacatcagatgtctggctggaggcttcagcaggtcttcaacgccatggccggcagttcctcaaagctaaagctgcagagctcctgcaagcactgcctgctcgggctggctctacttcttgccaccgtcagcctgccatcctcctactcctctgaaatgactctttccaatctcaaagccagtggtcaacatcctggccttgtcttcctgacgttctcagcagctgtcatttgctcctaa

SEQ ID NO: 14382 - DNA, 1417 bp, Homo sapiens
  SIMILAR (1084)..(1055): 901254mologous to Homo sapiens super cysteine rich protein; SCRP,accession number U63332,Smith-Waterman Score=80.
cttcgactgatgttgcttaatgttgatcataacaaggctgttctagtaggaattttcttttccacacttcaacgtttggatgtctatgtgaacaacttattggtctgtccaaaaactacaatatggaatgcccagcagaaacactgtgaacttaataaccatctgtacaaagaccaattccttcctaacctggattccactgtccttggtgaaaactactttgatggaacctaccagatgctttatcttttggttaaaggaactatacctgttgaaattcacactgccacagtgatatttgtttctttccaattatctgttgcaacagaagatgacttttatacctctcacaatctggttaaaaatcttgccttgttcctaaagataccaagtgacaaaatccgtatcagcaaaataagagggaagagtctgaggaggaagagatccatgggattcataattgaaatagagattggagaccctcctattcagttcataagcaatggcaccacaggtcagatgcagttatctgaactccaggaaattgctggttctcttggacaagctgtaattttaggaaacatcagtagtatccttggatttaacatttcatccatgtctattactaatcccctccccagcccaagtgactctgggtggattaaggtgactgcccagccagttgaaaggtctgcatttcctgttcatcacgtggccttcgtgtcctcactcttagtgatcactcagccggtggcagcacagccagaacagccatttcctcagcagccttcggtaaaggcaacagattctgacggtaactgtgtatcagttggaattactgcactaactttgagggccatactcaaggactccaataataaacaagtcaatggccttagtggaaatacaacaattccgtttagcagctgttgggccaactacacagaccttactccccttagaacaggaaaaaattataagattgaatttatactggataatgttgttggggtagaatccagaactttcagcctgctggcagagtctgtctctagcagtggcagcagcagcagcagcaacagcaaagcatcaactgtgggtacatatgcccagataatgactgtagtaattagctgtctggttggaagaatgtggctcttggaaatatttatggctgcagtttcaactttgaatataactttaaagaagctactaaagtgctgttccgaagaacaggctgaaaacaaaaatataagaattattagctactttgttgggcaataggcaaaagtctatagcattttcatgaaaatatactaaaaatatttttatgatatataaaatgtactaattagctttaaacactaaaatcagatttcttcaaaatataaatttgttttgattctttaaaaaaaaa

SEQ ID NO: 14383 - DNA, 406 bp, Homo sapiens
  SIMILAR (242)..(406): 981254mologous to Homo sapiens neuropathy target esterase,accession number AJ004832,Smith-Waterman Score=288.
aatttctgattatgaggaagaagaagaatatgaggaggagggttcatctctctggacacaggttcgcaccacaaatctcatccagggggttcttagcacgctctgggatgggtgcgcccccacactctgaactcaccaacccagccaacaacctggcaactgtggcaatcctgcctgggagtgctgaggtccccatggtggccttcacgctggagctgcagcacgccctgcaggccatcgcatccaaaagttccggctgtcagggtggctggcccagcaggaggatgcacaccgtatcgtactctaccagacggacgcctcgctgacgccctggaccgtgcgctgcctgcgacaggccgactgcatcctcattgtgggcctaggggaccaggagcctaccctcggc

SEQ ID NO: 14384 - DNA, 4141 bp, Homo sapiens
  SIMILAR (3166)..(4002): 221254mologous to Drosophila melanogaster c11.1,accession number AF217651,Smith-Waterman Score=211.
tcaggcatctgtggctgagccgggcggctcctggggcagacagcgtcgttgccggagaatcgacttctcctcctccatctcggaggcagtgctgggacttgcgccctcgggggaccccccttcatccctcgagcagtcgggtccggcgtcctcctcatactctgtcagacaatctgactcctctccgtcagcacagccatcagagacatagctcgtggggggctcaatccgggacacaatctctgccaagtcagtgaagccagagcttgggaaggcaagcacgtctgcacggcggctctcattaaggtctgtagaccgccggtctgtgagcattttctcaatgacgttgccacggctccagcctccaaacaccgccttcccgtactggtagcccacatcatagatctggtcgaacttcccaaagtccatggtcttgaagcagtcgatgggcgggcgcaggtactcgcagtaggagctggacttgacaacctctagctgccgcacacaggacacgtaggccaggcgggactggatttcagccatgtctggaacctttaccttgtcagcccagggattcagccgcttccacagcagccaccagccggacaggctgtccccgtaggtgctgaggtccgtctcatcctggctccccacgtcaatggcgatgaccgttttggcacccatgctgcgggcgatgtccgctggcagattgttgatgtagccgccatccatgagtaggtgcccgtccttggggtcgcacagcgggggcaggtagcccgacagcgtcatgctggcgcgcacgtaccgccacagggagccatctttgtggactcgcatggctgaggcggtgatatctgtggtcacgttgaagtaaggcagccacaggtcctcaatctgcttatcctggaagacccgatggatgctgcggttaaaggcagacccagtgaacatggaggtgactgggtacgtgaggtccaacacaggttccagcaccgaagtcatgctcttggcccactcccgggcccgctgcttcgtgcggctggcgctgcgctcctccgcgtacaacgctccgatgaaagagccaatggacgtgccgcccaccaggtccacggggacccccgcctcctctaatgcctttagtactccgatgtgcgagcagcccctggccccgcccccgcctagcacaagggcaatggtgttccccgtgagcaccctcgccaagcgggagaagtcgctgtgccggtccgcgcgcctggagaaaaccttctcgtagagctcatgcagcttggcagggctgcggcgcgaaaagaggcggcgcggacagcgcaggtgcaggtgccccgagcaccagctgcgcatatttagccactccacggtgcgcgtggggcccgcaccctcctctcggtggagcaggactagctgcttaagggcgcgcacagccgtgttctccagcatctgctccagctggccgagggtaggctcctggtcccccaggcccacaatgaggatgcagtcggcctgtcgcaggcagcgcacggtccagggcgtcagcgaggcgtccgtctggtagagtacgatacggtgtgcatcctcctgctgggccagccaccctgacagccggaactcttggatgctatccagtgcggaggcccccaggcgtgcccggatgatgtcactgttaaggagtagcgtcggaccgatggcctgcagggcgtgctgcagctccagcgtgaaggccaccatggggacctcagcacacacaggcaggattgccacagttgccaggttgctggctgggttggtgagttccgagtgtgggggcacacccaacccagagcctgctgggaagggtccttgcagctgctgcaaattccctagaattttctggctcagtaggtggataaggcgggtcacgacctgcgggtaccggcgtttgatgtgacccaaggtgccctcgggaagcttggctagctccgtgtcgcgcaccgcgtgcaccgtcgtggctcgcggctgccgggtcagtgcctccaccacgccgatgaggtcgccgcggccgtactcgcccaccagctccttcttgccactgcctcgctggatcacgctacgcagccgcccattgagcacgatgtaagtgcagtcggagcggtcgccctgcctgtacagcgcgcgtcccgcctccactgcagtccagtcgatggcgaagtccatctggcgcacgaagggcgacatcctggctgccaccgtgtgcgccgcactcagcaccacactgggctgtgcgcgcatgatctcatagaagtcggacttggagatccgcaggaaggtgcagtcgcgttgggctcgcagtgtgaagatgagaggttcgccagtgagcaccgccagctgccccaccagttccccgggctgcgctacgaacaggcacacgtcctccgccttgtcgatcatgcgctggtacacgtgcaggcagccccagagcacgaagtgcaggctcacgtcctggtctccctggcgggcaatgatggtgccagctttggcgtggtgcagcaagactctgctgttcaggagggaggggtcctcaatccgcatcagcttggccagctcctgctttgctgcctcgaagatgctgctggtctggcggccctggtagggcccgaaagggcagccaccagtggccgactcatcctcacagtagctgtattcacaggcgcctgccggctgctcacgaggctcctgagtgggggtccgagcgggggctgccagggaccccccggaggcctcttcctgcagggacacggagatccggccacgctcataggccatgtcgaagtcggagcgggggccaccctgcaagcctgagatgtcccctggcatggagacgcagcggctcagcagaggggccgagggggtttccagggatgtgggcttcacagggtcccctgtaggtccaggcagcggggccccggtgggatcgggtggccgccctggggtctccctgggctcgtctgtagctgaggtgctgaccattctcttggagccccgcacagggctggtgcgagttgggaggccggggctggggaacagacgcaggggctggatctcgtggctgaagagctcattggtcagacccaggtagttgtgcagtgccaggaaggtgactcgctgcagccgcaccatgatgatctgcacgacccgcaccaagctctccgggtacttggtgaagaccgcggagaatgcttccaccggcaggcgcagcaccgtggagtcccgggccgcccgggcagacacggtccgctggggatgctggtgaccggtgatgacatccaggatgctgagaaggctgttgacgctgtccccaggaaccacttccttcaccacacactccttcccgtcaggccctggcagacagagctccagcagcccgtcctgcaccacgtagatgctggcatctggctggcccggccggaagacgtagtcaccctggcccagccgctggaagaccatgtggcggcagagctccaggaagagtggcttctcgaagtggcccagcacccggacgttcttgagcatataaagcacttcagagggcagatgggagttagccaggtcgccctcggtcaggtcagcttctagcactgcgggcgggggctccttccgctgcagcgtgggcgtctctttctggatgcgcaggatcttcttggcaatgttgagcatcttcagtttcttcctcatgcgtggccgggaggtggcggagacagaggtatccacgagggaggaggtggattgtgacaccttccgcataatcttccggccatagaagagcactttgtccctcttccggaaccgataccgggggccatccggggctggggtttttggcactcgcagcctccgcaccaccaggaggatgagcacggccgtgaccaccaccgccactccggccccgatcatcacgccaagcaccattccagtttgcagcggagcctccatcggttgattccagctggacggccgatctggtagcccggagtctgtcagcagcctgcaggcaggtccccacagggcacggtcctctgcacctggtgacttcctcccgggtcactgccctgtttcagaagagtcctgggatgcttggggtggcgtgggg

SEQ ID NO: 14385 - DNA, 972 bp, Homo sapiens
  SIMILAR (1243)..(2946): 471254mologous to Homo sapiens FLJ00032 protein,accession number AK024442,Smith-Waterman Score=1448.
atgattgtgccactcactccagcctgggtgacagagcgggaccttctcgacaaagaacgagggacggacgacacgggacgtgtacgacgggcggggaccacgtgtgggacgttgtggtacgtgtgtgtacgtgcggtacgtacacgaccgaccgcacgcaccaccgcacgaaagagcacgacgaaacgatggcaacacgcagagaacaggaaacgcgcgaccgggcacggcaatgcctacagcgaccaccgaccaacccaagggcagaagcacacgacacaaagagacaaagagaggaaggactgcgaggaacgggaaacaacagaacaatccgagaaaacaccacgaaaagacaagcgcaaacaaggcagcgcaggcgagggggaacgcggcgcggggggcaaggagaaagggcaaccaagggacaccgaggcaaaaggagaccggcggacggactttcctccgcccaacggccacttaaggccaatccaaaaggggggccaatattggggggtggtttcccccgccccggttgggaacgccaaaccccccccttccgggcccccaaagcgcccaggtttccggcccgtaaacccctcaaatgtggatgccaactggaacggggtgctgcgggggttcacagtgccggaagtcccccaccatggtgtgttagcccgtgacccgttgcggaagccctgtttcactcgagcacactgccccaaggcaccccagccccccaagttcttcgccaaagcactcgcaccaaccaagcacaccgcccccctagataagccttggccaagggccttgccggccgccgaaaagaaggccggcgccggaccagccgcaggtgccaaggtgccccgagcccagctgcgcatatttagccactccacggcccacaatgaggatgcagtcggcctgtcgcggcagcgcacggtccagggcgtcagcgaggcgtccgtctggtag

SEQ ID NO: 14386 - DNA, 3128 bp, Homo sapiens
  SIMILAR (569)..(291): 941254mologous to Homo sapiens ARFGAP1 protein,accession number AF111847,Smith-Waterman Score=443.
gaatgtgtgaaggagaaattgaatctcttgcacgaatttctgcaaacagaaataaagaatcagttatgtgacttggaaaccaaattacgtaaagaagaattatccgaggagggctacctggctaaagtcaaatcccttttaaataaagatttgtccttggagaacggtgctcatgcttacaaccgggaagtgaatggacgtctagaaaacgggaaccaagcaagaagtgaagcccgtagagtgggaatggcagatgccaacagcccccccaaacccctttccaaacctcgcacgcccaggaggagcaagtccgatggagaggctaagcctgaaccttcacctagccccaggattacaaggaaaagcaccaggcaaaccaccatcacatctcattttgcaaagggccctgccaaacggaaacctcaggaagagtctgaaagagccaaatcggatgagtccatcaaggaagaagacaaagaccaggatgagaagagacgtagagttacatccagagaacgaacaagcagtcctaacgggctagttcaaccaccaccttccaaagaaggaacctggggcaagatcgaaatccctcacctaacacccaaacagaaactgaaggaggagccggacagagaagccagggcaggcgtgcaggctgacgaggacgaagatggagacgagaaagatgagaagaagcacagaagtcaacccaaagatctagctgccaaacggaggcccgaagaaaaagaacctgaaaaagtaaatccacagatttctgatgaaaaagacgaggatgaaaagacccaccctcccaagtgcattcagtgcgggcagtacctggacgaccctgacctcaaatatgggcagcacccaccagacgcggtggatgagccacagatgctgacaaatgagaagctgtccatctttgatgccaacgagtctggctttgagagttatgaggcgcttccccagcacaaactgacctgcttcagtgtgtactgtaagcacggtcacctgtgtcccatcgacaccggcctcatcgagaagaatatcgaactcttcttttctggttcagcaaaaccaatctatgatgatgacccatctcttgaaggtggtgttaatggcaaaaatcttggccccataaatgaatggtggatcactggctttgatggaggtgaaaaggccctcatcggcttcagcacctcatttgccgaatacattctgatggatcccagtcccgagtatgcgcccatatttgggctgatgcaggagaagatctacatcagcaagattgtggtggagttcctgcagagcaattccgactcgacctatgaggacctgatcaacaagatcgagaccacggttcctccttctggcctcaacttgaaccgcttcacagaggactccctcctgcgacacgcgcagtttgtggtggagcaggtggagagttatgacgaggccggggacagtgatgagcagcccatcttcctgacaccctgcatgcgggacctgatcaagctggctggggtcacgctgggacagaggcgagcccaggcgaggcggcagaccatcaggcattctaccagggagaaggacaggggacccacgaaagccaccaccaccaagctggtctaccagatcttcgatactttcttcgcagagcaaattgaaaaggatgacagagaagacaaggagaacgcctttaagcgccggcgatgtggcgtctgtgaggtgtgtcagcagcctgagtgtgggaaatgtaaagcctgcaaggacatggttaaatttggtggcagtggacggagcaagcaggcttgccaagagcggaggtgtcccaatatggccatgaaggaggcagatgacgatgaggaagtcgatgataacatcccagagatgccgtcacccaaaaaaatgcaccaggggaagaagaagaaacagaacaagaatcgcatctcttgggtcggagaagccgtcaagactgatgggaagaagagttactataagaaggtgtgcattgatgcggaaaccctggaagtgggggactgtgtctctgttattccagatgattcctcaaaaccgctgtatctagcaagggtcacggcgctgtgggaggacagcagcaacgggcagatgtttcacgcccactggttctgcgctgggacagacacagtcctcggggccacgtcggaccctctggagctgttcttggtggatgaatgtgaggacatgcagctttcatatatccacagcaaagtgaaagtcatctacaaagccccctccgaaaactgggccatggagggaggcatggatcccgagtccctgctggagggggacgacgggaagacctacttctaccagctgtggtatgatcaagactacgcgagattcgagtcccctccaaaaacccagccaacagaggacaacaagttcaaattctgtgtgagctgtgcccgtctggctgagatgaggcaaaaagaaatccccagggtcctggagcagctcgaggacctggatagccgggtcctctactactcagccaccaagaacggcatcctgtaccgagttggtgatggtgtgtacctgccccctgaggccttcacgttcaacatcaagctgtccagtcccgtgaaacgcccacggaaggagcccgtggatgaggacctgtacccagagcactaccggaaatactccgactacatcaaaggcagcaacctggatgcccctgagccctaccgaattggccggatcaaagagatcttctgtcccaagaagagcaacggcaggcccaatgagactgacatcaaaatccgggtcaacaagttctacaggcctgagaacacccacaagtccactccagcgagctaccacgcagacatcaacctgctctactggagcgacgaggaggccgtggtggacttcaaggctgtgcagggccgctgcaccgtggagtatggggaggacctgcccgagtgcgtccaggtgtactccatgggcggccccaaccgcttctacttcctcgaggtggtgcccctgcttgctagagggaaggcttcggggtcaaagttggccagaaggagtctgatgtcgggttatacacaaggcggcttggctgcagggtttcagctttt

SEQ ID NO: 14387 - DNA, 5794 bp, Homo sapiens
  SIMILAR (309)..(1592): 251254mologous to Leishmania major L8453.1,accession number AC008054,Smith-Waterman Score=137.
  misc_feature (1)...(5794): n = a,t,c or g
cgtccgcgtggggggggtgtgtgcccgccttgcgcatgcgtgttccctgggcatggccggctccgttccatccttctgcacagggtatcgcctctctccgtttggtacatcccctcctcccccacgcccggactggggtggtagacgccgcctccgctcatcgcccctccccatcggtttccgcgcgaaaagccggggcgcctgcgctgccgccgccgcgtctgctgaagcctccgagatgccggcgcgtaccgccccagcccgggtgcccacactggccgtcccggccatctcgctgcccgacgatgtccgcaggcggctcaaagatttggaaagagacagcttaacagaaaaggggatgtgtgaaggagaagtttaatctcttgcacgaatttctgcaaacataaataaagaatcagttatgtcacttgtaaaccaaattacttaaagaagaattatccgaagagggctacctggctaaagtcaaatcccttttaaataaagaatttgtccttggagaacggtgctcatgcttacaaccgggaagtgaatggacgtctagaaaacgggaaccaagcaagaagtgaagcccgtagagtgggaatggcagatgccaacaggcccccccaaaccccttttcaaaacctggcacgcccaggaggagcaagtccgatggagaggttaagcctgaaccttcacctagccccaggattacaaggaaaagcaccaggcaaacccccatcacatttcattttgcaaagggcccctgccaaacggaaaacctcaggaagagtctgaaagagccaaatcggatgagtccatcaaggaagaagacaaagaccaggatgagaagagacgtagagttacatccagagaacgagttgctagaccgcttcctgcagaagaacctgaaagagcaaaatcaggaacgcgcactgaaaaggaagaagaaagagatgaaaaagaagaaaagagactccgaagtcaaaccaaagaaccaacacccaaacagaaactgaaggaggagccggacagagaagccagggcaggcgtgcaggctgacgaggacgaagatggagacgagaaagatgagaagaagcacagaagtcaacccaaagatctagctgccaaacggaggcccgaagaaaaagaacctgaaaaagtaaatccacagatttctgatgaaaaagacgaggatgaaaaggaggagaagagacgcaaaacgacccccaaagaaccaacggagaaaaaaatggctcgcgccaaaacagtcatgaactccaagacccaccctcccaagtgcattcagtgcgggcagtacctggacgaccctgacctcaaatatgggcagcacccaccagacgcggtggatgagccacagatgctgacaaatgagaagctgtccatctttgatgccaacgagtctggctttgagagttatgaggcgcttccccagcacaaactgacctgcttcagtgtgtactgtaagcacggtcacctgtgtcccatcgacaccggcctcatcgagaagaatatcgaactcttcttttctggttcagcaaaaccaatctatgatgatgacccgtctcttgaaggtggtgttaatggcaaaaatcttggccccataaatgaatggtggatcactggctttgatggaggtgaaaaggccctcatcggcttcagcacctcatttgccgaatacattctgatggatcccagtcccgagtatgcgcccatatttgggctgatgcaggagaagatctacatcagcaagattgtggtggagttcctgcagagcaattccgactcgacctatgaggacctgatcaacaagatcgagaccacggttcctccttctggcctcaacttgaaccgcttcacagaggactccctcctgcgacacgcgcagtttgtggtggagcaggtggagagttatgacgaggccggggacagtgatgagcagcccatcttcctgacgccctgcatgcgggacctgatcaagctggctggggtcacgctgggacagaggcgagcccaggcgaggcggcagaccatcaggcattctaccagggagaaggacaggggacccacgaaagccaccaccaccaagctggtctaccagatcttcgatactttcttcgcagagcaaattgaaaaggatgacagagaagacaaggagaacgcctttaagcgccggcgatgtggcgtctgtgaggtgtgtcagcagcctgagtgtgggaaatgtaaagcctgcaaggacatggttaaatttggtggcagtggacggagcaagcaggcttgccaagagcggaggtgtcccaatatggccatgaaggaggcagatgacgatgaggaagtcgatgataacatcccagagatgccgtcacccaaaaaaatgcaccaggggaagaagaagaaacagaacaagaatcgcatctcttgggtcggagaagccgtcaagactgatgggaagaagagttactataagaaggtgtgcattgatgcggaaaccctggaagtgggggactgtgtctctgttattccagatgattcctcaaaaccgctgtatctagcaagggtcacggcgctgtgggaggacagcagcaacgggcagatgtttcacgcccactggttctgcgctgggacagacacagtcctcggggccacgtcggaccctctggagctgttcttggtggatgaatgtgaggacatgcagctttcatatatccacagcaaagtgaaagtcatctacaaagccccctccgaaaactgggccatggagggaggcatggatcccgagtccctgctggagggggacgacgggaagacctacttctaccagctgtggtatgatcaagactacgcgagattcgagtcccctccaaaaacccagccaacagaggacaacaagttcaaattctgtgtgagctgtgcccgtctggctgagatgaggcaaaaagaaatccccagggtcctgggagcagctcgaggaccctgaatagccgggtcctcttactacttcagcaccaaggacggccacctgtaccgaggtggtgatggtgtgtacctgccccctgaggccttcacgttcaacatcaagctgtccagtcccgtgaaacgcccacggaaggagcccgtgggatgaggacctgttacccagagcattaccggaattattccgattacatcaaagggcagcaacctggatgcccctgagccctaccgaattgttcggatcaaagagatcttctgtcccaagaagagcgacggcaggcccaatgagactgacatcaaaatccgggtcaacaagttctacaggcctgagaacacccacaagtccactccagcgagctaccacgcagacatcaacctgctctactggagcgacgaggaggccgtggtggacttcaaggctgtgcagggccgctgcaccgtggagtatggggaggacctgcccgagtgcgtccaggtgtactccatgggcggccccaaccgcttctacttcctcgaggcctataatgcaaagagcaaaagctttgaagatcctcccaaccatgcccgtagccctggaaacaaagggaagggcaagggaaaagggaagggcaagcccaatgtcccaagcctgtgagccgagcgagccagagatagagatcaagctgcccaagctgcggaccctgggatgtgttttctggctgcggggggttgtcggagggattccaccaagcaggcatctctgacacgctgtgggccatcgagatgtgggaccctgcggcccaggcgttccggctgaacaaccccggctccacagtgttcacagaggacttgcaacatcctgctgaagctggtcatggctggggagaccaccaacttcccgcggccagcggctgccccaaaagggaaaccgggaagatgctgtgcggcgggccgccctgccagggcttcagcggcatgaaccgcttcaattcgcgcacctactccaagttcaaaaactctctggtggtttccttcctcagctactgcgactactaccggccccggttcttcctcctggagaatgtcaggaactttgtctccttcaagcgctccatggtcctgaagctcaccctccgctgcctggtccgcatgggctatcagtgcaccttcggcgtgctgcaggccggtcagtatcggcgtggcccagactaggaggcgggccatcatcctgggccgcggcccctgggatagaagctccctctgttcccggagccactgcacgtgtttgctccccggggcctgccagctgagcgtggtggtggatgacaagaagtttgtgagcaacataaccaggttgagctcgggtcctttccggaccatcacggtgcgagacacgatgtccgaccctgccggagggtgcgggaatggagcctcggcactggagatctcctacagnacggggagcctcagtcctggttccagaggcagctccggggcgcacagtaccagcccatcctcagggaccacatctgtaaggacatgagtgcattggtggctgcccgcatgcggcacattccccttggcccccagggtcaagactgggcgcgatctgcccaacatcgaggtgcggctctcaaacgggcaccaatgggcaaggaagcttgcggtatacccaccatgacaggaagaacggccgcagcagctctgggggccctccgtggggtcttgcttcctgcgtgggaagccggcaaagcttggcgaccccgcagccaggcagtttcaacaccctcatcccctggtgcctgccccacaccgggaaccggcacaaccactgggctggcctctatggaaggctcgagtgggacggcttcttcagcacaaccgtcaccaaactccgagncccatggtcaagaagggccngcgtgctccacccagagcaagcaccgtgtggtgagcgtgcgggagtgtgcccgctcccagggcttcccctgaacaccaaccggctctctggcaaacaccctggacaagccaccggcaggtggggcaatgccgtgcccacccgcccctggcacaaagccattggcttggagcatcaagctttgtatgttgggcccaaagccccgagagagtgccctcagcctaaaataaaggaggaggaagcctgcctaagggacctagtcctgccccctccccgtcacccccctgtttcctggcacccccagaatccccccaacatgcacctgatgttgtgtttttaaccatgtcaatcctgtcccgttccacatgtgtggtacatggtgtttgtggccttggctgacatgaagtctgttgtgtgaggttcgcttatcaactaattgatttagtgatcaaatttgtgcagtactttgtgcattctggattttaaaagttttttattatgcattatatcaaatctaccactgtatgagtggaaattaagactttatgtagtttttatatgttgtaatatttcttcaaataaatctctcctataaaccaccctgggtgggtattcgtgatttgcacgggacttctggctgaggtcagacaggaacaagctcttccatgctgaaggcgacccacgtggagtttgaagctagcacgtttgaagctagacactccgtgtgtctgtctgtgtttgttcagaactgagtcacgtgagttgatccccatgacatgcaaatggaacttgctagtgtagcttccaggaaagccttttaaaggaagtcttggctggccttccccgtggctggtaggctttctttggtctgaagtgggttgtgatgcctggcagtggagcagc

SEQ ID NO: 14388 - DNA, 781 bp, Homo sapiens
  SIMILAR (637)..(777): 781254mologous to Homo sapiens putative p150,accession number U93564,Smith-Waterman Score=199.
atgagagcagcggatctcccagcacagcgcttgagctctgctaagggacagactgcctcctcaattgggtccctgaccactttgcctcctgactgggagatacctcccagcaaggggcgacagacaccttatgcaacaggagagctccggctggcatctgatgggtgcccgtctgggacgaagcttccagaggaaggtacagacagcaatctttgctgtttggcagcctccgctggtgatacccaggcaaacagggtctggagaggacctccagcagacctgcaccggaggggcctgactgttagaaggaaaactaacaaacagaaaggaatggcatcaacatcaacaaaaaaggacatccatgcaaaaaccccatctgaagagcactggcgtcaaagaccaaaggcctgccttacaagagcttctgaaggaagcactaaatatggaaaggaacaaccggtagcagccactgcaaaaacataccagattgtaaagaccatcgaccctatgaagaaactgcatcgactaacgggcaaaataaccagctagcatcataatgacaggatcaatttcacacataacaatattaaccttaagggtaaacagactaaatgcctccattaaaagacacagactcacagactggcaaattcgttaaagagtcaagacctatcagtgtgctatattcaggagacccatttcacgtgcaaagacccccataagctcaaaataaaggggtggaggaagatttaccaagtaaattgaaagcaaaaaaaaaaaa

SEQ ID NO: 14389 - DNA, 1548 bp, Homo sapiens
  SIMILAR (1023)..(1250): 651254mologous to Homo sapiens dJ756G23.3 (novel protein similar to drosophila transcriptional repressor),accession number AL035681,Smith-Waterman Score=271.
tttcgtccgggggctgctgcacccgccaccggtctgttctccagccgggggccccctgtagtcgccgcagtcccggtgagcacggacaacccctacccatgaggccctgatggaaaacacaaaggatctgagtcggaagagacattagaggtcatccaaagcagccgtcccctctgcagcctctctgacaagtgactgaacattcttcacgatctgaaaggaaaagaagagattctttcgggatgtttgacggttatgatagctgcagtgaggacacaagcagcagctccagctccgaagagagtgaggaagaagtcgctcctttaccttctaatctcccgattatcaaaaacaatgggcaagtctacacatacccagatggtaaatctggcatggctacctgtgagatgtgtgggatggttggcgtccgagatgctttttactctaaaacaaagcgtttctgtagcgtttcatgttcaagaagttactcgtcaaactccaagaaggcaagcattttggccagacttcagggtaagcctccaacaaagaaagcaaaagttcttcagaaacaacctttagttgctaagctagccgcatatgctcagtatcaagctaccttgcaaaatcaagcaaagacaaaagcagtcatgtggaggttgtcatacatttgtgttggggacccctcagcatttggatttggccatgtcctgcaggacctgatgacagcttaccttgcagggaaggagagtcgctcccagatagccctcacgagtggccctggagcaggaagtggttacaatgcccttttaagatatgaaggatttgaaaatgactctggtctggacttctggtgcaatatatgtggttctgatatccatccagttggttggtgtgcagccagcggaaaacctcttgttcctcctagaactattcagcataaatatacaaactggaaagcttttctagtgaaacgacttactggtgccaaaacactgcctcctgatttctcccaaaaggtttcagagagtatgcagtatcctttcaaaccttgcatgagagtagaagtggttgacaagaggcatttgtgtcgaacacgagtagcagtggtggaaagtgtaattggaggaagattaagactagtgtatgaagaaagcgaagatagaacagatgacttctggtgccatatgcacagcccattaatacatcatattggttggtctcgaagcataggtcatcgattcaaaagatctgatattacaaagaaacaggatggacattttgatacaccaccacatttatttgctaaggtaagaagtttttataagaaccctcatttgtaaattaggtttgaaagagggttgtgggttttttcctaaaattacggaaatcacaattacatatgttcacttaaaagaattaagaccttgtaaattcataggtgtcacaactctttattataattattcttaaattctatttgtctgaattttctctaaaccttaatggaagtttgagttataatattaggtaggtaggagaaggcacctg

SEQ ID NO: 14390 - DNA, 2226 bp, Homo sapiens
  SIMILAR (1414)..(2241): 311254mologous to Homo sapiens glioma tumor suppressor candidate region protein 1,accession number AF182077,Smith-Waterman Score=191.
ctattccatctccttctccaccttctcccccagtcccaagtcatcctcagagatggagttcagggctacctcctccttcaagaagccttccaggaaacgctccagcaagtggtcctgccctgctccctctgcttctccttcctcctcacccaaattcagcacgataatgcagatgtgcttccgcagctggcgcgtgttggagaacttccgacagcacttgctacactccaagctgcttggaggcaggctgttcccttcctccggagccagcgggctgtcctcagtcggactcacgatgttttctgccagctcctcttctgtgctggacttcttcgtggacgccttaggcctgcctctcttcctcttcatgaccaaaaactcatctccggttttgcttgagttggggggttcaggtgtactcagaggcctaaggggaataataatctcatcaacattaaccccttcttccatgtgcttctctgaaacgtgggagaggagttccgactgatttggtgagaagaggttacaacatttacacataaagatggccgtgttttctgggagaaaagcagagtgagaagtgggaagagcaggtgcaaccaagcacggagatggagtgggacacgccacgtctgcaatggagggtggagggtgaggcggcacgggaaccagaggccaggcagagcaggtgcttgtggccacctgtaggatttcagctttaactctgagtgtgaccagaagccacttctggaggtcagggacagaggagtgatctgagctatttgtcaaacagcagagagggttattctgtttcagaagcaaaagcgtctgcttaaccacagtcaccgtccctggtgccatggcaaccaccgaggcaagggcagtggcgtcatgggtctcggcgcccagctcaatgatctgctgcaggatgttcacagccgtggggtccagtcggtcgccactctcagaggtgtatctcaggtcctggagcgcggccaccgctgcctgtgtcccttgaacgtcttcttcggcctctgtgatgtggagatactgggtggagggctcctcaggagcttctgttgctgtctcccacttggggtctccatcaatttccaccaccttcaagccatgtttgttcttcaagtgcctattgaactcccatttggtgccatatacaaagctgcaaacaggacacttcaaaccaccttgctggatgagcacctccgctgccagctccccggtgcccacgttggcatactcctcattagggtgcttcctgttgtagtgccgcttcagagagccagatatgttgcaggagtaatggcaatgggcacagcggaaaggcactgcatctattaagacctcaaacactacctttactcctccactgtccaattcatcaatcttttcaccactgttgcccagaagagctaaaccagcaactgcaatgtcatctgcagtgtgaaggagtttgtgacttttcagtgtcccttttgatttgaatttcttgccacacatgtcacataggtgggttttctcagtgctgtgacgattcatatgagccttgaggttactcttgctacgagttgcatactcacacaaagaacacttgaagggcttcacaccttcatgagcccaaatatgacgctgaaggtgtgagccattcttcatgaaataaaagtcacaatatgggcatttcatggctctctttccaattagccctttcagctgaaccctcctcccgagaacctcagaaatggtgctcatggagacctcaggatggttggtcttgatatgtgactttatcaatcgatcctctgaaaaagacttttcacaaacaggacaagaataactccttttgtcgctatcaacagtcatcaccaccaccaccatcacatcaccatcatcaataccatcatcaccaccactagcactatcaacagtcatcaccaccatcactactaccaccatcatcaccatcatcatcaccaccaccagcacaccaccaccaccaacaccaccacaaccaacaccaccaccaccaacaacaacaccacgaccaccatcaccattaccaccaccaccaacaccaccaccaccagcactatcaacagtcatcaccaccaccacaaccagcactgccaccatcaccaccaccaccaccaccatcaacatcaccacgacccccctcaccatcatcaacactagcattctcatcagcaccat

SEQ ID NO: 14391 - DNA, 681 bp, Homo sapiens
  SIMILAR (394)..(612): 301254mologous to Homo sapiens Human secreted protein, SEQ ID NO: 6613,accession number G02532,Smith-Waterman Score=70.
gggggaaccggcggtcgagctacggtcgcggagcagtggaaccgagactgccccgcggagccgccggtatgagcgcccctcgccaccccgtgtcccaggcccggccttttctgacaagagctagacttcgggctccttgaggatattcagttttgtatgtttgaatatcctctcaccatgttcagcataaagtaccattcttaatgattatcctcaacaagacaggtgtgagagggttgctgttgtattgcaatcatggtgcagaaataccagtccccagtgagggtgtacaaatacccctttgaattaattatggctttgaggaaactgatacccgagatgttgtgtaacgtgctcttaaacggggggggcacagcaggttggattcagattcctggatcttcctctctctttgtgtactccctgatgtctctggagaacatcgtcaagcaacttttaaagaaaggcagccgggtgcagtggctcacgccttcaatcccaccactttggcctgataccccaacccaccgcccccaagccatggtcatcacctctgcacataaccaaaccccagacacttggccaaagagatccaggacccagaacaagaaaaaggagcaaatgaagaatgaggtgcacacacaagtgaaggatgagcacgacgaagaggagctttattga

SEQ ID NO: 14392 - DNA, 825 bp, Homo sapiens
  SIMILAR (82)..(237): 821254mologous to Homo sapiens FLJ00038 protein,accession number AK024448,Smith-Waterman Score=246.
atgcccaagaccacagcctgcaatgtgcacacagtcacctgggcatcttgtgaaaatgcggattctgattctacgggactgaggcaccatgactcctgcgaggacccagcatcccctggcagatcagacctatgccttgtcccacatcccaccagacctgcagtgagaggaggccgtccggcaggtggcagatgcccggcagtgcctgcagaaggtccctggagacatcttcagcaggcgcaggaagggctcaagaggctggcgggcggcttggagagacttctggagaatccggtgcgccgggctctacctcaaggagctcagggccatcgtgctgaaccaacagaggctcgtccgcacccagcgccagagcatcgacgagctggagcggcggctgaacgagctgagcgcctagaatcgcagcctgtgggagcatccgcagctgccgcaagcgcagcctccgcccggattccttacctcgtagccgtccccgctgccggccctcctaggcaccgctgccgccgccaccgccggggcccaggaacatcttcaggaccacggacagcgctcatccgcccggccactgcccgcgcccgagctggcatcgtttcagaaccacgaacagctcctggcgcaacccgagccagaccctggaggcagggctcacacaacccagtcgccccatcagcacccgggaacacttggggtcaaggccaacaaggagaagaaaggtcccccgggttgctgcgctgcccccggaaccccccttcagcaagaatctcccgcgccctcggcaagggagtcctgagcaggagacctgagtga

SEQ ID NO: 14393 - DNA, 834 bp, Homo sapiens
  SIMILAR (286)..(567): 841254mologous to Mus musculus Pro-Pol-dUTPase polyprotein,accession number Y12713,Smith-Waterman Score=433.
atgatcagatattttggagactactggacacaggctctgctgacattgattccaggggatccaaaacatcctcgtggtcctccagttaaagtaggggtttatggaggtcaggggtatattaactctctggctttgtgtcacaattttatttggagagaacttaatcgcttttcacttctgcaagatgtcccactggtccgttacattgacaacattatgctgattggatccataaaatttctaggggtccagtggtgtggggcctgtcgagatattccttctaaggacccagcagatccaatggtgctcgaggtgtcagtggcagatagggatgctgtttggagcatttggcaggctcttatagatgaatcacagcagaggcctctaggattttggagcaagtctctaccatcttctgcagataactactctccttttgagagacagctcttggcctattactgggctttggtggaaactgaacgttcaactatgggtcatcaagtcaccatgctacctgaactgcctgtcatgaactgggtgctttctgacccatctagccataaaccaatggtttggctggatggtcagggactgggaagaagcatgattggaaaattggtgacaaagaaatttggagaagaggtatgtggatggacctctctgagtggtcaaaaactgaagatatttgtgtcccatgtgagtgctcaccaacgagtgacctcagcagaggaggagtttaataatcaagtggataggatgacccgttctatggacaccactcagcctctttacccaaccacccctgtcatcgcccaatgggctcatgaataa

SEQ ID NO: 14394 - DNA, 3632 bp, Homo sapiens; identical to SEQ ID NO: 7705
  SIMILAR (3303)..(3157): 341254mologous to Mus sp. alpha 2(XI) collagen,accession number S54563,Smith-Waterman Score=74.
  misc_feature (1)...(3632): n = a,t,c or g

SEQ ID NO: 14395 - DNA, 594 bp, Homo sapiens; identical to SEQ ID NO: 5069
  SIMILAR (52)..(591): 751254mologous to Mus musculus Pro-Pol-dUTPase polyprotein,accession number Y12713,Smith-Waterman Score=742.

SEQ ID NO: 14396 - DNA, 1275 bp, Homo sapiens; identical to SEQ ID NO: 7708
  SIMILAR (523)..(786): 711254mologous to Mus musculus Pro-Pol-dUTPase polyprotein,accession number Y12713,Smith-Waterman Score=318.

SEQ ID NO: 14397 - DNA, 2031 bp, Homo sapiens; identical to SEQ ID NO: 7709
  SIMILAR (1650)..(1147): 1001254mologous to Homo sapiens Human signal peptide- contianing protein (SIGP) (clone ID 1273453),accession number Y21842,Smith-Waterman Score=900.

SEQ ID NO: 14398 - DNA, 3384 bp, Homo sapiens
  SIMILAR (876)..(538): 991254mologous to Homo sapiens Human signal peptide- contianing protein (SIGP) (clone ID 1273453),accession number Y21842,Smith-Waterman Score=604.
ttatgtctgatggcttttagcacattttgttttccctgtgacatcctcattcaggatattttctacaagcacattctgatatataactccactagattccactcctgaatgttttgcaaaaagagctctttcaaagtcaccttgccttgtgaattttgacaacctatacacggcccagttgttaagctgtttagaggtcattcctcttccattatctatcactgcaacagcaggttttccttgtgtttcatcaaaaagcatgatttcagccgaaccattcacgaaggggaattcaagtgttctaactttcccaataaaaagtggggtatcagtatcttcctcattagaacctttaatggtggctattatagtgccaaccaaatcaattccagtatggttgtcgtagtcatccgtgatactaagatgtagatctctgaccaaggtcctactggcaactgagcgaacatttgaaacagctggtgtaggtggtttaattttaggtactaacttcacaggttgattaggcaggacttcaactataacctcttttctataatgattggccgcatccagattatccaaaataatggtgtctcctaacagcataccaaatactgtttcacaatgttctacattatctggaaatgttaacaagtctcgagcaaagactggatctccaatgggtttaaaatacaattttccatttcggaaatgaggtagagatcttttccaatctggaagagtcttcttgtaaatagaatcaaggggcaacacctgctgacgaccttgggtttcatcatagatacgacgtgcagcgtcagtggttagggtgactacacagtccatgtcacttgccagatgccaagaaataaccatcgcagctctatcatcttcaatttgtgctagatgtgcaatctttcccaaaacatctccactgcctttagtatagtttggaagagtacacgatcttctaggttttttcttcagttcttcttgttctgatagctttcttttcagaagtgcttcaatgtgtggcacctgttgtgttgtaggaatgtcaatattatgtatttttagttcatttcgcaattgggcctcttttaatcttgcttcttcaacttgacatttcatttcattaagaagctgttggctggcttcaaataaacttttatacataacaatagactgagataattggtccttttcttttgtaagtgctgccatttgttgctgcttcttaacatctgcagtgtgcagtctagggacttggtgccctgttcccagccactccagccatggctgaaaggggccaacgtacagcttgggctgtggcttcagagggtggaagtcccacaccttggcagcttctgcgtggtgttgagccttgagacctctgacttgggagaaagatatcatttgttctgaagcaggagactccacccaccagaaacttgcaggtttaagaaacaaatggggatggcccctgagttgtttgcctattaaggggaggtgacagctcctttgtggaggaggggagggtaatgggtagccctccatcgacagctctttccactcctgtccatttaaaatccttgtaaaaagggtgttcttatctttcaattttagctcaagatccataaacgtcaatttatttgtgctgacctggaatttgtcattagtgaataatgcaccagatatcctattgtagcattcaattggtgcaagccctctcttcttaggaggagtacaccagtcaaagtcttcaactgatgtatatggtattaatcgtccattccaaaaacattcaaaaataggccttttccctctagctgctttctcaagtatgaaacaatcatcttcatcatcttcatcttttaattttgatggaaagcatggatcatcagggtaagtttctctatcatataagaatggatgataacggataatcccttccactacaccatctccttcaacatgagctttgaattcaaaactatcagctgctgtgtttacatacaacgtctgcatgtcgtcttgtatttcccttaggttgacaatcttaggtaccttccctttttcaaacatagaaatttcaatatcaatattgttgaaaggttcaacttcttttgatgttcgtatttcatttccttttgggccatgaatatagtagtgataaatatgcgctaactgtcgtgtccaaaggtggaaataatttttcaagtactgtatgtgttctggttgtacccctgtgataaccacagcagtaaagctatctttttccttctcctctatgataagatgatgtagaaatctttcatcatcatttgtaatgtgaacagaatcagagggctttctgtttctaatatatccactatatattgcctctttatttttctccttcttctcaaaatcttctttagaaagcacaagctcgtgaacatcttgggaatctgcaggtttgcttatcattctggctgattgtccaacaaagaagacagcttgcttgcccccaacaccaaaataggaaatatcactatttaaactgcgtggcactggtactggacgaacatatcgcaaaggattttgtccttcactggcataatattcatacatgccacttttaaccagtgtgtcatagtgaggtaagaagtcaattcgttctttcgtagctgtcagtagtaactgattgaccgactgtagcaggtataaggtgactccatctttaacagtttcatacgcgcgaaatcccgcgtagtccgagcgctccccgacctgcagaggccggtccccgagctcggactccttttcgcgccgatcaaacaagtacaccgtcctgtggccgacgcctccgccatcctcctcagtccccacagaggccccaccaggcccgccgccgtccgccgtgagccctctctggctgggtcgcgtggacgcggcggcgggaagcttcaggccggcggtactcgccgggcgcagagtccaccaaagcgagcacgtgggtccctctgccgagaaaataggcgctacgagagccggcgcccctttttcctcctcatttcttagtagtactgggtgggctccagcgtgggcccccgaggcaaagcgggtccgtgagaacgtcagaagggcgctctgtgacgtcacagcgtccccgccccccgcaccctctgggggccctggagcgccgacggcattcggggtacgggggtgactccagcgccctagttttaacgctgcctgcgcttcgcggtctcccacgtgcgtgtaaattattgtttggctggaagtgaggagaactgagcggtagatggtggaagataaaattggaaagacataaactgtggccaaatgccgttcatgttcatttctttttatgttcttcat

SEQ ID NO: 14399 - DNA, 227 bp, Homo sapiens; identical to SEQ ID NO: 4494
  SIMILAR (3)..(137): 911254mologous to Mus musculus Pro-Pol-dUTPase polyprotein,accession number Y12713,Smith-Waterman Score=212.

SEQ ID NO: 14400 - DNA, 266 bp, Homo sapiens; identical to SEQ ID NO: 3627
  SIMILAR (3)..(137): 861254mologous to Mus musculus Pro-Pol-dUTPase polyprotein,accession number Y12713,Smith-Waterman Score=211.

SEQ ID NO: 14401 - DNA, 564 bp, Homo sapiens
  SIMILAR (2)..(316): 771254mologous to Mus musculus Pro-Pol-dUTPase polyprotein,accession number Y12713,Smith-Waterman Score=422.
agacctctggccttttaccagggtaactcttcacaggggaaagagaaatgatcagacatttcagggactactggacactggctctgagctgatgttgattccagaggacacaaaacatcactgtggtcctccagttaaagtagaggcttatggaggtcaggtaattaatggagttttagctcagatccaacttacagtgggtccagtgggttcagggactcatcctgtggtcatttacccagtgccagaatgcataattggcataggcatacttagcagctggcagaatccccacattggctccctgactagtaggaagacagatggttcttggagaatgacagtgcattatcataagcttaaccaaatggtgactccaattgcagctgctataccagatgtggtttcattgcttgagcaagttaacacatctcctggtagctggtatgcagccattgacttggcaaatgcctttttcttcattcctgtccataaggcccaccagaagcaattcgccttcagctggcaaggccagcaatatacctttactgtcctacctcaggg

SEQ ID NO: 14402 - DNA, 503 bp, Homo sapiens
  SIMILAR (249)..(503): 781254mologous to Mus musculus Pro-Pol-dUTPase polyprotein,accession number Y12713,Smith-Waterman Score=351.
tttttttttttttttgcctattggattttggaggcaacacattcctcgtttgagtgtgttactccagcacatttattgagtgacctgaaacgctgccagttttgagtggggtccagaacaggagaaagctctatgacaggtccaggctgttgtgcaagttgctctgccacttgggccatatgacccagcagatccaatgttgcttgaggtgtcagtggcagataaggatgctggctgcacgcgtttgcgaggcccccataggtgaatcacagtggcggtctctaggctttcggagcaaggccctgcgatcttctgcagaaaactactcttcttttgagagacagctcttggcctgttactgggctttggtggaaactgaatgtttgactctgggtcatcaagtcaccatatgacctgaactgcctatcatgaactgggtgctttctgacccatctagccataaagttggtcatgaacagcagcattccatcatcaaatggaag

SEQ ID NO: 14403 - DNA, 469 bp, Homo sapiens; identical to SEQ ID NO: 7717
  SIMILAR (206)..(415): 261254mologous to bacteriophage bIL170 e34,accession number AF009630,Smith-Waterman Score=65.

SEQ ID NO: 14404 - DNA, 636 bp, Homo sapiens; identical to SEQ ID NO: 6687
  SIMILAR (1)..(360): 461254mologous to Mus musculus Pro-Pol-dUTPase polyprotein,accession number Y12713,Smith-Waterman Score=240.

SEQ ID NO: 14405 - DNA, 942 bp, Homo sapiens; identical to SEQ ID NO: 7567
  SIMILAR (1)..(342): 861254mologous to Mus musculus Pro-Pol-dUTPase polyprotein,accession number Y12713,Smith-Waterman Score=514.
  misc_feature (1)...(942): n = a,t,c or g

SEQ ID NO: 14406 - DNA, 932 bp, Homo sapiens
  SIMILAR (294)..(932): 721254mologous to Mus musculus Pro-Pol-dUTPase polyprotein,accession number Y12713,Smith-Waterman Score=776.
aggaagggatccaaaggcttaaaaagattgggatggtggagtggattagtcactttagacctactcctctcagcatggaaggtccagaacatatactcttgaccaacaccttgttaaatagatatgtgaaggcagcacctgcatctttgaagagccctttaactgctcttctctttatgtcagatctaactgtgggaaccacattctctcaactacaaaatttaaatacaatgggaatatttgggtcctcatgtgacaggagccaagtggcagcactcaaccatcaaaggcaagtgccagaatgcaaaattgtcatagatatacttaacatctggcggattccccacattggctcactgactggtagggtgagggaaattatggtgggaaaggccaaatggaagccattagagcagcctccacctagaaaaatagtaattcaaaaacaatatcacatccctggagctattacagagattagtgccaccattgaggacttgaaagatgcaggggaggtgattccgattcccaccacattcccattaaactctcccatttggcctgtgcggaagacagatggatgttggagaatgacagtggattattgtgagcttaaccaagtggtgactccaactgcagctacagtaccagatgtggtttcattgcttgagcaaattaacacatctcctggtacctggtatgcagacattgacttggcaaatgccgttttctccattcctgtccataaggcccaccagaagcaatttgccttcagctggcaaggccagcaatatacctttactgtcctacctcagggagagaccttggttaatttttcccttcctcaagatatcacactgttccattacattgatgacattatgcagattggatccagtgaccaagaagtagcaaacacactggacttattg

SEQ ID NO: 14407 - DNA, 6914 bp, Homo sapiens; identical to SEQ ID NO: 7722
  SIMILAR (3260)..(2460): 1001254mologous to Homo sapiens Human signal peptide- contianing protein (SIGP) (clone ID 1273453),accession number Y21842,Smith-Waterman Score=1416.

SEQ ID NO: 14408 - DNA, 2158 bp, Homo sapiens
  SIMILAR (937)..(2034): 751254mologous to Mus musculus Pro-Pol-dUTPase polyprotein,accession number Y12713,Smith-Waterman Score=1496.
atgaaactcatggaaacacttaaccagtgcataaacgctggtcatgaaatgacgaaggctatcgccattgcacagtttaatgatgacagcccggaagcgaggaaaataacccggcgctggagaataggtgaagcagcggatttagttggggtttcttctcaggctatcagagatgccgagaaagcagggcgactaccgcacccggatatggaaattcgaggacggcgacgtgctgaagacgtatttccaccggtgatcggggttgctgcccataaaggtggcgtttacaaaacctcagtttctgttcatcttgctcaggatctggctctgaaggggctacgtgttttgctcgtggaagaagacagatggatcttgagaatgacagtggactattgtaagcttaaccaagtggtgattccaattgcagctgctgtatcagatgtggtttcattgcttgagcaaattaacacatctcctggtacctggtatgcagccattgacttggcaaatgcctttttctccattcctgtccataaggcccagcagaagcaatttgccttcagctggcaaggccagcaatatacctttactgtcctacctcagtggtatatcaactctccagctttgtgtcataatcttattcggagagaccttgattgcttttcgcttccactagatatcacactggtccattacattgatgacattatgctgattggatccaagacagctcttggcctgttactggctttggtggaaactgaacatttgactataagtcatcaagtcaccatgcgacctgaactgcctatcatgaactgggtgctttttgacccatctagccataaagtgggttgtgcacagcagcattccatcatcaaatggaagtggtatgtacatgattgggctcgagcaggtcctgaaggcacaaccacccctgtcatttcccaatggccccatgaacaatgtggccatggtggcagggatggaggttatgcatgggctcagcaatgtagacttccactcactaaggctgacctgaatacagccaccgctaagcgcccaatttgccaacagcagagaccaacactgagccctcaatatggcaccattcctcagggtgatcaaccagctacctggtggtgggttgattatatgggatctcttccatcatggaaagggcagaggtttgtcctcactggaatagatacttactctggatatgggtttgcctatcctgcatgcaatgcttctgccaagactgccatttgtggactcacggaatgccttatccaccatcatgatatcccacacagcattgcctctgaccaaggcactcactttatggctaaagaagtgcggcagtgggctcatgatcatggaattcactggtcttaccatgtttcccatcatcctgaagcagctggattgatagaatggtggaatggccttttgaagtcacaattacagtgtcaactaggtgacaatacttggcagggctggggcaaagttctccagaaggtcgtgtatgctctgaatcagcatccaatatatggtactgtttctcccatagccaagattcacaggtccaggaatcaagggctagaagtggcaccactcaccatcacccctagggatccactagcaaaatttttgcttccttttcctgcaacattacagtctgctggcctagaggtcttagttccagaggaaggaacgctgccaccaggagacacaatgattccattaaactggaagttaagattgccacccagacactttgggctcctcctacctttaaatcaacaggctaagaagggagttacagtgttggctggggtgactgacctggactataaagatgaaatcactctcctactccataatggaggtaaggaagagtatgcatggaatacaggagatccattagggcttctcttaatattaccatgccctatgattaaggtcaatgggaaactacaacagctcaagccagaagccttggttccaaagggggtagtgtttccaccaggagacacaacaatgctttcactgagctggaagttaagactgccatctggccacgttggactcctcatgcctctgagtcaacaggtccagaaaggagttacggtgctggctggggtgattgatccag

SEQ ID NO: 14409 - DNA, 3193 bp, Homo sapiens
  SIMILAR (2120)..(3178): 771254mologous to Mus musculus Pro-Pol-dUTPase polyprotein,accession number Y12713,Smith-Waterman Score=1488.
atggcagaaggcaaggaagagcaagtcctgtcttatacggatggcagcaggcaaagagagaatgaggaagatgcaaaagcggaaacccctgataaaaccatcagatctcatgagacttattcactaccacgagaatggtatgagggaaaccgcccccatgattcaattacctctcaatgggtccctcccacaacacgtgggaattatgggagtacaattcaagatgagatatgggtgggtgatcattcaggatatgttcgtccagtaccagtgccacgcagtttaaatagtgatatttcctattttggtgttgggggcaagcaagctgtcttctttgttggacaatcagccagaatgataagcaaacctgcagattcccaagatgttcacgagcttgtgctttctaaagaagattttgagaagaaggagaaaaataaagaggcaatatatagtggatatattagaaacagaaaggatgactacgacaaccatactggaattgatttggttggcactataatagccaccattaaaggctctaatgaggaagatactgataccccactttttattgggaaagttagaacacttgaattccccttcgtgaatggttcggctgaaatcatgctcatgccttcaaaccaacagcataaaacagatgagaaaggcagggctaatttgggagtattcagtgtttttgcccctaggggagagcatactcttcaggttaaagccatctataacaaaagtatcatagaaggacctataattaagttaatgattcttccagacccagaaaaacccgttcgtctcaatgttaaatatgacaaagatgcatccttcttagcagggggtcttttcactgctccaccactgccagcccagctcatgtcctcgctatcttgtgcctggattattgaatcagttcttaacagctggaggaagggatgcaacaaactcaggaaccagagagccctgcataagaaacaagacagagggaagcttccggaggatagagagcttcagcacactaagaaacagactaattgggcaggacttctgatccctgccatgaacaataacgtggatatgactgccagaaagctgcaaagagacctccagccttttaccagtgtgactgtgcattgcagaaagggaaatgaccagacatttgggggaccactggacgctggctctgagctgacattgattccaggggacccaaaacatcattgtggtcccccagttaaagtaggagcttatggaggccaagtaattaatggagttttagctcagccctcttatttggcttgtgcagaagacagacggatcttggagaatgtcagtggattactgtaggcttaaccaagtggtgactccaattgtagctgctgtaccagatgtggtttcactgcttgagcaaattaacacatctcctggtacctggtatgcagccactgacttggcaaatgcctttttctccattcttgtccataaggcccaccagaagcaatttgccttcagctggcaaggccagcaatatgcctttactgtcctacctcaggggtatatcaactctccagctttgtgtcataatcttatttggagagaccctgattgctttttgcttccacaagatatcacaccagttcattagttcattacattgatgacattatgctgattggatccagtgagcaagaagtagcaaaacacactgaacttattggtgagacatttgtgtgccagaggacgggaaataaatctgattaaaattcagggaacttctacctcagtaaaatttctagggttccagtggtgtggggcctgtcaagctattccttctaagatgagggataagttgctgcatttagtccctcctacaaccaagaaagaggcacaatgtctaacagctcttggcctgttactggctttggtggaaactgaacatttgactataagtcatcaagtcaccatgcgacctgaactgcctatcatgaactgggtgctttttgacccatctagccataaagtgggttgtgcacagcagcattccatcatcaaatggaagtggtatgtacatgattgggctcgagcaggtcctgaaggcacaaccacccctgtcatttcccaatggccccatgaacaatgtggccatggtggcagggatggaggttatgcatgggctcagcaatgtagacttccactcactaaggctgacctgaatacagccaccgctaagcgcccaatttgccaacagcagagaccaacactgagccctcaatatggcaccattcctcagggtgatcaaccagctacctggtggtgggttgattatatgggatctcttccatcatggaaagggcagaggtttgtcctcactggaatagatacttactctggatatgggtttgcctatcctgcatgcaatgcttctgccaagactgccatttgtggactcacggaatgccttatccaccatcatgatatcccacacagcattgcctctgaccaaggcactcactttatggctaaagaagtgcggcagtgggctcatgatcatggaattcactggtcttaccatgtttcccatcatcctgaagcagctggattgatagaatggtggaatggccttttgaagtcacaattacagtgtcaactaggtgacaatacttggcagggctggggcaaagttctccagaaggtcgtgtatgctctgaatcagcatccaatatatggtactgtttctcccatagccaagattcacaggtccaggaatcaagggctagaagtggcaccactcaccatcacccctagggatccactagcaaaatttttgcttccttttcctgcaacattacagtctgctggcctagaggtcttagttccagaggaaggaacgctgccaccaggagacacaatgattccattaaactggaagttaagattgccacccagacactttgggctcctcctacctttaaatcaacaggctaagaagggagttacagtgttggctggggtgactgacctggactataaagatgaaatcactctcctactccataatggaggtaaggaagagtatgcatggaatacaggagatccattagggcttctcttaatattaccatgccctatgattaaggtcaatgggaaactacaacagctcaagccagatcatcctagatga

SEQ ID NO: 14410 - DNA, 467 bp, Homo sapiens
  SIMILAR (284)..(448): 581254mologous to Homo sapiens Description: KRAB zinc finger protein; this is a splicing variant that contains a stop codon and frame shift between the KRAB box and the zinc finger region; Method: concep,accession number U37251,Smith-Waterman Score=168.
  misc_feature (1)...(467): n = a,t,c or g
agaaaaaaanttttgattcgtagcatgcgcgaccgcnacngaattccaggtcccgggtcgacgatttcctgcgggcggaggcgacagcgaggacccaaggctggggtttcctacttggatcaagagtgcctggggatttgatccccatcctggtgcagctccaagacgctactgggctgcgcgcgcttttgggctgcgccaccgacagagacatctggaagccggagctagtggaagactctgcctcacctgcctccttgaatgaaacacggggaagccaggactggccgtcacgttggtgacaaatatgtcccaggactcggtgaccttctcagacgtggctgtgaacttcaccaaagaggagtggaccctgctggacccagctcagaggaatctctacagagacgtgatgcttggaaattctaagaacttggcattcatagattgggcaactccatgtaaaccan

SEQ ID NO: 14411 - DNA, 1245 bp, Homo sapiens
  SIMILAR (616)..(1242): 421254mologous to Homo sapiens Protein regulating gene expression PRGE-20,accession number Y58627,Smith-Waterman Score= 413.
tgaaggaaaccggggaagccaggactggccgtcacgttggtgacaaatatgtcccagggtcttgctctgttgcccaggctggactgcagtgggaggatcatagcttattgcaacctccacctcccagggtcaggcaatcctccctcctcagcctcccgggtagttgagactacaggcacccgcccacactcacgggactcggtgaccttcgcagacgtggctgtgaacttcaccaaagaggagtggaccctgctggacccagctcagaggaatctctacagagacgtgatgctggaaaattctaggaacttggcattcatagttgcccctgagaaagatgaatctcctgttagcatttgtgaagatcatgaaatgaggaaccactctaaacctacctgcaggcttgtgccttcacagggagattccataagacaatgtatcctaacacgtgactcaagtattttcaagtataatcctgtcttaaacgatagtcaaaaaacacatgaaaacaacgaagacgatggagtcttggggtggaacattcagtgggttccgtgtgggagaaaaacagagctgaaatcaagcacatggactggcagtcagaacactgtgcatcatatacgtgatgaaattgatacgggggccaacaggcaccagcggaatccatttggaaaagctttccgtgaagacggatcccttagggcacacaacactcatggtcgagagaaaatgtatgattttactcagtgcgagaacacctccagaaataactcaattcacgccatgcagatgcagttgtataccgcagagacaaacaagaaggattgtcaaactggggcaacctctgccaacgctccaaattccggttcacacaagagtcattgcactggagagaaaacccataaatgccccgaatgtgggagagcctttttttatcagtcattccttatgagacatatgaaaattcacactggagagaaaccgtatgaatgtgggaaatgtgggaaagcctttagatattccttacaccttaataaacatttaagaaagcatgttgtgcagaagaagccctacgaatgtgaagaatgtgggaaagtcattcgggagtcctcaaaatatacacatataaggagccacactggagagaaaccctataaatgtaagacatgtggaaaagactttgcaaagtcgtcaggacttaaaaaacatcttaagactcacaaagatgagaagccctgtgaatga

SEQ ID NO: 14412 - DNA, 1445 bp, Homo sapiens
  SIMILAR (22)..(219): 351254mologous to Macaca mulatta rhadinovirus 26-95 latency- associated nuclear antigen,accession number AF210726,Smith-Waterman Score=76.
atgctgcgtgcagcagctggcgggcagggccttgctgctgcagggatggggctctgcgctcgcccagcaggtggcagccagctccccagggagaggatgaagggcaacagagcttgcctcccactcccgccggctgtggccctcacaaagggacgagagaaacctgacgccgggcatcagggaaggagcacacagatgatgcgtgagagcgagagggggccgtgcacgcactggactgaggaaaggccaggcagacagctgaagatcctgttacagaaacagatgcggcagaacacactcatggctttccaagtctcttgggacggaaggaacaaggagattgggcgcaccttccctcatgccacagcgcctcacacacagcagctcatctttgccatgaagatcaagaggacaggagttacagtggagccctgggggctttttgaaacaggacagaggatcagacccattcaagctgccgggctataactcagctcctcctctactacctgtgtggccttggcacctctattaacgatgcatgtaaagagcttagccctgttaagcgctccaaaatgggagctttgagtaccatcacctccatcaccaccaccaggaggcagacccctgcagagagtcacttccctgcggctcgctttcaccttttggcaccccactctcccaccctccctccctgttgtcctggggaaccaagcgagtcagctgtgacagtgctttgctttgcaaaagggaagactgcacaggacgcagcagttctccactacatcgctgacagcagctgggcatttggccccacggtcttaatcctcttggagtcggatgcctgtgaaggttcgcagagccccagactcgctcccagaaacaagtgcacacgcactcccgctgacgcactgaagctggttaccgagtgccagctgggggccagcttcgcgtgctcttccgggatcagaatgggtgctaaagcctgtctggcagggatcactggccctgtttcacagatcacctcatctccaggaatccccaaaccctgggcccctgcaggcctgagggagcgctcaccctcaggcccttgggttttctgtcctgcaaatccctttgtcaaactcaccaacttcaccaatgacccctcccctgcccaggcccaagatatccaactcctcactgccaagccaactcctcaagccctcttcccaaacagatggaccaattcttccagtccagtccatgtcatcacctctgcagctcaacgcacggactcctcgagagtggccggcagtcagcttctacagaaccacggccaccacagccagtctgatccctcacttatgggctccaccccaggagaactgacagacttctccagcacaaaatggatcaacactgccctgcatgtcccaagcgactttccactttcccagccctag

SEQ ID NO: 14413 - DNA, 455 bp, Homo sapiens; identical to SEQ ID NO: 5095
  SIMILAR (111)..(299): 461254mologous to Rattus norvegicus L1 retroposon, a portion of its ORF2 sequence,accession number X61295,Smith-Waterman Score= 186.
  misc_feature (1)...(455): n = a,t,c or g

SEQ ID NO: 14414 - DNA, 478 bp, Homo sapiens; identical to SEQ ID NO: 3840
  SIMILAR (1594)..(1965): 881254mologous to Homo sapiens bG120K12.3.1 (novel protein similar to archaeal, yeast and worm N2,N2-dimethylguanosine tRNA methyltransferase (isoform 1)),accession number AL109865,Smith- Waterman Score=538.
  misc_feature (1)...(478): n = a,t,c or g

SEQ ID NO: 14415 - DNA, 2448 bp, Homo sapiens; identical to SEQ ID NO: 7826
  SIMILAR (58)..(738): 961254mologous to Homo sapiens bG120K12.3.1 (novel protein similar to archaeal, yeast and worm N2,N2-dimethylguanosine tRNA methyltransferase (isoform 1)),accession number AL109865,Smith- Waterman Score=1119.

SEQ ID NO: 14416 - DNA, 2142 bp, Homo sapiens; identical to SEQ ID NO: 4221
  SIMILAR (583)..(1626): 871254mologous to Homo sapiens putative p150,accession number U93572,Smith-Waterman Score=1625.

SEQ ID NO: 14417 - DNA, 3819 bp, Homo sapiens; identical to SEQ ID NO: 3971
  SIMILAR (1432)..(2619): 881254mologous to Homo sapiens putative p150,accession number U93563,Smith-Waterman Score=1863.

SEQ ID NO: 14418 - DNA, 2880 bp, Homo sapiens; identical to SEQ ID NO: 10215
  SIMILAR (94)..(1476): 921254mologous to Homo sapiens putative p150,accession number U93572,Smith-Waterman Score=2169.

SEQ ID NO: 14419 - DNA, 3441 bp, Homo sapiens; identical to SEQ ID NO: 3973
  SIMILAR (979)..(2166): 881254mologous to Homo sapiens putative p150,accession number U93563,Smith-Waterman Score=1863.

SEQ ID NO: 14420 - DNA, 2265 bp, Homo sapiens; identical to SEQ ID NO: 2285
  SIMILAR (1)..(2922): 961254mologous to Homo sapiens unknown,accession number AF148856,Smith-Waterman Score=4909.

SEQ ID NO: 14421 - DNA, 2835 bp, Homo sapiens; identical to SEQ ID NO: 7486
  SIMILAR (1)..(2958): 961254mologous to Homo sapiens putative p150,accession number U93563,Smith-Waterman Score=4954.

SEQ ID NO: 14422 - DNA, 2112 bp, Homo sapiens; identical to SEQ ID NO: 12686
  SIMILAR (743)..(606): 611254mologous to Homo sapiens Human secreted protein, SEQ ID NO: 7174,accession number G03093,Smith-Waterman Score=155.

SEQ ID NO: 14423 - DNA, 2760 bp, Homo sapiens; identical to SEQ ID NO: 7859
  SIMILAR (1432)..(2619): 881254mologous to Homo sapiens putative p150,accession number U93563,Smith-Waterman Score=1863.

SEQ ID NO: 14424 - DNA, 2307 bp, Homo sapiens; identical to SEQ ID NO: 10205
  SIMILAR (1087)..(2478): 961254mologous to Homo sapiens unknown,accession number AF148856,Smith-Waterman Score=2341.

SEQ ID NO: 14425 - DNA, 2685 bp, Homo sapiens; identical to SEQ ID NO: 7862
  SIMILAR (442)..(2031): 901254mologous to Homo sapiens putative p150,accession number U93564,Smith-Waterman Score=2491.

SEQ ID NO: 14426 - DNA, 2337 bp, Homo sapiens; identical to SEQ ID NO: 2287
  SIMILAR (337)..(2538): 951254mologous to Homo sapiens putative p150,accession number U93572,Smith-Waterman Score=3631.

SEQ ID NO: 14427 - DNA, 1544 bp, Homo sapiens
  SIMILAR (262)..(1542): 951254mologous to Homo sapiens unknown,accession number AF148856,Smith-Waterman Score=2162.
catataaacagagccaaagacaaaaaccacatgattatctcaatagatgcagaaaaggcctttgacaaaattcaacaacacttcatgctaaaaactctcaataaattaggtattgatgggacgtattttcgcaaatcaataaatgtaatccagcatataaacagagccaaagacaaaaaccacatgattatctcaatagatgcagaaaaggcctttgacaaaattcaacaacccttcatgctaaaaactctcaataaattagacaacatcatcgtatatctcgaaaaccccattgtctcagccccaaatctccttaagctgataagcaacttcagcaaagtctcaggatacaaaatcaatgtacaaaaatcacaagcattcttatacaccaacaacagccaaacagagagccaaatcatgagtgaactcccattcacaattgcttcaaagagaataaaatacctaggaatccaacttacaagggatgtgaaggacctcttcaaggagaactacaaaccactgctcaaggaaataaaagaggatacaaagaaatggaagaacattccatgctcatgggtaggaagaatcaatatcgtgaaaatggccatactgcgcaaggtaatttacagattcaatgccatccccatcaagctaccaatgactttcttcacagaattggaaaaaactactttaaagttcatatggaaccaaaaaagagcccccgtcgccaaggcaatcctaagccaaaagaacaaagctggaggcatcacactacctgacttcaaactatactacaaggctacagtaaccaaaacagcatggtactggtaccaaaacagagatataggtcaatggaacagaacagagccctcagaaataacaccgcatgtctacaactatctgatctttgacaaacctgagaaaaccaagcaatggggaaaggattccctatttaataaatggtgctgggaaaactggctagccatatgtagaaagctgaaactggatcccttccttacaccttatacaaaaatcaattcaagatggattaaagacttaaacgttagacctaaaaccataaaaaccctagaagaaaacctaggcattaccattcaggacataggcatgggcaaggacttcatgtctaaaacaccaaaagcaatggcaacaaaagacaaaattgacaaatgggatctaattaaactaaagagcttctgcacagcaaaagaaactaccatcagagtgaacaggcaacctacggaatgggagaaaacttttgcaacctactcatctgacaaagggctaatatccagaatctacaatgaactcaaactaatttacaagaaaaaaacaaacaaccccatcaaaaagtgggcgaaggacatgaacagacacttctcaaaagaagacatttatgcagccaaaaaacacatgaaaaaatgctcatcatcactggccatcagagaaatgcaaatcaaaaccacagtgagataccatctcacaccagttagaatggcgatcattaaaaagtcaggaaacaacag

SEQ ID NO: 14428 - DNA, 2168 bp, Homo sapiens; identical to SEQ ID NO: 10213
  SIMILAR (478)..(3024): 931254mologous to Homo sapiens putative p150,accession number U93563,Smith-Waterman Score=4104.

SEQ ID NO: 14429 - DNA, 3213 bp, Homo sapiens; identical to SEQ ID NO: 2322
  SIMILAR (1)..(1821): 851254mologous to Homo sapiens putative p150,accession number U93563,Smith-Waterman Score=2589.

SEQ ID NO: 14430 - DNA, 2823 bp, Homo sapiens; identical to SEQ ID NO: 6307
  SIMILAR (844)..(924): 621254mologous to Arabidopsis thaliana F24O1.6,accession number AC003113,Smith-Waterman Score=97.

SEQ ID NO: 14431 - DNA, 2274 bp, Homo sapiens; identical to SEQ ID NO: 10086
  SIMILAR (940)..(1020): 481254mologous to Homo sapiens ral guanine nucleotide dissociation stimulator,accession number AF295780,Smith-Waterman Score=79.

SEQ ID NO: 14432 - DNA, 3192 bp, Homo sapiens; identical to SEQ ID NO: 3969
  SIMILAR (1930)..(1886): 801254mologous to Homo sapiens CTG26 alternate open reading frame,accession number U80761,Smith-Waterman Score=95.

SEQ ID NO: 14433 - DNA, 2817 bp, Homo sapiens; identical to SEQ ID NO: 13037
  SIMILAR (1127)..(2137): 461254mologous to Homo sapiens zinc finger protein ZNF135,accession number U09413,Smith-Waterman Score=805.

SEQ ID NO: 14434 - DNA, 3147 bp, Homo sapiens; identical to SEQ ID NO: 10229
  SIMILAR (901)..(1434): 1001254mologous to Homo sapiens hexokinase IR,accession number AF016365,Smith-Waterman Score=887.

SEQ ID NO: 14435 - DNA, 2616 bp, Homo sapiens; identical to SEQ ID NO: 4623
  SIMILAR (2283)..(2744): 651254mologous to Homo sapiens dJ99E18.1 (similar to methylenetetrahydrofolate dehydrogenase (NADP+ dependent), methenyltetrahydrofolate cyclohydrolase, formyltetrahydrofolate synthetase),accession number AL049694,Smith-Waterman Score=422.

SEQ ID NO: 14436 - DNA, 3027 bp, Homo sapiens; identical to SEQ ID NO: 7082
  SIMILAR (22)..(642): 821254mologous to Mus musculus Pro-Pol-dUTPase polyprotein,accession number Y12713,Smith-Waterman Score=879.

SEQ ID NO: 14437 - DNA, 1701 bp, Homo sapiens
  SIMILAR (181)..(1557): 961254mologous to Homo sapiens putative p150,accession number U93564,Smith-Waterman Score=2349.
atggatacattcctcgacacatacactctcccaagactaaaccaggaagaagttgaatctctgaatagaccaataacaggagctgaaattgtggcaataatcaatagtttaccaaccaaaaagagtccaggaccagatggattcacagccgaattctaccagaggtacaaggaggaactgggatgccctctcttaccgctcctattcaacatagtgttggaagttctggccagggcaatcaggcaggagaaggaaataaaaggtattcaattaggaaaagaggaagtcaaattgtccctgtttgcagacgacatgattgtttatctggaaaaccccatcgtctcagcccaaaatctccttaagctgataagcaacttcagcaaagtctcaggatacaaaatcaatgtacaaaaatcacaagcattcttatacaccaacaacagacaaacagagagccaaatcatgagtgaactcccattcacaattgcttcaaagagaataaaatacctaggaatccaacttacaagggatgtgaaggacctctttgaggagaactacaaaccactgctcaatgaaataaaagaggatacaaacaaatggaagaacattccatgctcatgggtaggaagaatcaatatcgtgaaaatggccatactgcccaaggtaatttacagattcaatgccatccccatcaagctaccaatgactttcttcacagaattggaaaaaactactttaaagttcatatggaaccaaaaaagagcccgcatcaccaagtcaatcctaagccaaaagaacaaagctggaggcatcacactacctgacttcaaactatactacaaggctacagtaaccaaaacagcatggtactggtaccaaaacagagatatagatcaatggaacagaacagagccctcagaaataatgccgcatacctacaactatctgatctttgacaaacctgagaaaaacaagcaatggggaaaggattccctatttaataaatggtgctgggaaaactggctagccatatgtagaaagctgaaactggatcccttccttacaccttatagaaaaatcaattcaagatggattaaagatttaaatgttagacctaaaaccataaaaaccctagaagaaaacctaggcattaccattcaggacataggcgtgggcaaggacttcatgtccaaaacaccaaaagcaatggcaacaaaagccaaaattgacaaatgggacctaattaaactaaagagcttctgcacagcaaaagaaagtaccatcagagtgaacaggcaacctacaacatgggagaaaattttcacaacctactcatctgacaaagggctaatatccagaatctacaaagaactcaaacaaatttacaagaaaaaaacaaacaaccccatcaaaaagtgggtgaaggacatgaacagacacttctcaaaagaagacatttatgcagccaaaaaacacatgaaaaaatgctcatcatcactggccatcagagaaatgcaaatcaaaaccactatgagatatcatctcacaccaacccagaaagaagagggcagcacacctcagggccagcaggaggaaggggagtcatccaggacatgtactctcaactggcggttgggaagaagacagaaagagatagacatgtgggtcgaagtctttactggggtccgtcgtgttacccaa

SEQ ID NO: 14438 - DNA, 4437 bp, Homo sapiens
  SIMILAR (1567)..(1899): 811254mologous to Homo sapiens p40,accession number U93574,Smith-Waterman Score=433.
atggataccctaacatcacaattaaaagaactagagaagcaagagcaaacacattcaaaagctagcagaaggcaagaaataactaagatcacagcagaactgaaggagatagagacacaaaaaacccttcaaaaaagcaatgaatccaggagctggttttttgaaaagatcaacaaaattgatagaccagtagcaagactaataaagaagaaaagagagaagaatcaaaaagatgtaataaaaaatgataaaggggatatcaccactgatcccacagaaatacaaactacaatcagagaatactataaacaactctacacaaataaactagaaaatctggaagaaatggataaattcctggacacatacaccctcccaagactgaaccaggaagaagttgaatctctgaatagaccaataacaggctctgaaattgaggcaataattaatagcttaccaaccaaaaaaagtccaggaccagatggattcacagccgaattctaccagaggtacaaggaggaactggtaccattccttctgaaactattccaatcaatagaaaaagagggaatcctccctaactcattttatgaggccagcatcattctgataccaaagcctggcagagacacaacaaaaaaagagaattttagaccaatatccctgatgaacattgatgcaaaaatcctcaataaaatactggcaaaccgaatccagcagcacatcaaaaagctcatccaccatgatcaagtgggcttcatccctgggatgcaaggctggttcaacatattgttggaagttctggccagggcaatcaggcaggagaaggaaataaagggtattcaattaggaaaagagaaagtcaaattgtccctgtttgcagatgacatgattgtgtatctagaaaaccccatcgtctcagccccaaatctcctcaagctgataagcaagttcagcaaagtctcaggatacaaaatcaatgtacaaaaatcacaagcattcttatacaccaataacagacaaacagagagccaaatcatgagtgaactcccattcacaactgcttcaaagagaataaaatacctaggaatccaacttacaagggatgtgaaggacctcttcaaggagaactacaaaccactgctcaatgaaattaaagaggatacaaagaaatggaagaacattccatgctcatgggtaggaagaatcaatatcgtgaaaatggccatactgcccaaggtaatttatagattcaatgccatccccatcaagctaccaatgactttcttcacagaattggaaaaaactactttaaagttcatatggaaccaaaaaagagcccgccttgccaagtcaatcctaagccaaaagaacaaagctggaggcatcacgctacctgacttcaaactatactacaaggctacagtaaccaaaacagcatggtaccggtaccaaaacagagatatagaccaatggaacagaacagagccctcagaattaatgccacatatctacaactatctgatctttgacaaacctgagaaaaacaagcaatggggaaaggattccctatttaagaactggtgctgggaaaactggctagccatatgtagaaagctgaaactggatcccttccttacaccttatacaaaaattaattcaagatggattaaagacttaaatgtgagacctaaaaccataaaaaccctagaagaaaacctaggcattaccattcaggacataggcatcggcaaggacttcatgtctaaaacaccaaaagcaatggcagcaaaagccaaaattgacaaatgggatctaattaaactaaagagcttctgcacagcaaaagaaactaccatcagagtgaacaggcaacctacaaaatgggagaaaagttttgcaatctactcatctgacaaagggctaatatccagaatctacaatgaacacaaacaaatttacaagaaaaaaacaaacaaccccatcaaaaagtgggcgaaggttatgaacagacacttctcaaaagaagacatttatgcagccaaaaaacacatgaaaaaatgctcatcatcactggccatcagagaaatgcaaatcaaaaccactatgagataccatctcacagcagttagaatggcaatcattaaaacatcaggaaacaacagagcacctgggggaaggggtggctgtgggtgcagctttggcagacttaaacgttcctgcgtgccagctctgaaaagagtagcagatctcccagcacaacgctcgagctctgctaagggagagactgcctcctcaagtgggtccctgaaccccgtgccccctgactgggagaaacctcccagcaggggtcgacagacacctcatactggagaactccggctagcatctgacgggtgcctctctgggatgaagcttccagaggaaggaataggcagcagtctttgctgttctgcagcctctgctggtgatacccaggcaaatggggtccggagtggactgccagcaaactccagcagacctgcagctgaggtcctgactgttagaaggaaaactaataaacagaaaggacatccacatcaaaaccccatctgtatgtcaccatcatcaaagaccaaagaaatacaaactaccatcagagaatactataaacacctctatgaaaataaactacaaaatctagaagaaatggataaattactggacacatacaccctcccaagactaaaccaggaagaagttgaatccctgaatagaccaataacaggctctgaaattgaggcaataatgaatagcctaccaaacaaaaaaagtccaggaccagatggattcacagccgaattctaccagaggtacaaagaggagctggtaccattccttctgaaactattccaatcgatagaaaaagagggaatcctccctaactcattttatgaggccagcatcattctgataccaaagcctggcataaaaacaacaaaaaaagagagttttagaccaatatccctgatgaacatcgatgcaaaaatcctcaataaaatactggcaaaccgaatccagcagcccatcaaaaagcttatccaccacgatcaagttggcctcatccctgggttgcaaggctggttcaacatacacatatcaatagacataatccatcatataaacagaaccaatgacaaaaaccacataattatctcaatagatgcagaaaagggctttgacaaaattcaacagcccttcatgctaaaaactctcaataaactagcccaaaatctccttaagctgataagcaacttcagcaaagtctcaggatacaaaattaatgtgcaaaaatcacaagcattcctatacactaataacagacaaacagagagccaaatcatgagtgaactcccattcacaattgcttcaaagagaataaaatacctaggaatccaacttacaagggatgtgaaggacctcttcaaggagaactacaaaccactgctcattggaataaaagaagacacaaataaatggaagaacattccatgctcatggataggaagaatcaatatcgtgaaaatggtcatactgcccaaggtaatttatagattcaatgccatccccatcaagctaccaatgactttcttcacagaattggaaaaaattactttaaagttcatatggaaccaaaaaagagcccacattgccaagacaatcctaagccaaaagaacaaagctggaggcatcacgctacctgacttcaaactatactacaaggctacagtaaccaaaacagcacggtactggtaccaaaacagagatatagaccaatggaacagaacagagccctcagaaataataccatacatctacaaccatctgatctttgacaaacctgacaaaaacaagaaatggggaaaggattccccatttaataaatggtgctgggaaaactggctagccttatgtagaaagctgaaactggatcccttccttataccttatacaaaaattaattcaagatggattaaagacttaaatgttagacctaaaaccataaaaaccctagaagaaaacctaggcaataccattcaggacataggcatgggcaaggacttcaggactaaaacaccaaaagcaatggcaacaaaagccaaaattgacaaatgggatctaattaaactaacgagcttctgcacagcaaaagaaactatcatcagagtgaacacgcaacctacagaatgggagaaaatttttgcaatctacgcatctgacaaagggctaatatccagaatctacaaagaacttaaacaaatttacaagaaaaaatcaaacaaccccatcaaaaagtgggcaaaggatatgaacagacacttctcaaaagaagatgtttatgcagccaaaagacacatgaaaaaatgctcatcatcactggccatcagaaaaatgtaa

SEQ ID NO: 14439 - DNA, 2913 bp, Homo sapiens
  SIMILAR (1)..(1017): 1001254mologous to Homo sapiens pepsinogen,accession number J00287,Smith-Waterman Score=1774.
atgggaggcccggcagcactgtgcattgctgtggtccctggtgacttggtggtggctctttgtttagaggagggcctgggctctgggatcgccacgtgggcttgctcgccctggcggatttcacaggggactcatttgacctttcgatccagcctggctgtggcggccattccagagggtctgcccatcgtcgtcatggtgacgctggtcctgggagtgctgcggatggccaagaagcgggtcatcgtgaagaagttacccatcgtggagactttaggttgctgcagcgttctctgttctgacaagacggggactctgactgccaatgaaatgacagtgacccagcttgtaacgtcagatgggcttcgtgccgaggtcagcggagttgggtatgacggtcaagggactgtgtgtcttctaccatccaaggaagtcattaaggaattttccaatgtctcagtgggaaagttagtggaggcgggctgtgttgccaacaatgcggtcatcagaaagaacgccgtgatggggcagcccaccgagggtgcattgatggccctggcgttgaaggatcaggaagacatttacttcatgaaaggggccttggaagaggtgatccgctactgcaccatgtacaacaacgggggcatccccctgccgctgacgccccagcagagaggagccggcccaggtgacacagccctgcctagtgcagccagcgccttcgcccggatgtctgctgcggagcgtaatgacgcgttccagggacttgctccaggccttgcgggagagcgtaatgagaacgggtcagtggcggaggagcagctagggacttgttgcctgagccctctgcagaccgaggaggatctgggccatgtgctggccctggcttctgggcccgagctggggcggctgacgtttctaggtcttgtgggcatcattgaccccccgagagttggcgtgaaggaagcagtccaggttctctccgagtctggtgtgtctgtgaagatgataacgggggatgccctggagacggccttggccataggaagaaacatcggcctgtgcaacgggaagctgcaagccatgtccggggaggaggtggacagcgtggagaagggcgagctggccgaccgcgtggggaaggtgtccgtgttcttcaggaccagcccaaagcacaagctcaaaatcatcaaggttcgctgggcaaggcaggcacaggctctgcaggagtcaggggcgatcgtggccatgactggggatggggtgaacgacgcagtggccctgaagtctgcagacattgggatcgccatggggcagacagggacggacgtcagcaaagaggccgccaacatgatcctggtggatgatgacttctcagccatcatggcaatcaggcaggagaaggaaataaagggtattcaattaggaaaagaggaagtcaaattgtccctgtttgcagacgacatgattgtttatctagaaaaccccatggtctcagcccaaaatctccttaagctgataagcaacttcagcaaagtctcaggatacaaaatcaatgtacaaaaatcacaagcattcttatacaccaacaacagacaaacagagagccaaatcatgagtgaactcccattcacaattgcttcaaagagaataaaatacctaggaatccaacttacaagggatgtgaaggacctcttcaaggagaactacaaaccactgctcaaggaaataaaagaggacacaaacaaatggaagaacattccatgctcatgggtaggaagaatcaatatcgtgaaaatggccatactgcccaaggtaatttacagattcaatgccatccccatcaagctaccaatgactttcttcacagaattggaaaaaactactttaaagttcatatggaagcaaaaaagagcccgcatcgccaagtcaatcctaagccaaaagaacaaagccggaggcatcacactacctgacttcaaactatactacaagggctacagtaaccaaaacagcatggtactggtaccaaaacagagatatagatcaatggaacagaacagggccctcagaaataatgccacatatctacaactatctgatctttgacaaacctgagaaaaacaagcaatggggaaaagattccctatttaataaatggtgctgagaaaactggctagccatatgtacaaagctgaaacttgatcccttccttacaccttatacaaaaattaattcaagatggattaaagacttaaacgttagacctaaaaccataaaaaccctagaagaaaacctaggcattaccattcaggacataggcgtgggcaaggacttcatgtccaaaacaccaaaagcaatggcaacaaaagccaaaattgacaaatgggatctaattaaactaaagagcttctgcacagcaaaagaaactaccatcagagtgaacaggcaacctacaacatgggagaaaattttcgcaacctactcatctgacgaagggctaatatccagaatctacaatgaactcaaacaaatttacaagaaaaaaacaaacaaccccatcaaaaagtgggcgaaggacatgaacagacacttctcaaaagaagacatttatgcagccaaaaaacacatgaaaaaatgctcatcatcactggccatcagagaaatgcaaatcaaaaccactatgagatatcatctcacaccagttagaatggcaatcattaaaaagtcaggaaacaacaggtggaatatatcagaggacccaggtttggctctgtcctgtatcaaggaggcctccatcactgtgccaagcttgcgatgtgctgtgtccattatccagggcatattgagcaactgggtacaaaagatcacaggctcagggtctatgagagcctctgttttcagagaagcctg

SEQ ID NO: 14440 - DNA, 4502 bp, Homo sapiens
  SIMILAR (973)..(1335): 941254mologous to Macaca fuscata prepropepsinogen A1,accession number X59752,Smith-Waterman Score=602.
atgggagactttaacaccccactgtcaacattagacagatcaatgagacagaaagtcaaaaaggatacccaggaattgaactcagctctgcaccaagcagacctaatagacatctacagaactctccaccccaaatcaacagaatatacatttttttcagcaccacaccacacctattccaaaattgaccacatacttggaagtaaagctctcctcagcaaatgtaaaagaacagaaattataacaaactatctctcagacggcagtgcaatcaaactagaactcaggattaagaatctcactcaaaaccgctcaactacatggaaactgaacaacctgctcctgaatgactactgggtacctaacgaaatgaaggcagaaataaagatgttctttgaaaccaacgagaacaaagacacaacataccagaatctctgggacgcattcaaagcagtgtgtagagggaaatttatagcactaaatgcccacaagagaaagcaggaaagatccaaaattgacaccctaacatcacaattaaaagaactagaaaagcaagagcaaacacattcaaaagctagcagaaggcaagaaataactaaaatcagagcagaactgaaggaaatagagacacaaaaaacccttcaaaaaattaatgaatccaggagctggttttttgaaaggatcaacaaaatagatagaccgctagcaagactaataaagaaaaaaagagagaagaatcaaatagatacaataaaaaatgataaaggggatatcaccaccaatcccacagaaatacaaactaccatcagagaatactacaaacacctctacgccaataaactagaaaatctagaagaaatggataaattccttgacacatacactctcccaagactaaaccaggaagaagttgaatctctgaatagaccaataacaggatctgaaattgtggcaataatcaatagcttaccaaccaaaaagagtccaggaccagatggattcacagccaaattctaccagaggtacaaggaggaactgcatataaacagagccaaagacaaaaaccacatgattatctcaatagatgcagaaaaggcctttgacaaaattcaacaacgcttcatgctaaaaactctcaataaattagtgttggaagttctggccagggcaattaggcaggagaaggaaataaagggtattcaattaggaaaagaggaagtcaaattttccctgtttgcagacgacatgattgtatatctagaaaaccccattgtctcagcccaaaatctccttaagctgataagcaacttcagcaaagtctcaggatacaaaatcaatgtacaaaaatcacaagcattcttatacaccaacaacagacaaacagagagccaaatcatgagtgaactcccattcataattgcttcaaagagaataaaatacctaggaatccaacttacaagggatgtgaaggacctcttcaaggagaactacaaaccactgctcaaggaaataaaagaggatacaaacaaatgcaagaacattccatgctcatgggtaggaagaatcaatatcgtgaaaatggccatactgcccaaggtaatttacagattcaatgccatccccatcaagctaccaatgcctttcttcacagaattggaaaaaactactttaaagttcatatggaaccaaaaaagagcccgcatcgccaagtcaatccctaagccaaaagaacaaagctggaggcatcacactacctgacttcaaactatactacaaggctacagtaaccaaaacagcatggtactggtaccaaaacagagatatagatcaatggaacagaacagagccctcagaaataacgccgcatatctacaactatctgatctttgacaaacctgagaaaaacaagcaatggggaaaggattccctatttaataagtggtgctgggaaaactggctagccatatgtagaaagctgaaactggatcccttccttacaccttatacaaaaatcaattcaagatggattaaagacttaaacgttagacctaaaaccataaaaaccctagaagaaaacctaggcaataccattcagaacataggcatgggcaaggacttcatgtctaaaacaccaaaagcaatggcaacaaaagacaaaattgacaaatgggatctaattaaactaaagagcttctgtacagcaaaagaaactacaatcagagtgaacaggcaacctacaaaatgggagaaaatttttgcaacctactcatctgacaaagggctaatatccagaatctacaatgaactcaaacaaatttacaagaaaaaaacaaacaaccccatcaaaaagtggacaaaggacatgaacagatacttctcaaaagaagacatttatgcagccaaaaagcacatgaaaaaatgctcatcatcactagccatcagagaaatgcaaatcaaaaccacaatgagataccatctcacaccagttagaatggcaatcattaaaaagtcaggaaacaacaggtcacagcttcaaaatattgttcagagaacttgcagtgaaagcaacataaaaaggagagcagggatagaaaaaggaatccagtgggcaaaagatgccaactgttcccaagagagtccagtgcgaccatcgcaacaggtgggtgcccctctgggacgaagcttccagaggaaggatcaggcagcaatatttgctgttctgcagcctctgctggtgatacccaggcaaacaaggtctggagtggacctccagcacattccagcaggcctgcagcagaggggcctgactgttagaagaaaaactaacaaacagaaaggaatagcatcaacatcaacaaaagccacatccacacagaaaccccatccaaaagtcaccaacatcaaagaccaaagtattggaagttctggccagggcattcaggcaggagaaggaaataaagggtattcaagtaggaaaagaggaagtcaaattgtccctgtttgcagatgacatgattgtatatctagaaaaccccatcgtctcagcccaaaatctccttaagctgataagcaatttcagcaaagtctcaggatacaaaatcaatgtgcaaaaatcacaagcattcttatataccaataacagacaaacagagagccaaatcatgactgaactcccatttacaactgcttcaaagagaataaaatacctaggaatccaacttacaagggatgtgaaggacctcttcaaggagaactacaaaccactgctcaacgaaataaaagaggatacaaacaaatggaagaacattccatgctcatgggtaggaagaatcaatattgtgaaaatggccatactgcccaaggtaatttatagattcaatgccatccccatcaagctaccaatgactttcttcatagaattggaaaaaactactttaaagttcatatggaaccaaaaaagagcccgcatcgccaagtcaatcctaagccaaaagaacaaagctggaggcatcacgctacctgacttcaaactatactacaaggctacagtaaccaaaacagcatggtactggtaccaaaacagagatatagaccaatggaacagaacagagccctcagaaataatgctccatatctacaactatctgatctttgacaaacctgagaaaaacaagcaatggggaaaggattccctatttaatatatggtgctgggaaaactggctagccatatgtagaaagctgaaactggatcccttccttacaccttatacaaaaattaattcaagatggattaaagacttaaatgttagatctaaaaccataaaaaccctagaagaaaacctaggcaataccattcaggacataggcatgggcaaggacttcatgtctaaaacaccaaaagcaatggcaacaaaagccaaaattgacaaatgggatctaattaaactaaagagcttctgcacagcaaaagagactaccatcagcgtgaacaggcaacctacagaatgggagaaaatttttgcaatctactcatctgacaaagggctaatatccagaatctacaatgaactcaaacaaatttacaagaaaaaaacaaacaaccccatcaaaaagtgggtgaaggatacgaacagacacttctcaaaagaagacatttatgcagccaaaagacacatgacaaaatgctcatcatcactggctgttagagaaatgcaaatcaaaaccacaatgagataccatctcacaccagttgaagaggtgagggcgggtgagatggccaagacaagaagatgccaaaatgtcaaaggtgccagtgaggaaggcatcagagctcttgctttgtttctcattaacctcactgtccatatggagggcaaccacattgatggagacattgaaattcaaaccaatagaagtcccttgcaagcccctggagaaatctgtgagtcttttactgctttgatggcaatgcaactgctcagtaaattgttttggagttga

SEQ ID NO: 14441 - DNA, 4803 bp, Homo sapiens
  SIMILAR (203)..(30): 501254mologous to Rattus norvegicus developmentally regulated protein,accession number L20319,Smith-Waterman Score=158.
atgggagactttaacaccccactgtcaacattagacagatcaacgagacagaaagtcaacaaggatacccaggaactgaactcagctctgcaccaagcggacctaatagacatctacagaacactccaccccaaatcaacagaatatacatttttttcagcaccacaccacacctattccaaaattgaccacatactgggaagtaaagctctcctcagcaaatgtaaaagagcagaaattataacaaactatctctcagaccacagtgcaatcaaactagaactcaggattaagaatctcactcaaagccgctcaactacatggaaactgaacaacctgctcctgaatgactactgggtaaataacgaaatgaaggcagaaataaagatgttctttgaaaccaaagagaacaaagacacaacataccagaatctctgggacgcattcaaagcagtgtgtagagggaaatttatagcactaaatgcgcacaagagaaagcaggaaagatctaaaattgacaccctaacatcacaattaaaagaactagaaaagcaagagcaaacacattcaaaagctagcagaaggcaagaaataactaaaatcagagcagaactgaaggaaatagagacacaaaaaacccttcaaaaaatcaatgaatccaggagctggttttttgaaaggatcaacaaaattgatagaccgctagcaagactaataaagaaaaaaagagagaagaatcaaatagacacaataaaaaatgataaaggggatatcaccactgatcccacagaaatacaaactaccatcagagaatactacaaacacctctacgcaaataaactagaaaatctagaacaaatggatgcattcctcgacacatacactctcccaagactaaaccaggaagaagttgagtctctgaatagaccaataacaggagctgaaattgtggcaataatcaatagtttaccaaccaaaaagagtccaggaccagatggattcacagccgaattctcccagaggtacaaggaggaactggtaccattccttctgaaactattccaatcaatagaaaaagagggaatcctccctaactcattttatgaggccagcatcattctgataccaaagccaggcagagacacaaccaaaaaagagaattttagaccaatatccttgatgaacatcgatgcaaaaatcctcaataaaatactggcaaaccgaatccagcagcacatcaaaaagcttatccaccatgatcaagtgggcgtcatccctgggatgcaaggctggttcagtatacgcaaatcaataaatgtaatccagcatataaacagagccaaagacaaaaaccatatgattatctcaatagatgcagaaaaagcctttgacaaaattcaacaacccttcatgctaaaaactctcaataaattagcccaaaatctccttaagctgataagcaacttcagcaaagtctcaggatacaaaatcaatgtacaaaaatcacaagcattcctatacaccaacaacagacaaacagagagccaaatcatgagtgaactcccattcacaattgcttcaaagagaataaaatacctaggaatccaacttacaagggatgtgaaggacctcttcaaggagaactacaaaccactgctcaaggaaataaaagaggatacaaacaaatggaagaacattccatgctcatgggtaggaagaatcaatatcgtgaaaatggccatactgccccaggtaatttacagattcaatgccatccccccttcaaggttacccaatgactttcttcacagaattggaaaaaactaccttttaaaggtcattatggaaccaaaaaaggagcccgcatcgccaaggcaatcctaagccaaaagaacaaagctggaggcatcacactacctgacttcaaactatactacaaggctacagtaaccaaaacagcatggtactggtaccaaaacagagatatagatcaatggaacagaacagagccctcagaaataacgccgcatatctacaactatctgatctttgacaaacctgagtaaaacaagcaatggggaaaggattccctatttaataaatggtgctgggaaaactggctagccatatgtagaaagctgaaagtggatcccttccttacaccttatacaaaaattaattcaagatggattaaacacttaaacgttagacctaaaaccataaaagccctagaagaaaacctaggcattaccattcaggacataggcatgggcaaagacttcatgtctaaaacaccaaaagcaatggcaacaaaagccaaaattgacaaatgggatctaattaaactaaagagcttcctgcacagcaaaagaaactaccatcagagtgaacaggcaacctacaaaatgggagaaaatttttggaacctactcatctgacaaagggctaatatccagaatctacaatgaactcaaacaaatttacaagaaaaaaacaaacaaccccatcaaaaagtgggcgaaggacatgaacagacacttctcaaaagaagacatttatgcagccaaaaaacacatgaagaaatgctcatcatcactggccatcagagaaatgcaaatcaaaaccactatgagatatcatctcacaccagttagaatggcaatcatgaaaaagtcaggaaacaacaggtgctggagaggatgtggagaaataggaacacttttacactgttggtgggactgtaaactagttcaaccattgtggaagtcagtgtggcgattcctcagggatctagaactagaaataccatttgacccagccatcccattactgggtatatacccaaaggactataaatcatgctgctataaagatacatgcacacctctcaagaaacacatcagctttcatctttatcagtatgacactgacatgataggaaatgctgggctggtgattcagcagccatccattttacagtcagaggacaagtcgtacaatggtggaggaataggttcttcaaataggatcatggacttcttggaggagccaatccctggtgtagggacctatgatgatttcaatacaattgattgggtgagagagaagtctcgagaccgggataggcaccgagagggagcctttgcctacatagtcaattatttcatgtacgtcctctgggctctcctatttgccttccttgccgtatctcttgtcaaggtgtttgcgccttatgcctgtggctctggaatccctgagataaaaactatcttgagtggtttcattattaggggctatttgggtaagtggactctggttatcaaaaccatcaccttggtgctggcagtgtcgtctggcttgagcctgggcaaagagggccctctagtgcacgtggcttgctgctgtgggaacatcctgtgccactgcttcaacaaatacaggaagaatgaagccaagcgcagagaggtcttgtcggctgcagcagcagctggtgtatctgtagcctttggagcacctataggtggagtattattcagccttgaagaggtcagctactattttcccctcaaaacattgtggcgttcattctttgctgccttggtggcagcattcactctacgctccatcaatccatttgggaacagccgcctggtactattttatgtggagtttcacaccccatggcatctctttgagctcgtgccattcattctgctgggcatatttggtggtctgtggggagcactgtttatccgcacaaacattgcctggtgtcggaagcgaaagaccacccagttgggcaagtatcctgttatagaggtactcgtcgtgacagccatcactgccatcctggctttccccaatgaatacactcggatgagcacaagtgagctcatttctgagctgtttaatgactgtggccttctggactcctccaagctctgtgattatgagaaccgtttcaacacaagcaaagggggtgaactgcctgacagaccggctggcgtgggagtctacagtgcaatgtggcagctggctttaacactcatactgaaaattgtcattactatattcacctttggcatgaagatcccttctggcctctttatccctagcatggctgttggtgctatagcaggtcgacttctaggagtaggaatggaacagctggcttattaccaccaggaatggaccgtcttcaatagctggtgtagtcagggagctgattgcatcacccccggcctttatgcaatggttggggctgcagcctgcttagccaaagaagagtttgctcataagaccctggcaatggatgtgatgaaaccccggagaaatgatcctttgttgactgtccttactcaggacagtatgactgtggaagatgtagagaccataatcagtgaaaccacttacagtggcttcccagtggtggtatcccgggagtcccaaagacttgtgggctttgtcctccgaagagatctcattatttcaattgaaaatgctcgaaagaaacaggatggggttgttagcacttccatcatttatttcacggagcattctcctccattgccaccatacactccacccactctaaagcttcggaacatcctcgatctcagccccttcactgtgactgaccttacacccatggagatcgtagtggatattttccgaaagctgggactgcggcagtgcctggttacacacaacgggcgattgcttggaatcattaccaaaaaggatgtgttaaagcatatagcacagatggcgaaccaagatcctgattccattctcttcaactag

SEQ ID NO: 14442 - DNA, 3769 bp, Homo sapiens
  SIMILAR (217)..(98): 851254mologous to Volvox carteri f. nagariensis hydroxyproline-rich glycoprotein DZ-HRGP,accession number AJ242540,Smith-Waterman Score=218.
atgaatgctggcaagggtatggagaaaggggaacccttttacactgctgattcagagaagactctgagaaatgtttgtggggaatctggtgatgcagtgacacaagggctgagattccctgaatctgcacaacgagtatcgcacccactgcttcagctcaggtttgggggcaatgtgagcccagctgcacaagctgaccacctggtgctctgcccacaggatgtttccagattactattggcagaattgcccaggtttgcaggggcagaggggctctctgacaattcacttctcagcagtttgtcacattgttctgatagtatcagcagtgatgaggaggagctaaggactttgggaagcagtggtagcgaaagcagtactccagagaatgtcggacctcctttcctcatggatgagaacagttggttcaacaagtgtaagagagttaaacaaaagtatcagcttaccctggaacagaagggttaccttgaagaactcttacgacttcgagagaaccaactatctgaatctgtctcccagaataaaatactacttcaaaggattgaagattccgatctggctcataaactggagaaggaacaattagaatatataattgtggagcttcaagatcagctgaacagacctaaccagctagatttgttccaagctttctgtgctgaaattgcggggctgtcccaagtgttccaggccatggggctccctcaagcagaagggttgaacaccagctgtgctggggaagctaaactgctcccaggtcactggcaaaacactcaggcggggcagtgcaggctgtgctctgtgcaccctcttacaggaatggcgaggcagaacagtgaagacaaaagcactcaccatcttaatattcacaggactgtgctaaagaataatgatttaagatcgagacaagagttaactgcccatctcaccaaccagtggccttctccaggagctctggatgtcaatgctgttgccttggatacgttgctttaccgaaaacacaataaacagtggtatgagaaaagttatcaaagtcttgaccagttatcagcagaagttagcctttctcagacttcactagatccaggccagtcacaagaaggagatggaaaacaagacacattaaatgtaatgagtgaagcaccacaccacacctattccaaaattgaccacatagttggaagtaaagcactcctcagcaaatgtaaaagaacagaaactacaacaaactgtctctcagaccacagtgcaatcaaactagaactcaggactaagaaactcactcaaaaccgctcaactacatggaaactgaacaacctgctcctgagtgactactgggtacataacgaaatgaaggcagaaataaagatgttctttgaaaccaacgagaacaaagacccaacataccagaatctctgggacacattcaaagcagtgtgtagagggaaatttatagcactaaatgcccacaagagaaagcaggaaagatccaaaattgacaccctaacatcacaattaaaagaactagaaaagcaagagcaaacacattcaaaagctagcagaagaccaataacaggatctgaaattgtgacaataatcaatagcttaccaaccaaaaagagtccaggaccagatggattcacagctgaattctaccagaggtacaaggaggaactggtaccattccttctgaaactattccaatcaatagaaaaagagagaatcctccctaactcattttatgaggccagcatcatcctgataccaaagccgggcagagacacaaccaaaaaagagaattctagaccaatatccttgatgaacattgatgcaaaaatcctcaataaaatactagcaaaccgaatccagcagcacatcaaaaagcttatccaccatgatcaagtgggcttcatccctgggatgcaaggctggttcaacatacgcaaatcaataaatgtaatccagcatataaacagaaccaaagacaaaaaccacatgattatctcaatagatgcagaaaaggcctttgacaaaattcaacagcccttcatgctaaaaactctcaataaattagtgttggaagttctggccagggcaattaggcaggagaaggaaataaagggtattcaattaggaaaagaggaagtcaaattgtccctgtttgcagatgacatgattgtatatctagaaaaccccattgtctcagcccaaaatctccttaagctgataagcaacttcagcaaagtctcaggatacaaaatcaatgtacaaaactcacaagcattcttatacaccaataacagacaaacagagagcgaaatcatgagtgaactcccattcacaattgcttcaaagagaataaaatacttaggaatccaacttacaagggatgtgaaggaccttttcaagcagaactacaaaccactgctcaatgaaataaaagaggatacaaacaaatggaagaacactccatgctcatgggtaggaagagtcaatattgtgaaaatggccatactgcccaaggtaatttacagattcaatgccacccccatcaagctaccaatgactttcttcacagaattggaaaaaactactttaaagttcatgtggaatcaaaaaagagcccccacattgccccaagtccaatccctaagcccaaaagaacaaagctgggaggcatcacggctacctgacttcaaactatacctacaaggcctacagtaacccaaaacagcatggtactggtacccaaaacagagatatagaccaatggaacagaacagagccctcagaaataacaccgcatatctacaactatctgatctttgacaaaccctgggaaaaaccaagcaatggggaaaggtttccctatttaataaatggtgctgggaaaactggctagccatatgtagaaagctgaaactggatcccttccttacaccttatacaaaaattaattcaagatggattaaagacttaaatgttagacctaaaaccataaaaaccctagaagaaaacctaggcattaccattcaggacataggcatgggcaaggacttcatgtctaaaacaccaaaagcaatggcaacaaaagccaaaattgacaaatgggatctaatttaaactaaagagcttctgcacagcaaaagaaactaccatcagagtgaacaggcaacctacagaacgggagaaaattttcgcaacctactcatctgacaaagggctaatatccagaatctacaatgaactcaaacaaatttacaagaaaaaaacaaacaaccccatcaaaaagtgggcgaaggatatgaacagacacttctcaaaagaagacatttatgcagccaaaaaacacatgaaaaaatgctcatcatcactggccatcagagcaatgcaaatcaaaaccacaatgagataccatcttacaccagttagaatggcgatcattaaaaagtcaggaaacaacagtcttattctagtgcccctattaaaaaaagaagaacgtgctttgcagagtgacaccactacaaagccaagtagaaccagtgtccaaaggtcaccaattcaagataagcccagatttggcattcatctgaagagtccagtaaagatccagaggacatcgtgtcagttcaagtgtggcaggccaggtctcactaacacaggcctccgtaacaactgtttccatactgaccgagtggttaagttaaatattgaaagtcaaagcccttatacaaagcctgggatataa

SEQ ID NO: 14443 - DNA, 3443 bp, Homo sapiens
  SIMILAR (6)..(281): 451254mologous to Rat leukemia virus polymerase,accession number M77194,Smith-Waterman Score=202.
atgaagcgagaaggaagtttagagaaaaaaagaataaaaagaaatgaacaaagcctccaagaaatatgtgactatgtgaaaagagcaaatctacgtctgattggtggacctgaaagtgacggggaaaatggaaccaagttggaaaacactctgcaagatatgcaggagaaattccccaatctagcaaggcaggccaacattcaaattcaggagatacagagaacgccacaaagatactcctcaagaagagcaactccaagacacataattgtcagattcaccaaagttgaaatgaaggaaaaaatgttaagggcagccagagagaaaggtcaggttacccacaaagggaagtccatcagactaacagctgatctctcggcagaaactctacaagccagaagagagtgggggccaatattcaacattcttaaagaaaagaattttcaacccagaatttcatatccaggcaaactaagcttcataagtgaaggagaaataaaatcctttacagacaagcaaatgctgagagattttgtcaccaccaggcctgccctaaaagagctcctgaaggaagcactaaacatggaaaagaacaagcagtaccagccaccacaaaaacatgccaaattaactagagaagcaagagcaaacacattcaaaagctagcagaaggcaagaaataactaaaatcagagcagaactgaaggaaatagagacacaaaaaaccgttcaaaaaattaatgaatccaggagctggttttttgaaaggagcaacaaaatttacagaccgctatcaagactaataaagaaaaaaagagagaagaatcaaatagacacaataaaaaatgataaaggggataccaccactgatcccacagaaatacaaactaccatcagagaatactacaaacacctctatgcaaataaactagaaaatctagaagaaatggataaattcctcgacacatacactctcccaagactaaaccaggaagaaattgaatctctgaatagaccaataacaggaactgaaattgtgacaataatcaatagtttaccaaccaaaaagagtccaggaccagatggattcacagccgaattctaccagaggtacaaggaggaactggtaccattccttctgaaactattccaatcaatagaaaaagagggaatccttcctaactcattttatgaggccagcatcatcctgatagcaaagccgggcagagacacaaccaaaaaagagaattttagaccaatatccttgatgaacattgatgcaaaaatcctcaataaaatactggcaaaacgaatccagcagcacatcaaaaagcttatccaccatgatcaagtgggcttcattcctggaatgcaaggctggttcaatatacgcaaatcaataaattgtaatccagcatataaacagagccaaagacaaaaaccacatgattatctcaatagatgcagaaaaagcctttgacaaaattcaacaacgcttcaggctaaaaactctcaataaattaggtattgatgggacgtatttcaaaataataagagctatctatgacaaacccacagccaatatcatactgaatgggcaaaaactgaaagcattccctttgaaaactggcacaagacagggatgccctctctcaccactcctattcaacatagtgttggaagctctggccagggcaattaggcaggagaaggaaataaagggtattcaattaggaaaagaggaagtcaaattgtccctgtttgcagacgacatgattgtatatctagaaaaccccattgtctcagcccaaaatctccttaagctgataagcaacttcagcaaactgaatctgcaaactcaggaatacaaaatcaatgtgcaaaaatcacaagcattcttatacaccaataacaggcaaacagagagccaaatcatgagtgaactccccattcacaattgcttcaaagagaataaaatacctaggaatccaacttacaaggtacgtgaaggacctcttcaaggagaactacaaaccactgctcaaggaaataaaagaggatacaaacaaatggaagaacattccatgctcatgggtaggaagaatcaatatcgtgaaaatggccatactgcccaaggtaatttacagattcaatgccatccccatcaagctaccaatgcctttcgtcacagaattggaaaaaactactttaaagttcatatggaaccaaaaaagagcccacattgccaagtcaatcctgagcaaaaaggaacaaagctggaggtatcacactacctgacttcaaactatactacaaggctacagtaaccaaaacagcattgtacttgtaccaaaacagagatgtagatcaatggaacagaacagagccctcagaaataatgctgcatatctacaactatctgatctttgacaaacctgacaaaaacaagcaatgggggaaaggattcccatatttaataaatggtgctaggaaaactggctaaccatatgtaaaaggctgaaactggatcccttccttacaccttatacaaaaaatcaaattcaagatggattaaagacttaaaatgttagacctaaaaaccataaaaaaccctagaagaaaacctaggcaataccattcaggacataggcatgggcaaggacttcatgtctaaaacacccgaaagcaatggcaacaaaagccaaaacagacaaaggggatttagttaaactaaagaactttctgcacatgcaaaagagaaactaccatcagagtgaacaggcaacctacagaatgggagaaaatctttgcaatctactcatttgacaaagggctaatatccagaatctacaaagaactcaaacaaatttacaagaaaaaaaaaacaaacaatcccatcaaaaagtgggcgaaggatatgaacagacacttctcaaaagaagacacttatgcagccaaaaaacacatgaaaaaatgctcagcatcactggccatcagagaaatgcaaatcataaccgcaatgagataccatctcacaccagttagaatggcaatcattaaaaagtcaggaaacaacaggtgctggaggggatgtggagaaataggaacacttttacactgttggtgggactgtaaactagttcaaccattgtggaagtcagtgtggcgattcctcagggatctagaactggaaataccatttgacccagccatcccattactgggtatatacccaaaggactataaatcatgctgctataaagacacatgcacactaacttggatggagctagaagccattattctaagtgaagtactcaggaatggaaaaaccaaaaaccgtatgttctcacttataagtgggaaccaagatacgggtatgcaaaggcatacagaattctatgatggactttggcgactcagaagagggagggttgaggggg

SEQ ID NO: 14444 - DNA, 8157 bp, Homo sapiens
  SIMILAR (700)..(446): 951254mologous to Homo sapiens collapsin response mediator protein-5,accession number AF157634,Smith-Waterman Score=424.
atgcacattgttgtagaaacagctctgtcagcttcatggcagaacaaggccaagcccccagctagggttctgcttcaggtggtccccaatgtgtggttccttgtggctgttgtgtgggaactgtatccatctttggatctcatggatcgttccatagaatgcagttcctcaccagcaacggaacaaagctggacagagaatgactatgacaagctgagagaagaaggcttcagacgatcaaattactctgagctacaggaggacattcaaaccaaaggcaaagatgttgaaaactttgaaaaaaatttagaagaatgtataactagaataactaatacacagaagtgcttaaaggagctgatggagctgaaaaccaaggctcgagaactacgtgaagaatgcagaagcctcaggagccgatgcgatcaactggaagaaagggtatcagtgatggaagatgaaatgaatgaaatgaagcaagaagggaagtttagagaaaaaagaataaaaagaaatgagcaaagcctccaagaaatatgggactatgtgaaaagaccaaatctacgtctgattggtgtacctgaaagtgatggggagaatggaaccaagttgaaaaacactctgcaggatattatccaggagaacttccccaatctagcaaggcaggccaaagttcagattcaggaaatacagagaatgccacaaagatattccttgacaagagcaactccaagacacataattgtcagattcaccaaagttgaaatgaaggaaaaaatgttaagggcagccagagagaaaggagcacccagattcataaagcaagtcctgagtgacctacaaagagacttagactcccacacattaataatgggagactttaacaccccactgtcaacattagacagatcaacgagacagaaagtcaacaaggatacccaggaattgaactcagctctgcaccaagtggacctaatagacatctacagaactctccaccccaaatcaacagaatacacatttttttcagcaccacaccacacgtattccaaaattgaccacatacttggaagtaaagctctcctcagcaaatgtaaaagaacagaaattataacaaactatctctcagaccacagtgcaatcaaactagaactcaggattaagaatctcactcaaaaccgctcaactacatggaaactgaacaacctgctcctgaatgactactgggtacataacgaaatgaagctagaaataaagatgttctttgaaaccaacgagaacaaagacacaacataccagaatctctgggacgcattcaaagcagtgtatagagggaaatttatagcactaaatgcccacaagagaaagcaggaaagatccaaaattgacaccctaacatcacaattaaaagaactagaaaagcaagagcaaacacattcaaaagctagcagaaggcaagaaataactaaaatcagagcagaactgaaggaaatagagacacaaaaaacccttcaaaaaattaatgaatccaggagctggttttttgaaaggatcaacaaaattgatagatagatcactagcaagagtaataaagaagaaaggagagaagaatcaaatagacacaataaaaaatgataaaggggatatcaccaccgatcccacagaaatacaaactaccatcagagaatcctataaacacctctatgcaaataaactagaaaatctagaagaaatggataaattcctcgacacatacaccctcccaagactaaaccaggaagaagttgaatctctgaatagaccaataacaggctctgaaattgtggcaatagtcaatagcttaccaaccaaaaagagtccaggaccagatggattcacagccgaattctaccagaggtacaaggaggaactagtacccttccttctgaaactcttgcaatcaatagaaaaagagggaatcctccctcactcattttatgaggccagcatcatcctgataccaaagcctggcagagacacaacaaaaaaagagaattttagaccaatatccttgatgaacattgatgcaaaaatcctcaataaaatactggcaaaccaaatccagcagcacatcaaaaagtttatccaccatgatcaagtgggcttcatccctgggatgcaaggctggttcaatacatgcaaatcaataaatgtaatccagcatataaacagaaccaaagacaaaaaccacatgattatctcaatagatgcagaaaaggcctttgaaaactggcacaagacagggatgccgtctttcaccattcctattcaacatagtgttggaagttcaggccggggcaatcaggcaagagaaagaaataaagcgtattcaattaggaaaagaggaagtcaaattgtccctgtttgcagaagacatgatggtatatttagaaaaccccatcgtctcagcccaaaatctccttaagctgataagcaactttagcaaagtctcaggatacaaaatatacaaaatcgatgtgcaaaaatcaccaagcattcctatacaccaataacacagacaaacaagagagccaaatcatgagtgaactcccatttcacaattgcttccaagagaattaaatacctaggaatccaccttacaagggacgtgaaggacctcttcaaggagaactacaaaccactgctcaaggaaataaaagaggacacaaacaaatggaagaacattccatgctcatgggtaggaagaatcaatatcgtgaaaatggccatacttgcccaaggtaatttacagattcaatgccatccccatcaagctaccaatgactttcttcacagaattggaaaaaaactactttaaagttcactactggaaccaaaaaaggagcctgcattgccaagtcaatcctaagccaaaagaacagagctggaggcatcacgctatctgacttcaaactgtactacaaggctacagtaaccaaaacagcatcggtactggtaccaaaaacagagatatatagaccaatggaacagaatagagcccctcagaaataacgccacatatatctacactattctgatcctttggacaaacctgagaaaaacaagcaatgggggaaaggattcccttatttaataaatgggtgctgggaaaaactgggctagcccatatgtaggaagctgaaacttggatccccttcccttacaccttatacaaaagttaattcaagatggattaaagactttaaatgttagacctaaaccccataaaaaaccctagaaggaaaacctaggcaatacccatttcaggacataggcatgggcaaggacttcatgtctaataaaacaccaaaagccaatggccaacaaaagcccaaaattgacaaatgggatctaattcaactaaagagcttctgcacagcaaaagaaactaccatcagagtaaacaggccaacctacaaaatgggagaaaaaatttttgcaatctacatcatctgacaaaagggctaatatccagaatctacaaagaacttaaaaacaaatttacaagaaaaaatcaaacaaccccatcaaaaagtgggcaaaggatatgaacaggcacttctcaaaagaagacatttatgcagccaaaaaaacacatgaaaaaatgctcaaccatcactggccatcagagtaatgcaaatcaaaaccacaatgagataccatctcacaccaagttagaatggcgatcattaaaaaggtcaggaaacaacagagacgttggcaatgtggttgaagccatgtatggggaccttcctcctccaattatgctgattggacatagcatgggtggtgctattgcagtccacacagcatcatccaacctggtaccaagcctcttgggtctgtgcatgattgatgttgtagaaggtacagctatggatgcacttaatagcatgcagaatttcttacggggtcgtcctaaaaccttcaagtctctggagaatgctattgaatggagaaatatcaaagatctatcttgggcagatagcatcaagaatgtagctgctgccagcttggcttgtatctcaggtgccctgcctgcttccgcagtaacaacaagcccagataataagaggatggccaggaatgtcttgaaatatgaaaggctcttggcagagagccccaaccacgtggtagctgaggctgtcatccagaggcccaatataccccacctgcagaccagagacacctacgaggggctatgtcagaccctgggttcccagcccactctctaccagatccctagcctctactgttcctatgagaccaattccaacgcctacctgctgctccagcccatccggaaggaggtcatccacctggagccctacattgctctctaccatgacttcgtcagtgactcagaggctcagaaaattagagaacttgcagaaccatgggaacagagctcctcaccagcaacggaacaaagctggatggagaatgactttgatgagttgagagaagaaggcttcagacgatcaaactactccgagctacaggaggaaattcgaaccaatggcaaagaagttaaaagctttgaaaaaaaattagacgaatggataactagaataaccaatgcagagaagtccttaaaggacctgatggagctgaaaaccaaggcacgagagctacgtgacgaatgcagaagcctcagtagccgatgcaatcaactggaagaaagggtatcagtgatggaagacgaaatgaatgaaatgaagcaagaagggaagatcaaaagagacaaagaaggccattacataatggtaaagggatcaattcaacaagaagagctaactatcctaaatatatatgcacccaatacaggagcacccagattcataaagcaagttctgagtgacctacaaagagacttagactcccacacattaataatgggagactttaacacctcactgttaacattagacagatcaatgagacagaaagtcaacaaggatacccaggaattgaactcatctctgcaccaagcggacctaatagacatctacagaactctccaccccaaatcaatagaatatacatttttttcagcaccacaccacacctattccaaaattgaccacatagttggaagtaaagctctcctcagcaaatgtaaaagaacagaaattataacaaactatctctcagaccacagtgcaatcaaactagaactcaggattaagaatctcactcaaagccgctcaactacatggaaactgaacaacctgctcctgaatgactactgggtacataacgaaatgaaggcagaaataaagatgttctttgaaaccaacgagaacaaagacacaacataccagaatctctgggacgcattcaaagcagtgtgtagagggaaatttatagcactaaatgcccacaagagaaagcaggaaagatccaaaattgacaccctaacatcacaattaaaagaactagaaaagcaagagcaaacacattcaaaagctagcagaaggcaagaaataactaaaatcagagcagaactgaaggaaatagagacacaaaaaacccttcaaaaaatcaatgaatccaggagctggttttttgaaaggatcaacaaaattgatagaccgctagcaagactaataaagaaaaaaagagaggagaatcaaatagacacaataaaaaatgataaaggggatatcaccaccgatcccacagaaatacaaactaccatcagagaatactataaacacctctacgcaaataaaccagaaaatctagaagaaatggataaattcctcgacacatacactctcccaagactaaagcaggaagaagttgaatctctgaatagaccaataacaggagctgaaattgtggcaataatcaatagtttaccaaccaaaaagagtccaggaccagatggattcacagccgaattctaccagaggtacaaggaggaactggtaccattccttctgaaactattccaatcaatagaaaaagagggaatcctccctaactcattttatgaggccagcatcattctgataccaaagccgggcagagacacaaccaaaaaagagaattttagaccaatatccttgatgaacattgatgcaaaaatcctcaataaaatactggcaaaccgaatccagcagcacatcaaaaagcttatccaccatgatcaagtgggcttcatccctgggatgcaaggctgccaatatcatactgaatgggcaaaaactggaagcattcctttgaaaactggcacaagacagggatgccctctctcaccactcctattcaacacagtgttggaagttctggccagggcaatcaggcaggagaaggaaataaagggtattcaattaggaaaagaggaagtcaaattgtccctttttgcagacgacatgattgtttatctagaaaaccccatcgtctcagcccaaaatctccttaagctgataagcaacttcagcaaagtctcaggatacaaaatcaatgtacaaaaatcacaagcattcttatacaccaacaacagacaaacagagagccaaatcatgagtgaactcccattcacaattgcttcaaagagaataaaatacctaggaatccaatttacaagggatgtgaaggacctcttcaaggagaactacaaaccactgctcaaggaaataaaagaggatacaaacaaatggaagaacattccatgctcatgggtaggaagaatcaatatcgtgaaaatggccatactgcccaaggtaatttacagattcaatgccatccccatcaagctaccaatgactttcttcacagaattggaaaaaactactttaaatttcatatggaaccaaaaaagagcccgcatcgccaagtcaatcctaagccaaaagaacaaagctggaggcatcacactacctgacttcaaactatactacaaggctacagtaactaaaacagcatggtactggtaccaaaacagagatatagatcaatggaacagaacagagccctcagaaataacgccgcatacctacaattatctgatctttgacaaacctgagaaaaacaagcaacggggaaaggattccctatttaataaatggtgctgggaaaactggctagccatatgtagaaagctgaaactggatcccttccttacaccttatacaaaaatcaattcaagatggattaaagatttaaacgttagacctaaaaccataaaaatcctagaagaaaacctaggcattaccattcaggacataggcgtgggcaaggacttcatgtccaaaacaccaaaagcaatggcaacaaaagccaaaattgacaaatgggatctaattaaactaaagagcttctgcacagcaaaagaaactaccatcagagtgaacaggcaacctacaacatgggagaaaattttcgcaacctactcatctgacaaagggctaatatccagaatctacaatgaactcaaacaaatttacaagaaaaaaacaaacaaccccatcaaaaagtgggcgaaggacatgaacagacacttctcaaaagaagacatttatgcagccaaaaaatacatgaaaaaatgctcatcatcactggccatcagagaaatgcaaatcaaaaccacaatgagataccatctcacaccagttagaatggcaatcattaaaaagtcaggaaacaacaggtgctggagaggatgtggagaaataggaacacttttacactgttggtgggactgtaaactagttcaaccattgtggaagtcagtgtggcgattcctcagggatctagaactagaaataccatttgacccagccatcccattactgggtatatacccaaatgactataaatcatgctgctataaagacacatgcacacgaaaaatacgaacaaatgggagaaattgtgccagcaaaaaaggaaacatcaacaaagaagctagaagcctatttaaccactggcccctgcaaaggccaaggcgagtgtatagcctgcacgttctctgtggagacaccgcgttcaggcacggtttgagacctgcccaccatcatccatcattggactgcctgtcctcaacccaccatggagaacaagcttttctaagggaaggacatctgcaggataaaatgggaaaagaggaag

SEQ ID NO: 14445 - DNA, 390 bp, Homo sapiens
  SIMILAR (91)..(390): 831254mologous to Homo sapiens Human Protease and associated protein-2 (PPRG-2),accession number Y70008,Smith-Waterman Score= 406.
cagagagctgggctgtagctccaagcggaaaccgcggcagccgagcccagctaggaatgcacacctcctgaaaaccaagccgaggactgcggcgtccggtgtccacgcacagtgtcagcttgctctggtgcaaccagcacgtcttccagtatgaatcccacagaaacctaggctgtaaaaacagaacctgagatgaagtcacaggcaaccaagctgtctgtggttcatgagaaaaaatcccaagaaggaaagccgaaagaacacacagagccaaaaagcctacccaagcaggcatcagatacaggaagtaacgatgctcacaatataaaagcagtttccagatcagctgaacagcatccatcagagaattcaacagatccaaatactgaa

SEQ ID NO: 14446 - DNA, 660 bp, Homo sapiens
  SIMILAR (660)..(304): 411254mologous to Homo sapiens Human calpastatin subfragment capable of inhibiting calpain,accession number R85597,Smith- Waterman Score=152.
ctacttctccggattgttgggaggagggtcgaagcgtagactggccacgcccgggtcccgctctctcgttgcacaactgcaagctagatctgggcatcgaaggaggaacgctgcaacctccaaccccttctttctgaccaaccgggaccagagcagtgcgacaaggaggaggagtcgccaagaaacacagttaaactcagaacgcacggtatcgccagggtcgcgatagtaggaaaagcgcacgtcccgagcctggggagtccgctgcagggaccaggccccggacacgcagggcaggtagccgggggcacagggcctagaaccgggagcacgcgcggtgacatttgcagaagtgtgggaagatacagtctgtgcctctgaactgtgaactgatacccatctaacatcaatacttaaacccaaagtactcccgtgttcctgtcctgggataggtgcaagttcgtcatggcccctcagattaggtattcttttgtacttcatgaccatggccttatttgctctcctacccactgagtatgaatttttacagatatcatgatcacatactgaaacttctggtccagtatacgttgtatttgcttcttcagtttcttcaggtcctcctaaagtatctattaagtcatccaaagcagcattcat

SEQ ID NO: 14447 - DNA, 1089 bp, Homo sapiens
  SIMILAR (1051)..(1494): 981254mologous to Homo sapiens Human transmembrane protein HTMPN-23,accession number Y57899,Smith-Waterman Score=724.
atggtggacaatgatgtgccttggccattggtggtagcacaggaaaaaggacagcctgatctctgtctgtcctccaaaggctacaggccccttgcactagtacaactggatttccatcaggtgtcagtaacatctaagattttcattttgtccggggctctacgcagtttaactggagccgccacagctgattggacctgcagagtactggttatttaccctcatgatatcatggctgattcggagtgcaactcactgctggtgcccagcaccacaagaaagatcatgaagcatatgctagcctcagaaaagatcaaaactcaaaattttaactacaatgtcgatgaatgtgtatcacttttataccatcacaaagccaataaattggaggcagctgaggcccggcaagaatgcgagctattgagggtggcgtcagtgagccggcactgctgggggacccagcgcaccctcacagctgctggcccaggtgctaagcccctcactgcctggggccagcccgtgccccgaatgcgaggcctgccaagcccgcaaccacctggaacttgcgcagctcgcgagcgccatgcgcagccccggttcccacccagagctgggctggagctccaagcggaaccgcgggagccgagcccagctaggaatgcagacctcctgaaaaccaagcgaggactgcggggtccggtgtccacgcagaggcctgtgcccccgctacctgccctgcgtgtccggggcctggtccctgcagcggactccccagctcgggacgtgcgcttttcctactatcgcgaccctggcgataccgtgcgtctgagtttaactgtgtttcttggcgactcctcctccttgtcggtaacatgttactgccccttccgccgggaaatgtatctggtgaccggacgcgtaggttacaaaacaagggatttgtgtggcccggtacaagtggcccgagacaatggcccgagacaagtggcccaaaagaaggaaagcagcagctatgtcagttggtttggcacctttatctctagggttggagatagatctcctcctccccgccgtgccgccaccctgtga

SEQ ID NO: 14448 - DNA, 644 bp, Homo sapiens
  SIMILAR (58)..(489): 821254mologous to Homo sapiens HSPC266,accession number AF161384,Smith-Waterman Score=659.
cctcaacaacctttgcccttgacctgatattgataacatcttttcagaatttggtgcaaaaagcaaaccatatcttaccgttgatcagatgatggattttatcaaccttaagcagcgagatcctcggcttaatgaaatactttatccacctctaaaacaagagcaagtccaagtattgattgagaagtatgaacccaacaacagcctcgccagaaaaggacaaatatcagtggatgggttcatgcgctatctgagtggagaagaaaacggagtcgtttcacctgagaaactggatttgaatgaagacatgtctcaccccctttctcactatttcattaattcctcgcacaacacctacctcacaggtatgaattttctagttctttgttactttagccagtctcaccaaatttcaccaacctctactttctgttgttcggaagctgaagtgtgttttcttccatttcctgcgaagtgcctctgagaactctggggttccaccactaaagcctcccgcctcccataagcagtcatgtccacatgtgtatgaagcaatagcatcatttctccacagcctaagtttttaagtcttctaaaatgcaaccggcttgacatttcagatcattggggattttgtgtacctg

SEQ ID NO: 14449 - DNA, 1248 bp, Homo sapiens
  SIMILAR (239)..(460): 1001254mologous to Homo sapiens bG115G20.2 (novel protein),accession number AL078645,Smith-Waterman Score=378.
atttatgctagactatggaagagatgtaaataaagtgaaggccatggtccttgctcactaaggctcaggcccatctacttagacacttctgcttcaataggttctggctgcttgggaataccagcagcaactttctggaacaccttctgggaaaggagccacagagcttctctcttcaggacatcaggcttgtctgcggtttctcctagacttgaggacaaggaagcctcggtatgagaatgtcctcaggaccaagcagaagaatgtacctttttggagacattcagcccctccctactccttccttctaaacttagcccatcggcaatcaacgctgtaaaagaatgcattcacatcctttctaacttcatttcctccaggacaaatatcagtggatgggttcatgcgctatctgagtggagaagaaaacggagtcgtttcacctgagaaactggatttgaatgaagacatgtctcagcccctttgcttcatgggaatctggggtttgttttgttggtgttttatagctggccaactggctggaaactcctctgttgagatgtatcgccaagtgctcctgtctggttgtcgctgtgtggagctggactgctggaagggacggactgcagaagaggaacctgtaaaaattctggcatactgaatatacatgtgttctcatttttaggaagtgatagaagcaattgcggagtgtgcatttaagactttaagcctccctactttccttcttctgttcttgttctcccttagcccaaagcagcaagccaagatggcggagtactgccgactgatagggagcagtatttttaaagaatatgcctttcatttctattagctggaatctggagttcctcttccaagccctatggatttaatgtataaaattttggtgaaaaataagaagaaatcacacaagtcatcagaaggaagcggcaaaaagaagctctcagaacaagcctccaacacctactgttgaaatggtgacatgatgatctgttattaaaatttgacaggagaagctgatacggaaagtgacgaatgctgactctggaaatgttttcttttttattcctacttccaggggactgctggaagtgaggctatggccacagaagaaatgtctaatctggtgaactttctcaccttccccttttttgttttgttgttgcttaactcagaaagaaataaaagttttgaaatgtcttccttcgtggaaaccaaaggacttga

SEQ ID NO: 14450 - DNA, 647 bp, Homo sapiens
  SIMILAR (719)..(1198): 901254mologous to Homo sapiens HSPC266,accession number AF161384,Smith-Waterman Score=738.
gagtgaagctacagaccttcacagagagtgttacagctcataaaggcagcgtggacccaaaaagtgagcagcagcaagatttatcgcaaagagccaaagaacaaagccttcacaatgcagaagggcaccccaaccgcccttgggcggttgatgggactgggtgccatgaagcaaggggcagcgctagtccgggaccgggtgccatggagcagggggcagcactagtccgggaggctcaggccgtgcaggagcccacggcagggggtgggggagactcaggcatggcgggctgcaggtcccgagccctgccccgtggggaggcagctaaggcccagcgagaaatcaagcgcagctccggtgggccggcactgatgggggacccggtgcaccctccgcagctgctagcccgggaacatgatattagtgggcagcacttagttgctggggagaaagaagcagagtcagaagatgaagaggaggaggacatgaaactcttaggtacccctgaagggggtagcaagtttacacagaaaaaagtaaaacttgctgctgatgaagatgatgatatgatgatgcagatgatgatgatgatgatgatgatgatgatgattttgatgatgaggaaactgaagaaaaagctccagtga

SEQ ID NO: 14451 - DNA, 950 bp, Homo sapiens
  SIMILAR (27)..(566): 661254mologous to Homo sapiens nucleophosmin,accession number M23613,Smith-Waterman Score=564.
  misc_feature (1)...(950): n = a,t,c or g
ttcccggggcgacccacgcgtccgcaccaccaggggtcttaaggttgaagtgtggttcagggccagtgcatattattggacagcacttagtagctgtggaggaagatgcacagtcacaagatgaagaggaggaggatgtgaaactcttaagtatatctggaaagcggtctgcccctggaggtggtagcaaggttccacagaaaaaagtaaaacttgctgctgatgaagatgatgacgatgatgatgaagaggatgatgatgaagatgatgatgatgatgattttgatgatgaggaagctgaacaacaagcgccagtgaagaaatctataccgagatactccagccaaaaatgcacaaaagtcaaatcagaatggaaaagactcaaaaccatcatcaacaccaagatcaaaaggacaagaatccttcaagaaacaggaaaaaactcctaaaacaccaaaaggacctagttctgtagaagacattaaagcaaaaatgcaagcaagtataggaaaaaaggtggttctcttcccaaagtggaagccaaattcatcaattatgtgaagaatttgctcccggatgactgaccaagaggctatttcaagatctttggcggtggaggaggtctctttaagaaaatagtttaaacaatttgttaaaaaattttccgtcttatttcatttctgtaacagttgatatctggctgtcctttttataatgcagagtgagaactttccctaccgtgtttgataaatgttgtccaggttctattgccaagaatgtgttgntcaaaatgcctgtttaagttttaaagatggaacttcacccctttgctgggtttaagtatgtatggaatgttatgataggacatagtagtagcggtggtccgacatggaaatggtgtgggagacacagatatacatgtgaaataaaactccggattttaataaagt

SEQ ID NO: 14452 - DNA, 1974 bp, Homo sapiens
  SIMILAR (381)..(1019): 481254mologous to Homo sapiens HSPC266,accession number AF161384,Smith-Waterman Score=363.
atgatgacgtcaaacgcaatggctcccgcgggttgtggtcggagcgctggcgggggcgggatcgtgacgttaagggcggtgcccagtcagcgaggtaggtcgggaaggcagccggcggccccagatctagaaccgctgcagtgccgagcttccagggacgtgaagccggaaagccaggcgcccttcttgactgcgcctaggtggaactggccctccagcagcttgaacgtttgccattttcccattcaactttgcgcagtctcatccacgctgatgacgccacaaatccgtgtctctaacctggatccagctcaaaacccccagacccctatcattcagctccctaggggacaatttcagctggaagtcctgcgaactcctcacaatccacttatgaaaagcgcattcatgttttcctttaggacccctctcctaccaccatctctgttccagcttggtaaaactggccagttgtccaaggcaaagagaagagctctatctgcagtcatccctcacacctacctccaccctaagatcatggtatacgttcaaagatggaaacgacatatccttcaaaagaaaggggaaggaaaatgtgcattgcagattgctggacaacagcgctggatagaagaggttgggggtggttggaggaagctgtacactgtgcctaccacctgcccactgctgaacagggcacccatctggttatatcaggcagagaggaatctcgaacacagagagagggagcctacgcaaggtctcccaatttacacatcacagaaccacattctgcgacaaagcctgtctttggcatcttcccacatcccaagcagaggaagaggaagcacaggcctcaccttggaatcagggaagggagcagaaagcctggcaggatggagcaggggcagagacctcatgggtgcacaggaaggagaactgagaaatgaaatgaagcctctagattatagaacagaaggattttgtggcaaggtcatgaaacgagtgcgtaccgagcagattcagatggcagtgtcctgctacctcaaacgccggcagtacgtggactcagatggtcccctgaagcaaggactgcggctgtcacagactgctgaagagatggcggccaatctaacagtgcaatcagaatctggttgtgccaacatagtgtctgcagccccttgccaggcagaaccccagcaatatgaagtacagtttggacgactgcggaattttctcactgattctgattcccagcatagccacgaagtgatgcctctcctctatcctctctttgtctacctccatctcaacctggtccaaaacagtccgaagagcacagtggaaagtttttacagccgcttccatggaatgtttctgcagaatgctagccagaaggatgtcattgagcagctacagaccactcaaaccatccaggacatcctatctaacttcaagcttcgagcattcctagataacaagtacgtggtccgtctccaagaagacagctacaactaccttatccgctacctccaaagtgacaacaatactgccctgtgcaaagtcctcaccttacatattcatcttgacgtgcagcctgccaagagaacagactatcagctgtatgccagtggcagctcctcccgcagtgagaacaacggtttggagccccccgacatgcccagccctattctgcagaacgaggctgccctagaggtcttacaggagagcattaagcgagtcaaggatgggcctccctccctcactaccatctgcttctatgccttctataacacagagcagctgttgaacactgcagaaatctcccccgatagcaagctgcttgctgctgggtttgacaactcctgtataaaactttggagtttacgatccaagaagttaaaatcagagccccaccaagtagacgtgtcccgcatccatttggcttgtgatattctggaggaggaggtatga

SEQ ID NO: 14453 - DNA, 1246 bp, Homo sapiens
  SIMILAR (275)..(1159): 681254mologous to Homo sapiens PCAF associated factor 65 beta,accession number AF069736,Smith-Waterman Score=893.
  misc_feature (1)...(1246): n = a,t,c or g
gcggccgcccagagcggcggcgagggcggcggggcgcggggctccaggacacagctgagccggcggtcagagcgagacctgcagcagagacgacggaggcggaagcatctcgatccgggaggcggcggcgtggggacggggccgctggggagccggggccgcctggggagccggggccgcctgggatgttcagtcatgaaatgagtgcgtaccgaggagatccagatggcagtgtcctgctacctcaaacgctggcagtacgtggactcagacgggtcccctgaagcaaggactgcggctgccacagactgctgaagagttggcggccaatctcacggtacacagagaatctcattgtgccgacatagtgtctgcagtcccttggccaggcagagccccagcaatatgaagtacatgtttggacgactgcggaattttctcatcgattctgattccccgcatagccacgaagtgatgcctctcctttatcctctctttgtctgcctccatctcagcctggtccagaacagtccaaaaagtacagtggaaagtttttacagccgcttccatggaatgtttctgcagaaagctagcccagaagggcgtcattgagcagctacagaccactcaaaccatccaggacatcctatctaacttcaagcttcgagcattcctagataacaattacgtggtccatctccaagaagacagctacaactaccttatccactacctccaaagtgacagctatactgccctgtgcaaaatgtttatcttacttattcatcttgatgtgcagcctgccaagacaacagactaacagctgtatgcaagtggcagctcctcccgcagtgagaacaattacttggaggcccctgatatgcccagccctattctgcagaacgatgctgccctggaggtcttacaggagcgcattaagcaagtcaaggatgggtgtccctccctcactaccgtctgcttctataacacctagcagctgttgaacactgcagaaatctcccctgatagcaagctgcttgctgctgggtttgacaactcctgtataaaactttggagcttacaatccaggaagttaaaatcagagtcctgtcaagtagacatgtcccgcatccatttggcttgtgatattctggaggagcatgtgtgcgnacgcgtgggcggacgcgtgggcggacgcgtggtcnaccnnatgccgacgncttcagtcatcatttnnnnnnacgct

SEQ ID NO: 14454 - DNA, 384 bp, Homo sapiens
  SIMILAR (37)..(135): 1001254mologous to Homo sapiens Human secreted protein, SEQ ID NO: 7226,accession number G03145,Smith-Waterman Score=181.
aagggagcaagctcccggagccggtggcgcatcaccatgacccagtcggtggtcgtacaggtcggccagtgcggaaaccagatcggctgctgcttctgggacctggcactaagggagcacgccgcggtcaaccaggtacccgcccgccgccgcgagccccctcgcctgtcagctaggtcttccagcccatacgcaggaaataatcgacttgagctttcatctgacccgtttaagatgcatgggatcttcccagtaaagaacgtactggtttttaaacatgttgcgtcagacacacactaaactaaaagaacactggccagcgaccttagtcttaacgtttttcctgattctcagggtctcctctttattggtgttcgtgtgcac

SEQ ID NO: 14455 - DNA, 1156 bp, Homo sapiens
  SIMILAR (356)..(961): 541254mologous to Homo sapiens epsilon-tubulin,accession number AF201334,Smith-Waterman Score=399.
agcgccgttgctgggggaatgcagaagcggccgcgggctagcaagctcccggagccggcggcgcaccaccatgacccagtcggtggtcgtacagggtaagctacgccgggcgggtagagacctggtcgccgcggaatccagcggccatgtttcctgcttaatgtcctattctctttccttcctctcctccggtcgcagtcggctggcactaagggagcacgccgcggtcaaccaggtacccgcccgccgccgcgagccccctcgcctgtcagctaggtcttccagcccatattcttttcatttacagagtgaataactctaaaagaaaatacattaattatattttatttttctttctcaggcagtcttgattgatatggaagaaggggtagtgaatgaaattctgctttagattagaactaatcaaataaaaaaataaatgcaaggaatttttaaaatccatattctaattttcagggccgtgggtcacaaagttttcggcagtctttaccaagaccagattttagagaagtttcaaattcttcacaattatattctgaatcatttatgctaatttttaaaaacactttaatcctcaggaacaggatctggacttggcacatttcttttaaaggtgcttgaagacgaattcccagaagtatacagatttgtgacttccatttatccttctggtgaggatgatgtcataacctcacctttcctagtagaatatcatctacatccactcttcttaatagcttctctcccaatgtttttccctcaaaagtctttatttgacatcattagcaaaatcgacctcatgggtgaattctgggaaagttggggtacaactgtgaagccaaagagtctgggtaacttcaagttctggggctttaaaaatcgagctacatttaaagtgtataattttaaaattaaaaattttctcattttaatgttaactttttagctctgcaagatttgaagggtcccttaatatggaccttaatgaaatcagcatgaatttagttccttttcctccttcttcataggaaatagtctctttaaagtatgtgctctattttaattgatactgtgacactgctttcagtgttatgacagtagagtctcttgcaattgcacatagaactgaggagag

SEQ ID NO: 14456 - DNA, 461 bp, Homo sapiens
  SIMILAR (252)..(380): 901254mologous to Homo sapiens putative b,b-carotene-9',10'- dioxygenase,accession number AJ290393,Smith-Waterman Score=209.
tgtagcgctctgaccatgcttaaagcaagcttggcacgaggtgagaacatgcaacccaagctattctaagcagatcccttttttatattggaacaggaaatatgtatagtaaagctgggagacagtaaacatgtatttctggctggcatttgtttagggcatcagtaacgtgtccaggcattcagacaagtccccataactggcacatttcagacaactctagtttgccaaataacatttttattgtttgctggaaccttttaggaatgacaaggaactatataattttcattgaacaacctctaaagatgaacctgtggaaaattgccacttctaaaattcggggaaaggccttttcagatgggataagctgggaacccccagtgtaatacgcggtttcatgtggtggaaaaacgcactggacagctccttccagggagatactacagcaaaccttttgt

SEQ ID NO: 14457 - DNA, 525 bp, Homo sapiens
  SIMILAR (187)..(315): 971254mologous to Homo sapiens putative b,b-carotene-9',10'- dioxygenase,accession number AJ290393,Smith-Waterman Score=224.
atggtcatagctgtttcctgtgtgaaaatgttatccgctcacaattccacacaacatacgagccggaagcctaaaggaggatccccgggtaccgagctcgaaattctaatcatggtcatagctgtttcctgtgggaaaatggtttccggtccaaattccccaaaacatcgaacccgaaaccataagggtttctcctataaggttattcgggttcctccagagaaggtggaccttggggagacaatccatggagtccaggtgatatgttctattgcttctacagagaaagggaaaccttcttactaccatagctttgatcagcatctggaggaagccatcactagatctaggactgcagagacaaaggaagtaactgtgttagaggagtcaaggagtgggcatctccagtgggctctagagaatcccgggtcccgagctcgaaattctaatcatggtcatagctgtgtcctggtggaaattggtatccgcttcacattcccaccacataccaacccggaagcataa

SEQ ID NO: 14458 - DNA, 927 bp, Homo sapiens
  SIMILAR (946)..(2808): 951254mologous to Homo sapiens zinc finger protein ZFP- 95,accession number AF170025,Smith-Waterman Score=3218.
atggaggacctgctcacagaagccaggtcgccttactgggggagagccagagcaaagatccaggactcctgctggagtgtaacctcagatccaaatgcaggctctgtggacattcttgctcccttgttgctcccttctccttccagctacctccccaacttcacttgtactgtatctgttgtcaccagccaccttcatgaggcgtttctagacctggggttcagagggacaggaggaagcaactgcaaaacctctagacaggtgcagttgaacaatcagaagagaaagaagaaaaaatccaaaagcctcccattccacatgagcctgcaaatccaaaattacaaaacacaggaagaacctcatgctaagcctagcagccagcagcaccaacactctgaacatgaatcaatccagacaaaattagtattcagaagcagcatgacatacatgcatacattgaagctgataagagaaaaaggaagcataatgctgtcatccacacagggtgaatgtccaaatagcacatgccgctggcctgctgaggagcaccccttggggtccactcacagagaggaccaggaacacgttattcgggttcctccagagaaggtggaccttggggagacaatccatggagtccaggtgatatgttctattgcttctacagagaaagggaaaccttcttactaccatagctttggaatgacaaggaactatataattttcattgaacaacctctaaagatgaacctgtggaaaattgccacttctaaaattcggggaaaggccttttcagatgggataagctgggaaccccagtgtaatacgcggtttcatgtggtggaaaaacgcactggacagactactcaatgtgaagacaatgagaatgaagacctttatgatgatctactaccacttaatgaatag

SEQ ID NO: 14459 - DNA, 885 bp, Homo sapiens
  SIMILAR (217)..(840): 651254mologous to Homo sapiens gonadotropin inducible transcription repressor-4,accession number AB021644,Smith-Waterman Score=806.
atggcagaaattttgacccaggttccagatgacatgctgaagaagaaaactccccgagtaaaatcagtgtggagaagtcagcgtgggtcatgcactcccttaataggcaccacagagctgacactggacacaagccatatgagtatcaggaatatggacagaagccatataaatgtacatactgtaagaaagccttcagctgatctcccctactttcgaacacatgaatgggctcacactggggggaaaccttatgattgtgaggaatgtggaaaaagctttatttcccgttcaagcattcgaagacacaggataatgcacagtggagatggaccctacaaatgtaacttttgtgggaaagccttgatgtgtctcagtttgtatcttatccacaaacgaactcacactggagagaaaccatatgaatgtaaacagtgtggtaaagcctttagtcattctggtagccttcgaatacatgaaagaactcacactggagagaagccttatgaatgcagtgagtgtgggaaagcattccatagttccacatgcctccatgcacataaaataactcacactggggagaagccgtatgaatgtaaacagtgtgggaaagcctttgtttctttcaattccgttcgatatcatgaaagaactcacactggagagaagccctatgaatgtaagcaatgtgggaaagccttcagatctgcctcgcaccttcgaacacatggaaggactcacactggagagaaaccctatgaatgtaaacaatgtggtaaagcctttggatgtgcctcgagcgttaaaatccatgaaaggactcacactggagaaaaaccctgtagctccaacacttcgaaaggccaaggcgagaagattgcttaa

SEQ ID NO: 14460 - DNA, 455 bp, Homo sapiens; identical to SEQ ID NO: 14095
  SIMILAR (121)..(393): 1001254mologous to Homo sapiens cytokeratin 18 (424 AA),accession number X12883,Smith-Waterman Score=447.

SEQ ID NO: 14461 - DNA, 1044 bp, Homo sapiens; identical to SEQ ID NO: 14096
  SIMILAR (1159)..(2127): 701254mologous to Homo sapiens putative p150,accession number U93572,Smith-Waterman Score=1068.

SEQ ID NO: 14462 - DNA, 1212 bp, Homo sapiens
  SIMILAR (1)..(606): 871254mologous to Homo sapiens cytokeratin 18 (424 AA),accession number X12883,Smith-Waterman Score=840.
gggcctggcaccgggatagccgggggtctggcaggaatgggaggcatccagaacgagaaggagaccatgcaaagcctgaacgaccgcctggcctcttacctggacagagtgaggagcctggagaccgagaaccggaggctggagagcaaaatccgggagcacttggagaagaagggaccccaagtcagagactggagccattacttcaagatcatcgaggacctgagggctcagatcttcgcaaatactgtggacaatgcccgcatcgttctgcagattgacaatgcccgtcttgctgctgatgactttagagtcaagtatgagacagagctggccatgcgccagtctgtggagaacgacatccatgggctccgcaaggtcattgatgacaccaatatcacacgactgcagctggagacagagatcgaggctctcaagtaggagctgctcttcatgaagaagacccccgaagaggaagtaaaaggcctacaagcccagattgccagctctgggtttgaccgtggaggtaagatgcccccaaatctcaggacctcgccaagatcatggcagacatccggggcccaatatgacgagctggctcggaaagaaccgagaggagctagacaagtactggtctcagcagattgaggagagcaccacagtggtcaccacacagtctgctgaggttggagctgctgagacgcacgctcacagagctgagacgtacagtccaggtctttggagattcgacctggacttccatgagaaatctgaaggccaagcttggagaacagccttgagggaggtggaggcccgctacgcccttacagatggagcagctccaacgggatcctgctgcaccttgagtcacagctgggacagacaccgcgcacagaggcacagcgccaggcccaggaagtatgaggccctgcttgaacatcaaggtcaagcttggaagctgagatctgccaccttacccggccgccttcttggaagattggcgaggactttaatctttggtgattcctttggacgaacgcaactccatgcaaaccatccaaaagaccaccacccgccggataagttggattgggcaaagtggtgtcttgagaccaattgacaccaaagttcttgaggcattaagccagcaagaagccagtggtacccttttggggaagcaggaggccaataaaaagtttcagagtttcaaaa

SEQ ID NO: 14463 - DNA, 2385 bp, Homo sapiens; identical to SEQ ID NO: 860
  SIMILAR (574)..(1962): 951254mologous to Homo sapiens putative p150,accession number U93563,Smith-Waterman Score=2340.

SEQ ID NO: 14464 - DNA, 340 bp, Homo sapiens
  SIMILAR (172)..(339): 1001254mologous to Homo sapiens Human secreted protein, SEQ ID NO: 5876,accession number G01795,Smith-Waterman Score=276.
atgcctgagcctcccaccctctccgtgggctcctgtgcggcccgagcctctccgacgagcgccgccccctgctccacggcgctcagtccgatcaaccacccaagggctgaggagtgcgggcgcacgcgcaggactggcaggcagctccacctgcagccctggaaaaagaaaatgagtgagactcaaaattcaacaagccagaaagcaatggatgaggataacaaagccgcaagccaaacaatgccgaatacacaagacaagaactacgaggatgaattgactcaagtagctctagctctggttgaggatgtcatcaattatgctgttaagattgtggaag

SEQ ID NO: 14465 - DNA, 732 bp, Homo sapiens
  SIMILAR (2083)..(3291): 931254mologous to Homo sapiens putative p150,accession number U93574,Smith-Waterman Score=1983.
atgattataaaatttgccaatatagaggtcattgatgacatgacaaaagtacaattagtggagaagaagaggaaatataaaaccacagatagaggtaaagaaagaatcttccttattttgtacaatggcaaccacccttacagcacacagctgtcaataagaacttcacgcatgtttgtgcaagctggtgttgatgctaggacatctacaactttcaagggaggtgtggagggagaggcacgagcaggaaccggggctgtgtgcagcacttgggggccagctggagttacgggtgggcgtgggcttggtgggccccacactcggagcagctggccagccctgctggccccgggcaatgagggacttagcacccgggccagtggctgcagagggtgtactgggtcccccagcagtgccagcccaccggcgctgcgctcgatttcgcaccgagccttagctgccttcctgcagggcagggctcgggacctgcagcccaccatgcctgagcctcccacccactccatgggctcctgtgcggcccgagcctccccaacgaccaccacccgctgctccacggcgcccagtcccatcgaccacccaagggctgaggaatgcgagtgcacggcgcaggactggcaggcagctctacctgcagtcccggtgcaggatccactaggtgaagccagctgggctcctgagtctggtggggacgtggagagtctttatgtctag

SEQ ID NO: 14466 - DNA, 804 bp, Homo sapiens
  SIMILAR (702)..(403): 631254mologous to Homo sapiens PRO1722,accession number AF119851,Smith-Waterman Score=294.
ctagacataaaggttctccacctccccaccagactcaggagcccagctggcttcacccagtggatcctgcaccagggctgcaggtggagctgcctgccagtcctgcaccgtgtgcccatactcctcagcccttgggtggttgatgggactgggcgccgtggagcagggggcggtgctcgttggggaggctcgggccacacaggagcccacggagggctggagaggctcaggcatggcgggctgcaggtcccaagccctgcccatgtccacctcggagatgctgtccaggctctccacctgtacgtccacgcccgccgggatggcagggcctcctgagtgtgtgacctgggtgaggccattcactgagatagagcactgagaaaaagcaatgaggaaaggatatagtaacaggaagcagctggcatgctccaaggggtcattgaagagagcctgagcctggaaaagagctgtagctcttggaaaaagccgcccgatgggagctgtggccttcaaaagaaggatgcagcccgtagctgggccaagagcgatgcaggagaagccattcccctcatcctcctcctccctttcgatacctcctgccttctgataccgactggcactttcattggcagaaccaagcaggaggtggagggcaaggactggggctctcatgcagttgtagtcagatggtggcagctgatgggtgttttcatgcttgtgaaaacactcgaaggtgttttcatgcttgtgtctggtgcctgggctgaagaccccaaagctggggctcctcaggcatcctggcat

SEQ ID NO: 14467 - DNA, 457 bp, Homo sapiens; identical to SEQ ID NO: 6419
  SIMILAR (134)..(475): 951254mologous to Homo sapiens FKSG67,accession number AF338195,Smith-Waterman Score=587.

SEQ ID NO: 14468 - DNA, 390 bp, Homo sapiens; identical to SEQ ID NO: 6198
  SIMILAR (347)..(3): 951254mologous to Homo sapiens FKSG65,accession number AF338193,Smith-Waterman Score=594.

SEQ ID NO: 14469 - DNA, 1029 bp, Homo sapiens; identical to SEQ ID NO: 9702
  SIMILAR (280)..(182): 841254mologous to Homo sapiens PRO2550,accession number AF130089,Smith-Waterman Score=159.

SEQ ID NO: 14470 - DNA, 654 bp, Homo sapiens; identical to SEQ ID NO: 14324
  SIMILAR (809)..(871): 801254mologous to Homo sapiens Human secreted protein, SEQ ID NO: 7115,accession number G03034,Smith-Waterman Score=90.

SEQ ID NO: 14471 - DNA, 964 bp, Homo sapiens; identical to SEQ ID NO: 6423
  SIMILAR (942)..(454): 511254mologous to Fowlpox virus gag,accession number AF006065,Smith-Waterman Score=450.

SEQ ID NO: 14472 - DNA, 838 bp, Homo sapiens; identical to SEQ ID NO: 6424
  SIMILAR (314)..(814): 301254mologous to Haliotis rufescens lustrin A,accession number AF023459,Smith-Waterman Score=109.

SEQ ID NO: 14473 - DNA, 801 bp, Homo sapiens
  SIMILAR (801)..(634): 1001254mologous to Homo sapiens Neuron-associated protein,accession number B01398,Smith-Waterman Score=298.
ttaattgttgtgcagtttcatagatgggtcaggaggtggacaagttggggccagagatgatggcagtccagcagcaactccctgtgctcccttctctttgggcagagattctatttttgacatttgcacaagacaggtagggaaaggggacttgtggtagtggaccataccttgagctagatacagagtgccgattggtgtatttacaatccctgagctagacataaaggttctccaaggccccaccagagcagctagatacagagtgtcgattggtgcattcacaaaccttgagaaaccttgagctaaacacagggtgctgattggtatatttacaatccctgagctagatatactctccacattcccactagactcgggagcccagctggcttcacccagtggatcccacaccggggctgcaggtggagctgcctgccagtcccgcgccgtgcgctcgcattcctcagcccttgggttgtttgttccttcccggtcgatgggactgggcgccgtggagcagggggtggtgctcgtcggggaggctcgggccgcacaggtgcccatggagtgggtgggaggctcaggcatggcgggctgcaggtcccgagccctgccccgcgggaaggcagcagtaaggtcagagggcactaggtacttcctcttgtccagatcaggcaccctggcttttggagccttctctacaatcacggggaccctgtccggatatttcttccggatcttttctccttcctttttccgatactcaaagggatggtcctccttgtactggaacttcat

SEQ ID NO: 14474 - DNA, 732 bp, Homo sapiens
  SIMILAR (1232)..(1336): 881254mologous to Homo sapiens FKSG61,accession number AF338190,Smith-Waterman Score=171.
atgatgaatgaggggtctggtatctccttgtctggatgtgatctgggtacagccctgcagctgctttcacaggctattgttgagtgcctgaagcttttccagatgctcaatagatctaccattctgggatctggaggacaacagccctcttctcacagctctaccaagctgcgccccgactcaggagcccagctggcttcacctagtggatcctgcactggggctgcaggtggagctgcctgccagtcccgcaccgtgtgctcgcactcctcagcccttgggtggtcgatgggactgggagccgtggagcagggggtggtgctcgttggggaggctcaggccgcacaggagcccatggagggggtgggaggctcaggcatggcgggctgcaggtcccgagccctgccccacgggaaggcagctaaggcccggcgagcaatcgagcacagcaccggtgggctggcactgctgggggacccagtacactctccgcagccactggcccgggtgctaagtccctcattgcccagggccagcagggctggctggctgctccgagtgcggggcccgccaagcccacgcccacccggaactccagctggccggcaagcgccgcacgcagccccggttcccgctcgtgcctctccctccacacctccctgcgagctgagagagtgggctccagccctggccagcccagaaaggggctcccacagtgcagtggggggctga

SEQ ID NO: 14475 - DNA, 537 bp, Homo sapiens
  SIMILAR (516)..(397): 771254mologous to Homo sapiens Human secreted protein, SEQ ID NO: 6395,accession number G02314,Smith-Waterman Score=144.
ctaggcagtcttttttttacaaatattccagctggttgtcagctcttccttgatcatgtcatcattactgccgtattcatcggcgctgcgctcgatttctcgccgggccttagctgccttcccgtggggcaaggctcgggacctgcagcccgccatgcgtgagcctcccacccgctccgtgggctcctgtgcggcccgagcctcctcgacgagcgccaccccctgctccacagcgcccagtcccatcgaccacccaagggctgaggagtgcgggcgcacggcgcgggactggcaggcaactccacctgcagctgcgagggtccgcggcttcattcttgaagtcagtgagaccaagaacccaccaattccggacacattagcatctgcattccagaagacctcagcctggacttcattgtccatatcactatcagcattttggtcaaaaccgttcaacaagtctctcagaagttccagactttcccatatcttcctttcatcttctgagatctccaaattgtcccaacgtctgtccat

SEQ ID NO: 14476 - DNA, 981 bp, Homo sapiens
  SIMILAR (575)..(423): 681254mologous to Homo sapiens Human secreted protein, SEQ ID NO: 7678,accession number G03597,Smith-Waterman Score=150.
atgagtgaagcccccagattcttcgttggaccagaagatacagaaataaatcctggaaattatcgacatttcttccaccatgcagatgaagacgatgaggaggaagatgattctccaccagaaaggcagattgtggttggaatatgttccatggcaaagaaatccaaatccaaaccaatgaaggaaattcttgaacggatctccttatttaaatatatcacagtagtagtatttgaagaggaggttattttgaatgaaccagtggaaaactggcctttatgtgattgtcttatttctttccattctaaaggatttccactggacaaagcggttgcctatgcaaaactcaggaatccatttgtaatcaatgacttgaatatgcagtatctcatacaagataggagagaagtatatagtattcttcaagctgaaggtattttacttcctcgttatgctattttgaaccgtgacccaaataatcccaaaggagtgaagctgcagaccttcgcggtgagtgttacagctcttaaggtagcgcgtctggagttgttcgttcctcccggtgggctcttggtcttgctgggctcaggtgtgaagctgcagatcttcgcgggctgcaggtggagctgcctgccagtcacgcgccgtgtgctcgcactcctcagcccttgggtggtcgatgggactgggcgccgtggagcagggggtggtgctcgttggggaggctcgggccgcacaggagcccatggagtgggtgggaggctcaggcatagcaggctgcaggtcccgagccctgccctcctcttcaaatactactactgtgatatatttaaataaggagatccgttcaagaatttccttcattggtttggatttggatttctttgccatggaacatattccaaccacaatctgcctttctggtggtccagtctgccaccctgtgaagaaggtgcctgcttctcctttaccttctgccat

SEQ ID NO: 14477 - DNA, 1774 bp, Homo sapiens; identical to SEQ ID NO: 6788
  SIMILAR (202)..(588): 641254mologous to Homo sapiens FKSG63,accession number AF338192,Smith-Waterman Score=354.

SEQ ID NO: 14478 - DNA, 390 bp, Homo sapiens
  SIMILAR (102)..(269): 461254mologous to Mus musculus homeobox-containing transcription factor,accession number Y11717,Smith-Waterman Score= 103.
ctgcatgacttgcagcttagcaagcctctgagcgatgacacagctttgaccgacgggggccgccactgcctgcccgttggtgggcacagccaggaagactccagcgctgcgctcgatttctcgccgggccttagctgccttcccgcggggcagggctcgggacctgcagcccgccatgcctgagcctcccaccccctccgtgggctcctgtgcggcccaagcctccccgacgagcgccgccccctgctcgatggcgcccagtcccatcgaccacccaagggcttggcctgtgctgtgtagcttctgcatgcttctatcactgtttgtagcctccatcagcagctgcagccagcaccagccaatgcaggtcgggaccatggtctgcctcat

SEQ ID NO: 14479 - DNA, 807 bp, Homo sapiens
  SIMILAR (692)..(189): 351254mologous to Haliotis rufescens lustrin A,accession number AF023459,Smith-Waterman Score=105.
tcatggaagcagcccgatttcatgggatgggaaatggactctgtgtcttcctgcaaggagcagcaggggatgtgatggagacagctttgcaatcacggccctgacagccttgtcacctcctaacctgaagcccacggtggcttctgcgtggggaggtcctgtgaagcctgcactcaaagctctgttggtggctacagcagctctgggtaacagacacctgtcccaggtgcagtgtccaagactgcagacagagatgggcttctgccggtaaccagagctaaagactgctagtggatcccgcaccggggctgcaggtggagctgcctgccaatcccgtgccgtgcgctcgcattcctcagcccttgggtggtcgatgggactaggcaccgtggagcagggggtggtgctcttcggggaggctcgggctgcacaggagcccatggagtgggtgggaggctcaggcatggcgggctgcaggtcccgagccccgccccgcaggaaggcagctgggagcaatgagttgtaaggtggaaactggaacctgagattctgagcagaggcacagattcggagagagttggggacatccctgggcaggggcacagccgacaggacccgtgctgtctgggattctgaacgtcctgagctccttctccgtcctggccctgcccaggcccacaggctggcctcgcccttgctctgcagcaagcccatccaggtgccctgctcagagccaccagcattaatagctgatggtttaataccctcaggagccagcgcactcaagcagcaatcagaaggccccat

SEQ ID NO: 14480 - DNA, 376 bp, Homo sapiens
  SIMILAR (341)..(156): 391254mologous to Human herpesvirus 6 DR4,accession number X83413,Smith-Waterman Score=79.
tctgcctgcctggccggccgccccattcggggggagggcaggcctcgggacctgcagcccgccatgcctgagcctcccaccccctccatgggctcctgtgctgcccgagcctccccaacgagcgccaccccctgctccacggcacccagtcccatccaccactcaagggctgaggagtgcgggcacacagcactgggactggcaggcagctccacctgcagccccggaaccttccgcaaactattaactggcgaactacttactctagcttcccggcaacacttaatagactggatggaggcggataaagttgcaggaccacttctgcgctcggcccttccggctggctggtttattgctgataaatctggagccg

SEQ ID NO: 14481 - DNA, 843 bp, Homo sapiens
  SIMILAR (259)..(360): 731254mologous to Homo sapiens homologue of yeast PMS1,accession number D38436,Smith-Waterman Score=125.
atgctggctctccctggggccttgtggcttgcatgcttcgatgaagaacactgccacactgaagaggcacatttcaaggaactgagagtgggcaacaactcaggagcccagctggcttcacctagtggatcccgcaccggggctgcaggtggagctgcctgccagtcccgtgccgtgcgcttgcactcctcagcccttgggtggtcgatgggactgggcgccgtggagcagggggtggtgctcgtcagggaggctggggcagcacaggagcccatggagtgggtaggaggctcaggcatggcgggctgcaggtcccgagccctgccccgcgggaaagcagctaaggtccggcgagaaatcgatcacagcgccggaggagcgactcaagccttcgcgaaagaaaataaccaaaaagcatacaaagaaacgtacggcgtctctcatattacacgccatgatatgctgcagatccctaaacagcagcaaaacgaaaaataccaagtgcctcaattcgatcaatcaacgattaaaaatattgagtctgcaaaaggacttgatgtgtgggacagctggccgctgcaaaacgctgacggaacagtagctgaatacaacggctatcacgttgtgtttgctcttgcgggaagcccgaaagacgctgatgacacatcaatctacatgttttatcaaaaggtcggcgacaactcaatcgacagctggaaaaacgcgggccgtgtctttaaagacagcgataattccaagtttttctaccctgagcctttggtttgtgttcctgaatttctgagcaagtctcagttatttagaaggtgtttttgccaaggctga

SEQ ID NO: 14482 - DNA, 1449 bp, Homo sapiens; identical to SEQ ID NO: 8566
  SIMILAR (679)..(1110): 451254mologous to Xenopus laevis p33 ringo,accession number AJ249978,Smith-Waterman Score=260.

SEQ ID NO: 14483 - DNA, 626 bp, Homo sapiens; identical to SEQ ID NO: 8567
  SIMILAR (233)..(3): 461254mologous to Mus musculus human homolog is GPI-anchored protein,accession number X89571,Smith-Waterman Score=170.

SEQ ID NO: 14484 - DNA, 972 bp, Homo sapiens
  SIMILAR (245)..(367): 481254mologous to Homo sapiens Human secreted protein encoded by gene No. 3,accession number Y38388,Smith-Waterman Score=83.
atgcaacaagcacttctgaataaatggagttcagctgctcatttaactgctctcattaccttgacatggttggcagcatttattaagtgcccacctctatgcgcgacagtgctagaagctaagcaaatggaatggaactacctttggggaagaagcacaggttcctaccataagggtactgcttcccttttggagcacagagtgggcccttttaaaggggggacctatgggagagggaagggagcagctgccttcccacggggcagggctcgggacctgcagcctgccatgcctgagcctcccacccactccatgggctcctgtgcagcccgagcctccccgacgagcaccaccccctgctccatggcgcccagtcccattgaccacccaagggctgaggaatgcgagcacagggtgcaggactggcaggcagctccacctgcagccccactcaaggtttgtaaatacaccaatcagcaccctgtgtttagcacaaggtttgtgaatgcaccaatcgacactctgtatctagctgctctggtgaggacgtggagaacctttatgtctagctcaaggattgtaaatacaccaatcggcactctgtatctagctcaaggcctctctgcccatcaagagatgggacttatgtcttcccctttgaatctaggctgggcctgtgactggttggaccaagatgaagcagaggaattgctgttctgggattttggagcccaggccttagaatgtgacagcttctccttccctcatctcagagcctttggccagatgcccaagcccaccaggttaggagttgtacttcgtgagtattggaaacggcttccctcctgtaaagtggccattccactgcattttcgctgctcggtaattgctgcaggaacaacaatcgatgaggaacgaggagaccaagataagagaaaacaatcccttatacaggggaagatcctagtataa

SEQ ID NO: 14485 - DNA, 363 bp, Homo sapiens; identical to SEQ ID NO: 6199
  SIMILAR (239)..(9): 291254mologous to Homo sapiens Human secreted protein sequence SEQ ID NO:240,accession number Y87201,Smith-Waterman Score =88.

SEQ ID NO: 14486 - DNA, 630 bp, Homo sapiens
  SIMILAR (12)..(311): 361254mologous to Drosophila melanogaster la costa,accession number AF017777,Smith-Waterman Score=105.
tcagcttgcggggaggtgtggagggagaggcgcgagcgggaaccggggctgcgtgcggcgcttgcgggccagctggagttccgggtgggcgtgggcttggcggccccacactcggagcagccggccggcccgggccttagctgccttcccgccgggcagggctcgggacctgcagcccgccatgcctgagcctcccacccgcttcacgggctcctgtgcggcccgagcctctccgatgagcgccgccccctgctccacggcgcccagtcccatcgaccacccaagggcaatcagcgccgtcaaaacagaccattcagctctaccaatcagcaggatgtgggtggggccggataagagaataaaagcaggctgcggagccagcagtggcaacccgctggggtccccttccacagtgtggaagctttgttctttcattctttgcaataaatcttgctgctgctcactctttgggtccacgctgcttttatgagctgtaacactcaccgcgaaggtctgcagcttctctccagaaggaagaaactccgaacacatccgaatatcagaaggaacagactccagacgcgccaccttaagagctttaacactcaccgcgagggtccgcggcttcat

SEQ ID NO: 14487 - DNA, 961 bp, Homo sapiens
  SIMILAR (394)..(987): 951254mologous to Cloning vector pZC320 SopA,accession number U26464,Smith-Waterman Score=974.
tcagcttgcagggaggtgtggagggagaggtgccagcaggaaccagggctgtgcgccgcgcttgcgggccagctggagttccgggtaggcgtgggcttggcgggccccacactcggagcaaccggctggccctgccggcctgggcagtgagtggcttagcacccgggccagtggctgcagagggtgtactgggtcccccagcagtgccagcccactggcgctgtgctcgatttctcgcccggccttagctgccttcccgtggggcacggctcgggacctgcagcctgtcatgcctgagcctcccacccactccatgggctcctgtgcggcccgagcctcccccatgagcgccgccccctgctccacggcgcccagtcccatcgaccagccaagggctgaggagtgcgtgcacacggcgtgggactggcaggcagctccacctgcagcccccatgcaggatccagtgggtgaagccagctgggctcctgagtctggcagccactcccagagtccctggaactctggcccaaggctctctgactccttcccagatcttcttggcttagcggctgaagactgacgctgcccgatcgcctcggaagcccccctgacacccatcaggctcagcaaattacctgggctctactgccgcaaggcttcgcggacagcccccattacttcagtcaagctcaaatttcttcctcatctattacctatctcggcataattcttcatgaaaacacccgtgctctccctgctgaccatgtctgactaatctcccaaaccccaatctcttctacaaaacaacaactcctttccttcctaggcatggttaggtacttctgcctttggatacctagttttaccatcctgactaaaccattatattaattcacaaaagcaaacctagctgaccccacagatcctaaatcctttccccactcctctttccgttccttga

SEQ ID NO: 14488 - DNA, 1513 bp, Homo sapiens; identical to SEQ ID NO: 8569
  SIMILAR (381)..(136): 981254mologous to Homo sapiens cell recognition molecule Caspr2,accession number AF193613,Smith-Waterman Score=432.

SEQ ID NO: 14489 - DNA, 1305 bp, Homo sapiens
  SIMILAR (1127)..(966): 381254mologous to Myxococcus xanthus response regulator FrzZ,accession number AF049107,Smith-Waterman Score=99.
tcagattggctggaaagtcctcaaggcatacttggctctaatttcagattcacctggctctttccacgggagatggcagccggcgaacccaaacagagccgtggttttccaaggcacttggtgtttctgctgcagcgaagcctcagactcctggctggctgcctttcttgggtctgggctgtttcctggctcgctgatctctttggatcccagaggctcctggtgcagacttgctgcctgacctttctcagatttgctgagggccagaagatgaggcccctgacacctggctgctgctacagtctgaatgtttgtgtccctccactcctcaaattcatgtttagaaatcctaacgcccaaggtgatggcattgggaggtggggcgagggctgttgtcacatttgtgtttgctcctgcagcattttcctctcttccattcaaagaatgactccaatctttgagattccttatctcaggggagattgggaactgggttgggttgagatagagaagctgatggctggggaacagcaaaggagccttcaatcctggaatcccaaaatagtcctgtttcttgacctcaaagattttagagaaaacctctcctcccatgggctctgggtagagcacttgtcttcctctgtgctccatattatgcacatcaaaaatcttcccggtactattaatgcttacccccactggtgtgccagactgagggcatctgtggcgacttcctgtctcgtggactgtgcttgcagggagcacgaaggagaggaaacaagcatttgctaattccttgcaatgtgttaggcacttgagaaaaggctcacagttgatcagaggagacagacaggtgaaagggttattacaatgcagcatgacaaacatcttaacagactcaggagcccagctggcttcacctagtggatcccgcactggggctgcaggtggagctgcctgccagtcccgtgccatgcgctcgcattcctcagcccttgggtggttgatgggactgggcaccgtggagcagggggtggtgctcgtcagggaggctcggaccgcacaggagcccatggagtgggtgggaggctcaggcatggcgggctgcaggtcccgagccctgccccgcgggaaggcagctaaggcccggccaacaccctttggtcacatgaataaaagtcaagccctttctttgctcattgctcagcctctgggtattaatctgctgagctggtggccacctaaatacaatcgtcctgttcccctcattggtctctccggtctcctgattccagccacattttg

SEQ ID NO: 14490 - DNA, 910 bp, Homo sapiens
  SIMILAR (423)..(292): 651254mologous to Homo sapiens Human secreted protein, SEQ ID NO: 7678,accession number G03597,Smith-Waterman Score=141.
aggaggcttggaagagagtcaggactttagccacttcctgggagtaaaagagcctcctccacttatgtcagtagaacccacatggagaccattaagaagccttcctgtacctctcggccaggtatcagtggaccctgagtggggagctggaactcctacccccactcaacagcccccttcaggtatgaaaggaggccaagggtgtaacctggactttcactactgtgtccggaattggtgggttcttggtctcactgacttcaagaatgaagccgcggaccctggccgagtgaagctgcagacctttgcagtgagtgttacagctcttaaggcagagcgtctggagttgttcattcctcccggtgggctcgtgatatcgctgggctcaggagtgaagctgcagaccttcacagtgagtgttacagctcttaaggcagagcatctggagtcgttccttactcccggtgggctcgtgatctcgctgggctcaggagtgaagctgctgcagatcttcgaggtgactgttatagctcataaaagcaacgtggacccaaaaaactcaggagcccagctggcttcacctagtggatcccgcaccagggctgcaggtggagcggcctgccagtcccacgccgtgtgctcgcactcctcagcccttgggtggtcaatgggactgggcgccctgcagcagggggcggtgctcgttggggaggctcgggccgcacaggagcccatggagtgggtgggaggctcaggcatggcgggctgcaggtcccgagccctgccccgcgggaaggtagctaaggcacgctactcatttggtagtttttgttcaccacattgtgaagaagggaatggaaaaattacagaatatcagaatatgtcaaacaagttctcaggttctgagcca

SEQ ID NO: 14491 - DNA, 861 bp, Homo sapiens; identical to SEQ ID NO: 11883
  SIMILAR (635)..(769): 681254mologous to Homo sapiens Human secreted protein, SEQ ID NO: 7141,accession number G03060,Smith-Waterman Score=140.

SEQ ID NO: 14492 - DNA, 1635 bp, Homo sapiens; identical to SEQ ID NO: 6432
  SIMILAR (2629)..(1979): 991254mologous to Cloning vector pBACe3.6 levansucrase,accession number U80929,Smith-Waterman Score=1149.

SEQ ID NO: 14493 - DNA, 2234 bp, Homo sapiens; identical to SEQ ID NO: 3179
  SIMILAR (852)..(1361): 451254mologous to Felis silvestris polyprotein,accession number X51929,Smith-Waterman Score=350.

SEQ ID NO: 14494 - DNA, 3325 bp, Homo sapiens
  SIMILAR (3446)..(4165): 921254mologous to Cloning vector pZC320 SopB,accession number U26464,Smith-Waterman Score=1080.
tcagggacagtcccgcccacatttgtgaggacagtcattcaggcacaaggggctcgtacagtcattcagcaatcgttgattgggagcctctatatattcagacactgtgttaggtgccaggggattgagtctgtctttgtcatcattatttggagcagagtagggtatgatgagaaaggcttctgcctcttcacatctgtcttgggagtttgggggcatgtgagaaccaaaccatgtctcctgattacctggagaaccctgaagtctagaagtggcctggagtagcctgccggcttcagctctagcccaggtaccagcccccaaatcataagaaagcaaaagcgcggggtccctcaacaccccgtctgcgatctgccgggacgcttccggccgcgggctggcacgcccttggctgcgcaaatccaagtgcctggcctgccaccttgtggacaccaggagtaaaaccgccggtgggctggctccagtgccctctgcccaccttatctctgtgcgcgagcgggaaccggggctgtgtgccgtgcttgtgagccagctggagttccgggtgggcgtgggcttggtgggccccacactcggagcacgccgcgagccctgctggccccaggcaatgggggacttagcacccgagccagtggcggcactgcgcttgatttctcgccgggccttacctgccttcccatggggcagggctcgggacctgcagcccgccatgcctgagcctcccacccactccatgggctcctgtgcggcccgagcctccccgatgagcaccaccccctgctccacggcacccagtcccatcgaccacccaagggctgaggaatgtgagcgcacggcgcaggactggcaggcagctccacctgcagccccggtgtgggatccactaggtgaagccagctgggctcctgagtctggaactaacatttccattacacctggaaatgccacatttgtgacccgggtgcagggacaggcttggtttgcctcatgtatcactggtcatgatatgtctagtttaaaaacttccagtgtcgtggtattaaggagacaatctgaggcacttctaccagccaatttgacatgcaattggcaagattcttctgcccttgccaccttagaaagtgccctgtcccaggtcagacacaaaagattcacatttacacttatggtctttacaggctcagccatagtcattatggcaactgttagcattgctgttgtatctattactgaatcagtacaaacaactgcttttgtagataatctggccaaaaatatatgtgatgaacttctcctacaggacatggatgaagctggaaaccaacattctcagcaaaataacacaagaacagaaaaccaaacaccacatgttctcactcataagtgggagttgaacaatgagaacatacggatacagggaggggaacattacatactggggcctgttggtggcaggttgccaacatccaaactcgctgttgattgccagctcctgctccttgcagcagcccagcatgctctctgctggtgccaaaatacccttccaccaaaccccgctaacttctggaactgtcctagagggtttcctaccctagcaagtgagcttgcctatgtcagccctaaccttgctcttgtcattcagctgagccagaggaaaaaatttgagctattctggggtggtctacagagaaccatcttctttcccttcagtgttctcagaatattgactgttgatgaacaagccaatgatgtgagtgtggctgcagcaaggacccttcaaattttcagagatgacatgattgtatatctagaaaaccccattgtctcagcccaaaatctccttaagctgataagcaacttcagcaaaatctcaggatacaaaatcaatgtacaaaaatcacaagcattcttatacaccaacaacagacaaacagagagccaaatcatgagtgaactcccattcacaactgcttcaaagagaataaaatacctaggaatccaacttacaagggatgtgaaggacctcttcaaggagaactacaaatcactgctcaaggaaataaaagaggatacaaacaaatggaagaacattccatgctcatgggtaggaaaaatcaatatcgtgaaaatggccatactgcccaaggtaatttacagattcagtgccatccccatcaagctaccaatgactttcttcacagaattggaaaaaactactttaaagttcatatggaaccaaaaaagagcccacactgccaagtcaatcctaagtcaaaagaacaaagctggaggcatcacactacctgacttcaaactatactacaaggctacagtaaccaaaacagcatggtactggtaccaaaacagagatatagatcaatggaacagaacagagccctcagaaataacgctgcttatctacaactatctgatctttgacaaacctgagaaaaacaagcaaatccagaaagccttcatcctccatcaaggaaccttgggtaatgtggaacatgggaaccaatgtcagatgaaattgatgtatgaacataatcttcagagaacagcctgcaatatgacctatggatcatttggtggtgtaaaaggtagaggagcctcttcctgtgggcaccactaccactggcccacagaagtgttctggcaggccactgaccatgttcacttaaagtccaaggtctcttcagacagctgtggtaaatgctgccaggcctgggactcacccttcagggcagtgggctcccatctggcccagggcaggtccagaaatagtgtccaagagcctaagcctggacttggagaccccaggagcctgcttgttgctctacctcagtgtggccaagctgtggctaaggtggtatccaggatgcaagacaaagttctctttactcctcgttctcttctccttaagcagaggatggagtcactttcattgctccggccagccctgctggccctgggcaatgaggggcttagcacccaggccagcagctgcggagggtatactgggtcccccagcagtgccagaccactggcgctgcgctcaatttctcaccgggccttagctgccttcccgtggggcagggctcgcgacctgcagcccgccatgcctgagcctcccaccccctccgtgggctcctgtgcggccgagcttccccgggctggggagtgcgggcacagggcgcgggactggcaggcagctccacctgcagccccagtgcagggtccactgggtgaagccagctgggctcctaagtctggtggggatgtggagaacctttatgtctag

SEQ ID NO: 14495 - DNA, 992 bp, Homo sapiens
  SIMILAR (69)..(1): 821254mologous to Homo sapiens Human secreted protein, SEQ ID NO: 7115,accession number G03034,Smith-Waterman Score=101.
tgggctggtggtctcgctggcttcaggagtgaagccgcagaccttcgcggtgagtgttacagttcttaaggcggcgcgtctggagttgttcattcctccccgtgggctcgtggtctctctggcttcaggagtgaagctgcagaccttcgcggtgagtgttacagctcataaaagcagcgtggacccaaagaactcaggagcccagctggcttcacctagtggatcctgcaccagggctgcaggggtagctgcctgccagtcccggtgccgtgcgctcgcattcctcagcccttgggtggtcgttgggactgggtgccgtggagcagggggtagtgctcgtcggggaggctcgggctgcacaggagcccatggagtggatgggaggctcaggcatggcgggctgcaggtcccgagccctgccccacggaaaggcagctaaggcccggcgagaaattgagcgcagcgccggtgggctggcgctgctgggggacccagtataccctctgcagctgctggcccgggtgctaagcccctcattgcccggggccggtggggcgggccagccggctgctccaagtgcagggcccgccaaacccacgcccacccggaactccagctggcccgcaagcgccgcacgcagccccggttcccgctcgcgcctctccctccacacatccctgcaagctgagggagccagctgtggccttggccagcacagaaaggggctcccacagtgcagcggtgggctgaagggctcctcaagtgccgccaaagtgggagcccaggcagaggaggcactgagagcgagcgagggctgtgaggactgccagcacgctgtcacctctcaactcagtctcccacatggcgtggccacccttgtgtctgttaaactctttctctacaaaaatgccatggtctttctttgtgcagtggtcaggaaaaaccccttgggcagatacaaaagttctttcaggcatctgtttccagaatag

SEQ ID NO: 14496 - DNA, 1193 bp, Homo sapiens
  SIMILAR (185)..(99): 891254mologous to Homo sapiens Human secreted protein, SEQ ID NO: 7141,accession number G03060,Smith-Waterman Score=135.
atgaagccagggaccctcgcggtgagtgttacagctcttaatgtggcgcatctggagtttgttccttctgatgttcggatgtgttcggagtttcttccttctggagtgaagctgcagaccttcacggtgagtgttacagctcttaaggcggcgcttctggagttgttggttcctcctggtgggctcgtggtctcgctggcttcaggagtgaagctgcagaccttcgcagtgagtgttacagctcataaaagcagtgtggaccccaagaactcaggagcccagctggcttcccccagtgaatcccgcacgagagctgcaggtggagctgcctgccagtcccgcgccgtgcgcccgcactcctcagctcttgggtggtcgatgggactgggcgccgtggagcagggggtggtgctcatcggggaggctcgggctagtggatcccgcaccagggctgcaggtggagctgcctgccagtcccacgccgtgcgctcgcattcctcagcccttgggtggtcgatgggactgggcgccatggagcagggggtggtgcttgtcggggaggctcgggccacacaggagcccttggagtgggtgggaggctcaggcatggcagactgcaggtcccgaaccctgccacgagggaaggcagctcttccgcagtagtccctgggcctagagggaggcaacttgtatggttttagcagcagagcattagtagtgaaacaaatccgatcccagtgggatgccaaatgacggagattcatatctctggccttcagaataccatgattttggtttccttggccccttttagtcaaggcaggagcacctgggatgcatggcaccaagtcccaggtgggccctgaacctggcccaggaaaccgttgtttcctcctaggcctctgggcctgtgatgggaggggatgctgcaaaggtctctgacatgccctggcgacattttccccattatcttggtgattagcatttggctccttgtaacttatgcaaatttcggcagctggctttaatttctccccagaaaatgggttttccctttctttattccagttcccaacaagttcctcatcttcatctgaggccacctcaacctgaactttattgtctataccactatcagcattttggtcaaagccattcaagaagtctctagaaagtgtcaaactttcccacat

SEQ ID NO: 14497 - DNA, 2095 bp, Homo sapiens
  SIMILAR (1332)..(1991): 841254mologous to Homo sapiens reverse transcriptase homolog= pol {retroviral element},accession number S61070,Smith-Waterman Score=928.
cagaggggctacacttcagcattacctggaatccacagtcaccagtgtttcttcagggttaggggagcattagcacatgccacagccaggcaacacagagcaagggctataaggcatggccatcagcgttggcagcagaaaggtagtaggaacaatcacacagtagcagcagttgagggagagaaggacattctgggaggtttcagcagctggcatcaccgcagtatgcctgataatttttcattgaaaggaggacacgatgtactgggtgaaagaggctgtggtaaatatactttaagtgacatagtggtaatgtgtgaggagaaagaagtgttctataattttcacgctttaaaaggattaaagcctgttatcactcgcctgctacagcatggccttttaaagcctataaactctccttacaattcccccattttacctgtcctagaaccagacaagccttacaggttagttcaggatctgcgccttatcaaccaaattgttttgcctatccaccccgtggtgccgaacccatacactctcctatcctcaatacctccctccacaacccattattctgttctggatctcaaacatgctttctttactattcctttgcacccttcatcccagcctgtcttcgctttcacttggactgaccctgacacccatcaggctcagcaaattacctgggctgtactgcctcaagtcttcacagacagcccccattacttcagtcaagcccaaatttcttcctcatctgttacctatctcagcgtaattctcataaaaacacacgtgctctccctgctgatcgtgtccgactgatctctcaaaccccagcaccttctacaaaacaacaactcctttccttcctaggcatggttagcgtggtcagaattcttacacaagagccaggaccgcaccctgtagcctttctgtccaaacaacttgaccttactgttttagcctagccctcatgtctgcgtgcagcggctgccactgctttaatacttttagaggccctaaaaatcacaaactatgctcaactcactctctacagttctcataacttccaaaatctattttcttcctcatacctaacgcatatactttctgctccccagctccttcagctgtactcactctttgttgagtctcccacaattaccattgttcctggcccggacttcaatctggcctcccacattattctggataccacacctgacccccatgactgtatctctatgatccacctgacattcaccccatttccccatatttccttctttcctgttcctcaccctgatcacgcttgatttattgatggcagttccaccaggcctaatcgccacacaccagcaaaggcaggctatgctatagtatcttccacatctatcattgaggctaccgctctgccccgctccactacctctcagcaagccgaactcattgccttaagtcaaaccctcactcttgcaaagggactacatgtcagtatttatactgactctatatatgccttccatatcctgcaccaccatactgttatatgggctgaaagaggtttcctcactacgcaagggtcctccatcattaatgcctctttaataaaaactcttctcaaggccactttacttccaaaggaagctggattcattcactgcaagggccatcaaaaggcgtcagatcccatcgctcagggcaacacttatgctgataaggtagctaaaaaagcagctagcattccaacttctgtccctcatggccagtttttctccttctcatcggtcactcccacctactcccccactgaaacttccacctatcaatctcttcccacacaaggcaaatggttcttagaccaaggaaaatatctccttccagcctcacaggcccattctattctgtcatcatttcatagcctcttccatgtaggttacaagccgctagcccacctcttagaacctctcatttcctttccatcatgaaaatctatcctcaaggaaatcacttctcagtgttccgtctgctattctactcctcctcagggattgttcaggccccctccaagtcctcccatttcattacc

SEQ ID NO: 14498 - DNA, 1365 bp, Homo sapiens
  SIMILAR (5232)..(5972): 1001254mologous to Escherichia coli Formate dehydrogenase, nitrate-inducible, major subunit (EC 1.2.1.2) (Formate dehydrogenase-N a subunit),accession number D90788,Smith-Waterman Score=1363.
atggatcccgggcagcagccgccgcctcaaccggccccccagggccaagggcagccgccttcgcagcccccgcaggggcagggcccgccgtccggacccgggcaaccggcacccgcggcgacccaggcggcgccgcaggcaccccccgccgggcatcagatcgtgcacgtccgcggggactcggagaccgacctggaggcgctcttcaacgccgtcatgaaccccaagacggccaacgtgccccagaccgtgcccatgaggctccggaagctgcccgactccttcttcaagccgccggagcccaaatcccactcccgacaggccagtactgatgcaggcactgcaggagccctgactccacagcatgttcgagctcattcctctccagcttctctgcagttgggagctgtttctcctgggacactgacccccactggagtagtctctggcccagcagctacacccacagctcagcatcttcgacagtcttcttttgagatacctgatgatgtacctctgccagcaggttgggagatggcaaagacatcttctggtcagagatacttcttaaatcacatcgatcagacaacaacatggcaggaccccaggaaggccatgctgtcccagatgaacgtcacagcccccaccagtccaccagtgcagcagaatatgatgaactcggcttcagccatgaaccagagaatcagtcagagtgctccagtgaaacagccaccacccctggctccccagagcccacagggaggcgtcatgggtggcagcaactccaaccagcagcaacagatgcgactgcagcaactgcagatggagaaggagaggctgcggctgaaacagcaagaactgcttcggcaggtgaggccacaggagttagccctgcgtagccagttaccaacactggagcaggatggtgggactcaaaatccagtgtcttctcccgggatgtctcaggaattgagaacaatgacgaccaatagctcagatcctttccttaacagtggcacctatcactctcgagatgagagtacagacagtggactaagcatgagcagctacagtgtccctcgaaccccagatgacttcctgaacagtgtggatgagatggatacaggtgatactatcaaccaaagcaccctgccctcacagcagaaccgtttcccagactaccttgaagccattcctgggacaaatgtggaccttggaacactggaaggagatggaatgaacatagaaggagaggagctgatgccaagtctgcaggaagctttgagttctgacatccttaatgacatggagtctgttttggctgccaccaagctagataaagaaagctttcttacatggttatag

SEQ ID NO: 14499 - DNA, 585 bp, Homo sapiens
  SIMILAR (4)..(381): 871254mologous to Homo sapiens YAP65 (Yes-associated protein of 65kDa MW),accession number X80507,Smith-Waterman Score=567.
atggccaacgtgcaccagaccatgcccatgaggctccggaagctgcccgactctttcaagccgcccgagcccaagtccaactcccaacgggtcagtactgaggcaggcaccgcaggagccctgactccacagcacgttcgagctcattcctctccagcttctctgcagttgggagctgtttctcctgggacactgacccccactggagtagtttctggcccagcagctacacccacagctcagcattttcaacagtcttcttttgagatacctgatgatgtacctctaccagcagctcgggagatggcgaagacatcttctggtcagagatacttcttaaatcacatcgatcagaaaacaacacagcaggacccccaggaagaccatgctgtctcagatgaatgttatagccaatccaccagtgcagcagaatatgatgaactcggcctcagagcccacaaggaggcgtcatggtggcagcaactccaaccagcagcgacagatgcgaccacagcaactgcagatggaggagaggctgcagctgaaacagcaataactgcttcagcaggagttagcactgcgtag

SEQ ID NO: 14500 - DNA, 1056 bp, Homo sapiens
  SIMILAR (936)..(541): 881254mologous to Cloning vector pSacBII SacB,accession number U09128,Smith-Waterman Score=628.
atgaaactcatggaaacacttaaccagtgcataaacgctggtcatgaaatgacgaaggctatcgccattgcacagtttaatgatgacagcccggaagcgaggaaaataacccggcgctggagaataggtgaagcagcggatttagttggggtttcttctcaggctatcagagatgccgagaaagcagggcgactaccgcacccggatatggaaattcgaggacgggttgagcaacgtgttggttatacaattgaacaaattaatcatatgcgtgatgtgtttggtacgcgattgcgacgtgctgaagacgtatttccaccggtgatcggggttgctgcccataaaggtggcgtttacaaaacctcagtttctgttcatcttgctcaggatctggctctgaaggggctacgtgttttgctcgtggaaggcaacaaagcaatctacaatctaaaatcaaattcccctcaaacacagattccaggtctacaggatataattcctttgacagacaacccaacatctgtttttataagcgccaagagactcctcacacggggccacacccagtccctgagggccgcccttatccaatgcctggttgatgtggggcatgaagtcctggcccctttgcctcaaggaactgaagtgaaaaaaattgaagctataaatgttccttgcacacagctttcaatgtcattttttcatcggttatatgatgaagatattgtacgagacagtggacatattgttaaatgtttagattctttttgtgatccatttctcatttctgatgagttacgaagagccagtactgatgcaggcactgcaggagccctgactccacagcatgttcgagctcattcctctccagcttctctgcagttgggagctgtttctcctgggacactgacccccactggagtagtctctggcccagcagctacacccacagctcagcatcttcgacagtcttcttttgaaatacctgatgatgtacctctgccaacaagttggggagaggcaaagacatcttctgggtcaaaaatacctttttaa

SEQ ID NO: 14501 - DNA, 1185 bp, Homo sapiens
  SIMILAR (556)..(1290): 931254mologous to unidentified cloning vector 29kD protein essential for the replication of mini F plasmid,accession number AB015619,Smith-Waterman Score=1206.
tttttttgagaacttgcttcaggctaaacttcagcataggaactttgcccaaaagttaataggttttccaaatactgcaaatgtagttagccccacttcggggatgtaacttgagtggaaagaagagttaccgcccccactcccattccctctcctatttgcagggcctgttgtatagtctcctgtcggagaccaaagggttttggaactcagaaaaaatcacttaacctgatgacaaaaacccgggttaaggaggaggaaagaaggaaaaacaatttagctgcttgcctaaacacttcaatttgtcttaggccagtactgatgcaggcactgcaggagccctgactccacagcatgttcgagctcattcctctccagcttctctgcagttgggagctgtttctcctgggacactgacccccactggagtagtctctggcccagcagctacacccacagctcagcatcttcgacagtcttcttttgagatacctgatgatgtacctctgccagcaggatgagagattgctaagttatcttctggtcaaagatacttcttaaatcacatcgatcaggacaacaacatggcaggaccccaggaaggccatgctgtcccagatgaacgtcacagcccccaccagtccaccagtgcagcagaatatgatgaactcggcttcaggtcctcttcctgatggatgggaacaagccatgactcaggatggagaaatttactatataaaccataagaacaagaccacctcttggctagacccaaggcttgaccctcgttttgccatgaaccagagaatcagtcagagtgctccagtgaaacagccaccacccctggctccccagagcccacagggaggcggggggggtggcagcaactccaaccagcagcaacagatgcgactgcagcaactgcagatggagaaggagaggctgcggctggtgtgggcagacttttttgggcaggcaatgcggaatatcaatcccagcacagcaaattctccaaaatgtcagcacgaattgacctcatttctccaactggctttgtgctttgaaaaactgaccaaaatgccacgcgtgtgtttgattagcacttcacaccttgtttacagtgcactagagaaactggctgttgttggcatccgtccagctgttcctgatgagttgccaggctga

SEQ ID NO: 14502 - DNA, 2142 bp, Homo sapiens; identical to SEQ ID NO: 4221
  SIMILAR (463)..(1380): 801254mologous to Homo sapiens p40,accession number U93569,Smith-Waterman Score=1259.

SEQ ID NO: 14503 - DNA, 1824 bp, Homo sapiens; identical to SEQ ID NO: 9101
  SIMILAR (2037)..(1687): 961254mologous to Escherichia coli Hypothetical protein 126: PIR:Q3ECTC,accession number D10483,Smith-Waterman Score=581.

SEQ ID NO: 14504 - DNA, 2025 bp, Homo sapiens; identical to SEQ ID NO: 5416
  SIMILAR (759)..(19): 961254mologous to Escherichia coli phenylalanyl-tRNA synthetase beta-subunit,accession number K02844,Smith-Waterman Score=1221.

SEQ ID NO: 14505 - DNA, 2121 bp, Homo sapiens; identical to SEQ ID NO: 10363
  SIMILAR (807)..(217): 981254mologous to Escherichia coli ORF_f252; was ORF_f87p and ORF_f234p before splice,accession number U28377,Smith-Waterman Score=1001.

SEQ ID NO: 14506 - DNA, 1929 bp, Homo sapiens; identical to SEQ ID NO: 8628
  SIMILAR (425)..(1693): 891254mologous to Homo sapiens putative p150,accession number U93570,Smith-Waterman Score=1930.

SEQ ID NO: 14507 - DNA, 2133 bp, Homo sapiens; identical to SEQ ID NO: 12493
  SIMILAR (67)..(576): 841254mologous to Homo sapiens 04-OCT-1995 Human ob cDNA,accession number T34164_cd1,Smith-Waterman Score=696.

SEQ ID NO: 14508 - DNA, 3021 bp, Homo sapiens; identical to SEQ ID NO: 6263

SEQ ID NO: 14509 - DNA, 3171 bp, Homo sapiens; identical to SEQ ID NO: 7867
  SIMILAR (442)..(1884): 911254mologous to Homo sapiens putative p150,accession number U93569,Smith-Waterman Score=2277.

SEQ ID NO: 14510 - DNA, 2703 bp, Homo sapiens
  SIMILAR (1957)..(5781): 971254mologous to Homo sapiens putative p150,accession number U93563,Smith-Waterman Score=6519.
atggagaaaaaacagagcagaaaaactggaaactctaaaaatcagagtgcctctcctcctccaaaggaatgcagctccttacaagcaacggaacacagctggatggagaatgactttgatgagttgagagaacagggcttcagaagatcaaactactccgagctaaaggaggaagttcgaacccatggcaaagaagttaaaaaccttgaaaaaagattagacgaatggctaactagaataaccaatgcagagaagtccttaaaggacctgatggagctgaaaaccatggcacgagaactacttgatgaatgcataaatctcagtagccaattcgatcaactggaagaaagagtatcagtgatggaaaatcaaatgaatgaaatgaaaccaaatctacgactgattggtgtacctgaaagcgatggagagaatggaaccaagttggaaaacactctgcaggatattatccaggagaacttccccaacctagcaaggcaggccaacattcagattcaggaaatacagagaatgtcacaaagatactcctcgagaagagcaattccaagacacataattgtcagattcaccaaagttgaaatgaaggaaaaaatgttaagggcagccagagagaaaggtcgggttaccctcaaagggaaacccatcagactaaaagctgatctctcagtagaaactctacaagccagaagagagtgggggccaatattcaacattcttaaagaaaagaattttcaacccagaacttcatatccaggcaaactaagcttcataagtgaaggagaaatgaaatcctttacagacaagcaaaagctgagatattttgtcaccaccaggcctgccctaaaagagctcctgaaggaagccctaaacatggaaaggaacaaccgctaccagccactggaaaaacaaatacaaactaccatcagagaatactataaacacctctacgcaaatgaactagaaaatctagaagaaatggataaattcttcgacacatacaccctcccaagactaaaccaggaagaagttgaatctctgaatagaccaataacaggctttgaaattgaggcaataattaatagcttaccaacaaaaaaagtccagaaccaggtggattcacagctgaattctaccagagcaatagaaaaagagggaatcctccctaactcattttatgaggccagcatcatcctgatgctaaagcctggcagagacacaacaaaaaaagagaattttagaccaatatccctgatgaacatcgatgcaaaaatcctcaataaaatactggcaaaccgaatccagcagcacatcaaaaagcttatccaccaagatcaagtgggcttcatccctgggatgcaaggctggttcaatatacgcaaatcaatcaacataatccagcatataaacagaaccaatgacaaaaaccacaagattatctcaatagatgcagaaaaggccttttacaaaattcaacaacccttcatgctaaaaactctcaataaattaggtattgatgggtcatatctcaaaataataagagctatctatgacaaacccacagccaatatcatactgaatgggcaaaaactggaagcattccctttgaaaactggcacaagacagggatgccctctctcaccactcctattcaacttagtgttggaagttctggccagggcaattaggcaggagaaggaaataaagggtattcaattaggaaaagaggaagtcaaattgtccctgtttgcagatgacatgattgtatatttagaaaaccccatcgcctcagcccaaaatctccttaagttgaaaggcaacttcagcaaagtctcaggatacaaaatcaatgtgcaaaaatcacaagcattcttatacaccaagaacagacaaacagagagccaaatcatgagtgaactcccattcacaattgcttcaaagagaataaaatacctaggaatccaacttacaagggacatgaaggacctcttcaaggagaactacaaaccactgctcaatgaaataaaagaggatacaaacaaatggaagaacattccatgctcatgtgaaggaagaatcagtatcctgcaaatggccatactgcccgaggtaatttacagattcaatgccatccccatcaagctaccaatgactttcttcacagaattggaaaaaactactttaaagttcatatggaaccaaaaaagagcccgcatcaccaagtcaatcctaagccaaaagaacaaagctggaggcatcacgctacctgacttcaaacaatactacaaggctacagtaaccaaaacagcatggtactggtaccaaaacagacatatagaccaagggaacggaacagagccttcagaaatagtgccgcatatctacaaccatctgatctttgacaaacctgagaaaaacaagaaatggggaaaggattccctatttaataaatggtgctgggaaaactggctagccatatgtagaaagctgaaactggatcccctccttaaaccttatacaaaaattaattcaagatggattaaagacttaaatgttagacctaaaaccataaaaaccctagaagaaaacctaggcaataccattcaggacataggcataggcaaggactttatgtctaaaacaccaaaagcaatggccacaaaagccaaaattgacaaatggatctaa

SEQ ID NO: 14511 - DNA, 2313 bp, Homo sapiens; identical to SEQ ID NO: 7850
  SIMILAR (1)..(1362): 891254mologous to Homo sapiens putative p150,accession number U93565,Smith-Waterman Score=2008.

SEQ ID NO: 14512 - DNA, 1308 bp, Homo sapiens
atgaacattgatgcaaaaatcctcaataaaatactggcaaaccgaatccagcagcacatcaaaaagcttatccaccatgatcaagtgggcttcatccctgggatgcaaggctggttcaatatacgcaaatcaataaatgtaatccagcatataaacagagccaaagacaaaaaccacatgatcatctcaatagatgcagaaaaagcctttgacaaaattcaacaacccttcatgctaaaaactctcaataaattaggtattgatgggacgtatttcaaaataataagagctatctatgacaaacccacagccaatatcattctgaatgggcaaaaactggaagcattccctttgaaaactggcacaagacagggatgccctctctcaccactcctattcaacatagtgttggaagttctggccagggcaatcaggcaggagaaggaaataaagggtattcaattaggaaaagaggaagtcaaattgtccctgtttgcagacgacatgattgtttatctagaaaaccccatcgtctcagcccaaaatctccttaagctgataagcaacttcagcaaagtctcaggatacaaaatcaatgtacaaaaatcacaagcattcttatacaccaacaacagacaaacagagagccaaatcatgagtgaactcccattcttcaatgccatccccatcaagctaccaatgactttcttcacagaattggaaaaaactactttaaagttcatatggaaccaaaaaagagcccgcatcgccaagtcaatcctaagccaaaagaacaaagctggaggcatcacactacctgacttcaaactatactacaaggctacagtaaccaaaacagcatggtactgttacctaaacagagatatagaccaatggaacagaagagagccctcagaaataataccacacatctacacccatgtgatctttgacaaacctgacaaaaacaagaaatggggaaaggattccctatttaataaatggtgctgggaaaactggctagccatatgtagaaagctgaaactggattgcttccttgcaccttatacaaaaattaattcaagattgattaaagacttacatgttagacctaaaaccataaaaaccctagaagaaaacctaggcaataccattcaggacataggcatgggcaaggacttcatatctaaaacaccaaaagcaatggcaacaaaagccaaaattgacaaatggggtttaattaaactaaagaacttctgcacagcaaaagaaactaccatcagagtgaacaggcaacctacagaatag

SEQ ID NO: 14513 - DNA, 2151 bp, Homo sapiens; identical to SEQ ID NO: 4456
  SIMILAR (400)..(1821): 951254mologous to Homo sapiens putative p150,accession number U93572,Smith-Waterman Score=2319.

SEQ ID NO: 14514 - DNA, 777 bp, Homo sapiens
  SIMILAR (259)..(765): 851254mologous to Homo sapiens putative p150,accession number U93564,Smith-Waterman Score=793.
atgggcaaagatttttataatgaaattgccaaaagcaattgcgacaaaagccaaaagccgccccgtccaggagggagctcattgagaacgggccatgatgacaatggcggttttgtggaatcgaaagaggggaaaggtggggaaaagattgagaaatcggatggttgccgtgtctgtgtagaaagaatggtcacccaggccagctgcttcgacgtggataggggctacacaggacatgaatatcatgagaagaattggaaaaaaactgctttaaatttcatatggaaccaaaaaagagcccatatagccaagacaatcctaagcaaaaagaacaaagctggaggcatcatgctacctgacgtcaaactatactacaaggttacagcaaccaaaacagcatggtactggtaccaaaacagatacctagaccaatggaacagaacagagaccacagaaaaaatgctacacatctacaaccaactgatctttgacaaacctgacaaaaacaagcagtggggaaaggattccctgtttaataaatggtgttgggaaaactggctagccatatgcagcaaactgacactggaccccttccttacacctcatacaaaaattaactcaagatggattaaagacttaaatgtaagacctaaaaccataaaaaccctagaagaaaatctaggcaataccattcaggacataggcatgggcaaagacttcatgactaaaacaccaaaagcaatggcaacaaaagccaaaattgacaatgggatctaa

SEQ ID NO: 14515 - DNA, 3117 bp, Homo sapiens
  SIMILAR (1)..(1170): 971254mologous to Homo sapiens putative p150,accession number U93574,Smith-Waterman Score=1968.
agcacccagattcataaagcaagtcctgagtgacctacaaagagacttagactcccacacaataataatgggagactttaacaccccactgtcaacattagacagatcaacaagacagaaagtccacaaggatacccaggaattgaactcagctctgcaccaagcggacctaatagacatctacagaactctccaccccaaatcaacagaatatacatgtttttcagcaccacaccacacctattccaaaattgaccacatagttggaagtaaagcactcctcagcaaatgtaaaagatcagaaattataacaaactgtctctcagaccacagtgcaatcaaactagaactcaggattaagaaactcactcaaaaccgctcaactacatggaaactgaacaacctgctcctgaatgactactgggtacataacgaaatgaaggcagaaataaggatgttctttgaaaccaacgagaacaaagacacaacataccagaatctctgggacacattcaaagcagtgtgtagagggaaatttatagcactaaatgcccacaagagaaagcaggaaagatccaaaattgacaccctaacatcacaattaaaagaactagaaaagcaagagcaaacacattcaaaagctagcagaaggcaagaaataactaaaatcagagcagaactgaaggaaatagagacacaaaaaacccttcaaaaaattaatgaatccaggagctggttttttgaaaggatcaacaaaattgatagaccgctagcaagactaataaagaaaaaaagagagaagaatcaaatagacacaataaaaaatgataaaggggatatcaccactgatcccacagaaatacaaactaccatcagagaatactacaaacacctctacgcaaataaactagaaaatctagaagaaatggataaattcctcgacacatacactctcccaagactaaaccaggaagaagttgaatctctgaatagaccaataacaggagctgaaattgtggcaattatcaatagtttaccaaccaaaaagaatccaggaccagatggattaacagccgaattctaccagaggtacaaggaggaactggtaccattccttctgaaactattccaatcaatagaaaaagagggaatcctccctaactcattttatgaggccagcatcattctgataccaaagccgggcagagacacaaccaaaaaagagaattttagaccaatatccttgacgaacattgatgcaaaaatcctcaataaaatactggcaaaccgaatccagcagcacatcaaaaagcttatccaccatgatcaagtgggcttcatccctgggatggaaagctggttcaatatacgcaaatcaataaatgtaatccagcatataaacagagccaaagacaaaaaccacatgattatctcaatagatgcagaaaaggcctttgacaaaattcaacaacccttcatgctaaaaactctcaataaattaggtattgatgggacgtatttcaaaataataagagctatctatgacaaacccacagccaatatcatactgaatgggcaaaaactggaagcattccctttgaaaactggcacaagacagggatgccctctctcactgctcctattcaacatagtgttggaagttctggccagggcaatcaggcaggagaaggaaataaagggtattcaattaggagaggaagtcacattgtccctgtttgcagacgacatgattgtttatctagaaaaccccattgtctcagcccaaaatctccttaagctaataagcaccttcagcaaagtctcaggatacaaaatcaatgtacaaaaatcacaagcattcttatacaccaacaacagacaaacagagagccaaatcatgagtgaactcccattcacaattgcttcaaagagaataaaatacctaggaatcctacttacaagggatgtgaaggacctcttcaaggagaactacaaaccactgctcaaggaaataaaagaggatacaaacaaatggaagaacattccatgctcatgggtaggaagaatcaatatcgtgaaaatggccatactgcccaaggtaatttacagattcaatgccatctccatcaagctaccaatgactttattcacagaattggaaaaaactactttaaagttcatatggaagcaaaaaagagcccgcatcgccaagtcaatcctaagccaaaagaagtgtgctggaggcatcacactacctgacttcaaactatactgcaaagctacagtaaccaaaacagcatggtactggtaccaaaacagagatatagatcaatggaacagaacagatccctcagaaataacgccgcatacctacaactatctgatctttgacaaacctgagaaaaacaagcaatggggaaaggattccctatttaataaatggtgctgggaaaactggctagccatatgtagaaagctgaaactggatcccttccttacaccttatacaaaaatcaattcaagatggattaaagatttaaacattagacctaaaaccataaaaaccctagaagaaaacctaggcattaccattcaggacataggcatgggcaaggacttcatgtccaaaacaccaaaagcaatggcaacaaaagccaaaattgacaaatgggatctaattaaactaaagagcttctgcacagcaaaagaaactaccatcagagtgaacaggcaacctacaacatgggagaaaattttcgcaacctactcatctgacaaagggctaatatccagaatctacaatgaactcaaacaaatttacaagaaaaaaacaaacaaccccatcaaaaagtgggcgaaggatatgaacagacacttctcaaaagaagacatttatgcagccaaaaaacacatgaaaaagatggtgatgtacagatgggtttttggtgtggatgtcctttctgtttgttagttttccttctaacagacaggaccctcagctgcaggtctgttggagtttgctagaggtccactccagaccctgtttgcctgggtaccagcagtggtgtctgcagaacagcagattttcatgaaccgtgaatgctgctgtctgatcgt

SEQ ID NO: 14516 - DNA, 3813 bp, Homo sapiens
  SIMILAR (1666)..(2580): 931254mologous to Homo sapiens putative p150,accession number U93563,Smith-Waterman Score=1454.
atggtaaagggatcaattcaacaagaggagctaactatcctaaatatttatgcacccaatacaggagcacccagattcataaagcaagtcctcagtgacctacaaagagacttagactcccacacattaataatgggagactttaacaccccactgtcaacattagacagatcaacgagacagaaagtcaacaaggatacccaggaattgaactcagctctgcaccaagcagacctaatagacatctacagaactctccaccccaaatcaacagaatatacatttttttcagcaccacaccacacctattccaaaattgaccacatagttggaagtaaagctctcctcagcaaatgtaaaagaacagaaattataacaaactatctctcagaccacagtgcaatcaaactagaactcaggattaagaatctcactcaaagccgctcaactacatggaaactgaacaacctgctcctgaatgactactgggtacataacgaaatgaaggcagaaataaagatgttctttgaaaccaacgagaacaaagacaccacataccagaatctctgggacgcattcaaagcagtgtgtagagggaaatttatagcactaaatgcccacaagagaaagcaggaaagatccaaaattgacaccctaacatcacaattaaaagaactagaaaagcaagagcaaacacattcaaaagctagcagaaggcaagaaataactaaaatcagagcagaactgaaggaaatagagacacaaaaaacccttcaaaaaatcaatgaatccaggagctggttttttgaaaggatcaacaaaattgatagaccgctagcaagactaataaagaaaaacagagagaagaatcaaatagacacaataaaaaatgataaaggggatatcaccaccgatcccacagaaatacaaactaccatcagagaatactacaaacacctctacgcaaataaactagaaaatctagaagaaatggatacattcctcgacacatacactctcccaagactaaaccaggaagaagttgaatctctgaatcgaccaataacaggctctgaaattgtggcaataatcaatagtttaccaaccaaaaagagtccaggaccagatggattcacagccgaattctaccagaggtacaaggaggaactggtaccattccttctgaaactattccaatcaatagaaaaagagggaatcctccctaactcattttatgaggccagcatcattctgataccaaagccgggcagagacacaaccaaaaaagagaattttagaccactatccttgatgaacattgatgcaaaaatcctcaataaaatactggcaaaccgaatccagcagcacatcaaaaagcttatccaccatgatcaagtgggcttcatccctgggatgcaaggctggttcaatatacgcaaatcaataaatgtaatccagcatataaacagagccaaagacaaaaaccacatgattatctcaatagatgcagaaaaagcctttgacaaaattcaacaacccttcatgctaaaaactctcaataaattaggtattgatgggacgtatttcaaaataataagagctatctatgacaaacccacagccaatatcatactgaatgggcaaaaactggaagcattccctttgaaaactggcacaagacagggatgccctctctcaccgctcctattcaacatagtgttggaagttctggccagggcaatcaggcaggagaaggaaataaagggtattcaattaggaaaagaggaagtcaaattgtccctgtttgcagacgacatgattgtttatctagaaaaccccatcgtctcagcccaaaatctccttaagctgataagcaacttcagcaaagtctcaggatacaaaatcaatgtacaaaaatcacaagcattcttatacaccaacaacagacaaacagagagccaaatcatgagtgaactcccattcacaattgcttcaaagagaataaaatacctaggaatccaacttacaagggatgtgaaggacctcttcaaggagaactacaaaccactgctcaaggaaataaaagaggagacaaacaaatggaagaacattccatgctcatgggtaggaagaatcaatatcgtgaaaatggccatactgcccaaggtaatttacagattcaatgccatccccatcaagctaccaatgactttcttcacagaattggaaaaaactactttaaagttcatatggaaccaaaaaagagcccgcatcaccaagtcaatcctaagccaaaagaacaaagctggaggcatcacactacctgacttcaaactatactacaaggctacagtaaccaaaacagcatggtactggtaccaaaacagagatatagatcaatggaacagaacagagccctcagaaataatgccgcatatctacaactatctgatctttgacaaacctgagaaaaacaaacaatggggaaaggattccctgtttaataaatggtgctgggaaaactggctagccatatgtagaaagctgaaactggatcccttccttacaccttatacaaaaatcaattcaagatggattaaagatttaaacgttaaacctaaaaccataaaaaccctagaagaaaacctaggcattaccattcaggacataggcgtgggcaaggacttcatgtccaaaacaccaaaagcaatggcaacaaaagacaaaattgacaaatgggatctaattaaactaaagagcttctgcacagcaaaagaaactaccatcagagtgaacaggcaacctacaacatgggagaaaatttttgcaacctactcatctgacaaagggctaatatccagaatctacaatgaactcaaacaaatttacaagaaaaaaacaaacaaccccatcaaaaattgggcgaaggacatgaacagacacttctcaaaagaagacatttatgcagccaaaaaacacatgaagaaatgctcatcatcactggccatcagagaaatgcaaatcaaaaccactatgagatatcatctcacaccagagatacagtatgctacttctccccaacaccaaggcattgtgggactcactaggtgctttctagatgaatggaggtcatgcaccagagccaacagttcccttgttagtgacatagtcataaggtacgctgacaacagaggtgacacttcccagcccttcaaagctgataagcaacttcagcaaagtctcagaatacaaaatcaatgtacacaaatcacaagcattcttatacaccaacaacagacagagagccaaatcatgagtgaactcccattcacaattgcttcaaagagaataaaatacctaggaatccaacttacaagggatgtgaaggacctcttcaaggagaactacaaaccactgctcaaggaaataaaagaggatacaaacaaatggaagaacattccatgctcatgggtaggaagaatcaatatggtgaaaatggccacactgcccaaggtaatttatagattcaatgccatccccatcaagctaccaatgactttcttcacagaattggaaaaaactactttaaagttcatatggaaccaaaaaagagccctcatcgccaagtcaatcctgagccaaaagaacaaagctggaggcatcacactacctgacttcaaactatactacaaggctacagtaaccaaaacagcgtggtactggtaccaaaacagagatatagatcaatgcaacagaacagagccctcagaaaactttcttacaagaaattctaaagggagttcttcaggctga

SEQ ID NO: 14517 - DNA, 1776 bp, Homo sapiens
  SIMILAR (103)..(2556): 841254mologous to Homo sapiens putative p150,accession number U93574,Smith-Waterman Score=3474.
atgaacattggtgcaaaaatcatcaataaaatactggcaaaccaaatccagcagcacatcagaaagcttatccaccatgatcaagtgggcttcatccctgggatgcaaggctggttcaatatatgcaaatcaataaatgtaatccagcatataaacagaaccaaagacaaaaaccacatgattatctcaatagatgcagaaaaggcctgtgacaaaattcaacaacgcttcatgctaaaaactctcaataaattaggtattgatgggaagtatctcaaaataataagagctatctatgacaaacccacagccaatatcatactgaatgggcaaaaactggaagcattccctttgaaaactggcacaagacagggatgccctctctcaccactcctattcaacatagtgttggaagttctggccagagcaattaggcaggagaaggaaataaaggatattcaattaggaaaagaggaagtcaaattgtccctgtgtgcagacaaaatgattgtgtatctagaaaaccccattgtctcagcccaaaatctccttaagctgataagcaacttcagcaaagtctcaggatacaaaatcaatgtacaaaaatcacaagcattcttatacaccaataacagacaaacagagagccaaatcatgagtgaactcccattcacaattgcttcaaagagaataaaatacctacaaatccaccagacaagggacgtgaaggacctcttcaaggagaactacaaaccactgctcaaggaaataaaagaggatacaaacaaagaacattccatgctcatgcgtaggaagaatcaatattgtgaaaatggccatactgcccaagaattggaaaaaactactttaaagttcatatggaaccagaaaagagcccgcatcaccaagtcaatcctaagtcaaaagaacaaagctggaagcatcatgctacctgacttcaacctatactacaaggctacagtatccaaaacagcatggtactggtaccaaaacagagatatagatcaatggaacagaacagagccctcagaaataacaccgcatatctacaactatctgatctttgacaaacctgagaaaaacaagcaatggggaaaggattccctatttaataaatggtgctgggaaaactggctagccatatgtagaaagctgaaactggatcccctccttacactttatacaaaaattaattcaagatggattaaagacttaaacgttagtcctaaaaccatcaaaaccctagaagaaaacctagacattaccattcaagacataggcatgggcaaggacttcatgtctaaaacagcaaaagcaatggcagcaaaagcaatgtcaacaaaagcaaaatttggcaaatgggatctaattaaactaaagagcttctgcacagcaaaagaaactaccatcagagtgaacaggatctcatcttatgcatcatcatccacatcattacaagccttctccagaaagatactaaactgttcaaaaagattttttaaaattgcacagatgtgtaagcttgttgaacttcggccacaagacatgcatacttccagaggcagtggtaactgctcagaggcccggactctcctatgtgactttagtgcaggaagaacttctgtcaatcacggacgcatctggagacaaatcagagaagctggggctgctgacccagagatcgggcttgaagtttgcaataagaatccaacttccttcacattattttacttcttgagctacaccacagggtaa

SEQ ID NO: 14518 - DNA, 2070 bp, Homo sapiens; identical to SEQ ID NO: 5421
  SIMILAR (670)..(2067): 961254mologous to Homo sapiens putative p150,accession number U93563,Smith-Waterman Score=2362.

SEQ ID NO: 14519 - DNA, 3229 bp, Homo sapiens
  SIMILAR (784)..(2460): 871254mologous to Homo sapiens putative p150,accession number U93563,Smith-Waterman Score=2393.
atgggagactttaacaccccactgtcaacattagacagatcaacgagacagaaagtcaacaaggatacccaggaattgaactcagctctgcaccaagcagacctaatagacatctacagaactctccaccccaaatcaacagaatatacatttttttcagcaccacaccacacctattccaaaattgaccacatagttggaagtaaagctctcctcagcaaatgtaaaagaacagaaattataacaaactatctctcagaccacagtgcaatcaaactagaactcaggattaaaaatctcactcaaagccgctcaactacatggaaactgaacaacctgctcctgaatgactactgggtacataacgaaatgaaggcagaaataaagatgttctttgaaaccaacgagaacaaagacaccacataccagaatctctgggacgcattcaaagcagtgtgtagagggaaatttatagcactaaatgcctacaagagaaagcaggaaagatccaaaattgacaccctaacatcacaattaaaagaactagaaaagcaagagcaaacacattcaaaagctagcagaaggcaagaaataactaaaatcagagcagaactgaaggaaatagagacacaaaaaacccttcaaaaaatcaatgaatccaggagctggttttttgaaaggatcaacaaaattgatagaccactagcaagactaataaagaaaaaaagagagaagaatcaaatagacacaataaaaaatgataaaggggatatcaccaccgatcccacagaaatacaaactaccatcagagaatactacaaacacctctacgcaaataaactagaaaatctagaagaaatggatacattcctcgacacatacactctcccaagactaaaccaggaagaagttgaatctctgaatagaccaataacaggttctgaaattggggcaataatcaatagtttaccaaccaaaaagagtccaggaccagatggattcacagccgaattctaccagaggtacaaggaggaactggtaccattccttctgaaactattccaatcaatagaaaaagagggaatcctccctaactcattttatgaggccagcatcattctgataccaaagccgggcagagacacaacaaaaaaagagaattttagaccaatatccttgatgaacattgatgcaaaaatcctcaataaaatactggcaaaccaaatccagcagcacatcaaaaagcttatccaccatgatcaagtgggcttcatccctgggatgcaaggctggttcaatatacgcaaatcaataaatgtaatccagcatataaacagagccaaagacaaaaaccacatgattatctcaatagatgcagaaaaagcctttgacaaaattcaacaacccttcatgctaaaaactctcaataaattaggtattgatgggacgtatttcaaaataataagagctatctatgacaaacccacagccaatatcatactgaatgggcaaaaactggaagcattccctttgaaaactggcacaagacagggatgccctctctcaccgctcctattcaacatagtgttggaagttctggccagggcaatcaggcaggagaaggaaataaagggtattcaattaggaaaagaggaagtcaaattgtccctgtttgcagacgacatgattgtttatctagaaaaccccatcgtctcagcccaaaatctccttaagctgataagcaacttcagcaaagtctcaggatacaaaatcaatgtacaaaaatcacaagcattcttatacaccaacaacagacaaacagagagccaaatcatgggtgaactcccattcacaattgcttcaaagagaataaaatacctaggaatccaacttacaagggatgtgaaggacctcttcaaggagaactacaaaccactgctcaaggaaataaaagaggacacaaacaaatggaagaacattccatgctcatgggtaggaagaatcaatatcgtgaaaatggccatactgcccaaggtaatttacagattcaatgccatccccatcaagctaccaatgactttcttcactgaattggaaaaaactactttaaagttcatatggaaccaaaaaagagcccgcatcgccaagtcaatcctaagccaaaagaacaaagctggaggcatcacactacctgacttcaaactatactacaaggctacagtaaccaaaacagcatggtactggtaccaaaacagagatatagatcaatggaacagaacagagccctcagaaataatgccgcatatctacaactatctgatctttgacaaacctgagaaaaacaagcaatggggaaaggattccctatttaataaatggtgctgggaaaactggctagccatatgtagaaagctgaaactggatcccttccttacaccttatacaaaaatcaattcaaaatggattaaagatttaaacgtcagacctaaaaccataaaaaccctagaagaaaacctaggcattaccattcaggacataggcgtgggcaaggacttcatgtccaaaacaccaaaagcaatggcaacaaaagccaaaattgacaaatgggatctaattaaactaaagagcttctgcacagcaaaagaaactaccatcagagtgaacaggcaacctaccacatgggagaaaattttcgcaacctactcatctgacaaagggctaatatccagaatctacaatgaactcaaacaaatttacaagaaaaaaacaaacaaccccatcaaaaagtgggcgaaggacatgaacagacacttctcaaaagaagacatttatgcagccaaaaaacacatgaagaaatgctcatcatcactggccatcagagaaatgcaaatcaaaaccactatgagatatcatctcacaccaactgcttgtttggaaacagcggaggaacaacaactaaataacatggagtgcgcaggcaccgaagctataaacagcctcatcagcattgccctcctgcccaagggtggaatgagccgtatcttgattgagactcaaggggacaggaccctgaagtggcacaaagagcgagcagtgtgcggagcccatatgcaggcccgagcggggcagacgacgcacagcgcaggaggatttctgctcccgcctggaattcatttgcagtcattaccttgtgggtgcgaagagttgcccagaaaacagaggatggaaa

SEQ ID NO: 14520 - DNA, 3370 bp, Homo sapiens; identical to SEQ ID NO: 12505
  SIMILAR (442)..(3252): 951254mologous to Homo sapiens putative p150,accession number U93572,Smith-Waterman Score=4651.

SEQ ID NO: 14521 - DNA, 3033 bp, Homo sapiens; identical to SEQ ID NO: 7866
  SIMILAR (1)..(4953): 1001254mologous to Homo sapiens CDC42-binding protein kinase beta,accession number AF128625,Smith-Waterman Score=8500.

SEQ ID NO: 14522 - DNA, 2745 bp, Homo sapiens
  SIMILAR (1452)..(778): 551254mologous to Homo sapiens Membrane-bound protein PRO1028,accession number Y66714,Smith-Waterman Score=484.
atgggagactttaacaccccactgtcaacattagacacatcaacgagacagaaagtcaacaaggatacccaggaattgaactcagctctgcaccaagcagacataatagacatctacagaactcttcaccccaaatcaacagaatgtacatttttttcagcaccacaccacacctattccaaaattgaccacatacttggaagtaaagctctcctcaacaaatgtaaaagaacagaaattataacaaactatctctcagaccacagtgcaatcaaactagaactcaggattaagaatctcactcaaaaccgctcaactacatggaaactgaacaacctgctcctgaatgactactgggtacataacaaaacgaaggcagaaataaagatgttctttgaaaccaacgagaacaaagacaccacataccagaatctctgggacgcatccaaagcaagtccaggaccagatggattcacagccgaattctaccagaggtacaaggaggaactggtaccattccttctgaaactattccaatccatagaaaaagagggaatcctccctaactcattttatgaggccagcatcatcctgataccaaagccggacagagatacaaccaaaaaagagaattttagaccaatatccttgatgaacattgatacaaaaatcctcaataaaatactggcaaaccgaatccagcagcacatcaaaaagcttatccaccatgatcaagtgggcttcatccctgggatgcaaggctggttcaatatacgcaaatcaataaaggtaatccagcatataaacagaaccaaagacaaaaaacacatgattatctcaatagatgcagaaaaggcctttgacaaaattcaacaacctttcatactaaaaactctcaataaattaggtattgatgggacgtatttcaaaataataagagctatctatgacaaacccacagccaatatcatactgaatgggcaaaaactggaagcattccctttgaaaactggcacaagacagggatgccctctctcaccactcctattcaacacagtgttggaagttctggccagggcaattgggcaggagaaggaaataaagggtattcagttaggaaaagaggaagtcaaactgtccctgtttgcagatgacatgattgtatatctagaaaaccccattgtctcagcccaaaatctccttaagctgataagcaacttcagcaaagtctctggatacaaaatcaatgtacaaaaatcacaagcattcttatacaccaacaacagacaaacagagagccaaatcatgagtgaactcccattcacaattgcttcaaagagaataaaatacctaggaatccaacttacaagggatgtgaaggacctcttcaaggagaactacaaaccactgctcaaggaaataaaagaggatacaaacaagtggaagaacattccatgctcatgggtaggaagaatcaatattgtgaaaatggccatactgcccaaggtaatttacagattcaatgccatccccatcaagctaccaatgactttcttcacagaactggaaaaaactactttaaagttcatatggaaccaaaaaagagcctgcatcgccaagtcaatcctaagccaaaagaacaaagctggaggcatcacactacctgacttcatactatactacaaggctacagtaacaaaaacagcatggtactggtaccaaaacagagatatagatcaatggaacagaacagaggcctcagaaataacgccgcatatctacaactatctgatctttgacaaacctgaggaaaacaagcaatggggaaaggattccctatttaataaatggtgctgggaaaactggctagccatatgtagaaagctgaaactggatcccttccttacaccttatacgaaaatcagttcaggatggattaaagacttaaacgttagacctaaaaccataaaaaccctagaagaaaacctaggcattaccattcaggacataggcatgggcaaggacttcatgtctaaaacaccaaaagcaatggcaacaaaagccaaaattgacaaatgggatctaattaaactaaagagcttctgcacagcaaaagaaactaccatcagagtgaacaggcaacctaaaaaatgggagaaaattttcacaacctactcatctgacaaagggctaatatccagaatctacaacgaactcaaacaaatttacaagaaaaaaacaaacaaccccattaaaaagtgggcaaaggacatgaacagacacttctcaaaagaagacatttatgcagccaaaaaacacatgaaaaactgctcaccatcactggccatcagagatatgcaaatcaaaaccacaatgagataccatctcacaccagttagaatggcgatcattaaaaagtcaggaaacaacagaagaattggtaccaatcctatggacactattccaaaagataaagagggaatcctccctaaatcattctatgaagccatgatcaccctaataccaaaaccaggaaaggacatatcaaaaaaacaaaactatggaccaacatccctgatgaacacagatgcaaaaatcctcaacgaaatcctagctaaccgaatccaacagcatatcaaaaagataatccatcacgatcaagttgtacctgtgtcttatcctgaagacagtggtgatggtcagcatcccatgaatgagatggacctgtcatccacataccactaa

SEQ ID NO: 14523 - DNA, 3831 bp, Homo sapiens; identical to SEQ ID NO: 10111
  SIMILAR (2545)..(338): 1001254mologous to Homo sapiens 17beta-hydroxysteroid dehydrogenase,accession number X87176,Smith-Waterman Score=3795.

SEQ ID NO: 14524 - DNA, 2667 bp, Homo sapiens; identical to SEQ ID NO: 9129
  SIMILAR (392)..(180): 881254mologous to Homo sapiens Human prostate cancer- associated protein 12,accession number Y48226,Smith-Waterman Score= 334.

SEQ ID NO: 14525 - DNA, 2328 bp, Homo sapiens
  SIMILAR (352)..(1047): 991254mologous to Homo sapiens HSPC240,accession number AF151074,Smith-Waterman Score=1272.
atgctgaacccgggcctggtgggcctcaacatcctggacagcttcgccggcggcctgcccatgctgacgacggactgcggcctgcattcgcccgagatcgcctatctgggatttttggccaatcgggtccagccagctcaaaatccttggctcacactgaaccttcagctcggtaccccacttatcaccacagaaatacaaactatcatcagagaatactacaaacacctctatgcaaataaactagaaaatctagaagaaatggataaattccttgacacatacaccctcccaagactaaaccaggaagaagttgaatctctgaatagatcaataacaggctctgaaattgaggcaataattaatagcttaccaaccaaacaaaatccgggaccagatggattcacagccgaattctaccagaggtacaaggaggagctgcatataaacagaaccagtgacaaaaaccatatgattacctcaatagatgcagaaaaggcctttgacaaaattcaacagcccttcatgctaaaaactctcaataaattaggtactgataggacatatctcaaaataataagagctatctatgacaaacccacagccaatatcatactgcgtgggcaaaaactggaagcattccctttgaaaactggcacaagacagggatgtcctctctcaccactcctattcaacatagtgttagaagtactggccagggcaatcaggcaggagaaggaaataaagggtattcaattaggaaaagaggaagtcaaattgtccctgtttgcagatgacatgattgtatatcaagaaaaccccatcatctcagcccaaaatctccttaagttgataggcaacttcagcaaagtctcaggatacaaaatcaatgtgcaaaaatcacaagcattcttatacaccaataatagacaaacagagagccaaaccatgagtgaaccgccattcacaattgcttcaaagagaataaaatacctaggaatccaacttacaagggatgtgaaggacctcttcaagaagaactacaaaccactgctcaatgaaataaaagaggatacaaacaaacggaagaacattccatgctcatgggtaggaagaatcaatatcgtgaacatggccatactgcccaaggtaatttatagattcaatgccatccccatcaagctaccaatgcctttcttcacagaattggaaaaaactactttaaagttcatatggaaccaaaaaagagcccgcattgccaagtcaatcctaagccaaaagaacaaagctggaggcatcatgctacctgacttcaaactatactacaaggctatagtatatcaaaacagagatatagaccaatggaacagaacagaggcctcagaaataatgccgcatatctacaaccatctgatctttgacaaacctgacaaaaacaagaaatggataaaggattccctatttaacaaatggtgctgggaaaactggctagccatatgtagaaagctgaaactggatcccttccttacaccttatacaaaaattaattcaagatggattaaagacctaaatgttagacccaaaaccataaaaaccctggaagaaaacctgggcaataccattcaggacataggcatgggcaaggacttcatgtctcaaacaccaaaagcaatggcaacaaaagccaaaattgacaaatgggatctaattaaactaaagagcttctgcatagcaaaagaaactaccatcggagtgaataggcaacctacagaatgggagaaaatttttgcaatttactcatctgacaaagggctaatatccagaatctacaatgaagtcaaacacatttacaagaaaaaaacaaccccatcaacaaacagggccaccagaagggttccttggtctggcggtgatgccagcgtctgggaagatgcccgttgtcaggcggaccgtggtctagcagtagcgaaaagtgtcaaggaacaacacccgctacttagcagaccaggaaagggaggctccctttccccgggggagtttagagaagactctgttcctccacctcttgtggagggcctgacatcagtcagactgcccgggtaccgagcacgattgtatcatgatatgatttgtcttctaataatactgacaaaaacaactggatttaaagatgaaagtgtctgccatgaggagtacggggacagcaggaatgaaaaggaatatttaagaatgcaaaaaccagtcagacagcacagctctgagcctggcagtgcccctgcaggggcactggttcacatgctgattgtgagcaaggaaaatctcatttaa

SEQ ID NO: 14526 - DNA, 3057 bp, Homo sapiens; identical to SEQ ID NO: 7870
  SIMILAR (571)..(185): 301254mologous to Mus musculus engrailed protein,accession number L12703,Smith-Waterman Score=96.
  misc_feature (1)...(3057): n = a,t,c or g

SEQ ID NO: 14527 - DNA, 2976 bp, Homo sapiens; identical to SEQ ID NO: 2496
  SIMILAR (334)..(1224): 641254mologous to Homo sapiens p40,accession number U93564,Smith-Waterman Score=910.

SEQ ID NO: 14528 - DNA, 3105 bp, Homo sapiens
  SIMILAR (1225)..(1914): 981254mologous to Homo sapiens putative p150,accession number U93572,Smith-Waterman Score=1157.
atgtactcacatgtgatcacggtgtgccggcatgtgaagaatggggacattctgctactgaaccgacagcccacactgcacagaccctccatccaggcccaccgtgcccgcatcctgcctgaagagaaagtgctgcggctccactatgccaactgcaaggcctataatgccgactttgatggagacgagatgaatgcccatttcccccagagtgagctgggccgggccgaggcctacgtcctggcctgcactgatcagcagtaccttgttcccaaggatggccaaccattggcgggactgatccaggatcacatggtttcaggggcaagcatgactactcggggttgctttttcacccgggagcactatatggagctggtgtaccgaggactcacggacaaagtggggcgcgtgaagctcctttctccttccatcctgaagccctttccgctgtggacaggaaaacagcatataaacagaaccaaagacaaaaaccacatgattatctcaatagatgcagaaaaggcctttgataaaattcaacaacccttcatgctaaaaactctcaataaattaggtattgatgggacgtatctcaaaataataagagctatctatgacaaacccacagccagtatcatactgaatgggcaaaaactggaagcattccctttgaaaactggcacaagacagggatgccctctctcaccactcctattcaacatagtgttggaagttctggccagggcaatcaggcaggagaaggaaataaagagcattcagttaggaaaagaggaagtcaaattgtccctgtttgcagatgacatgattgtatatctagaaaaccccactgtctcagcccaaaatctccttaagctgatgagcaacttcagcaaagtctcaggatacaaaatcaatgtgcaaaaatcacaagcattcttatacaccaataacagacaaacagagagccaaatcatgagtggactcccattcacaatcacttcaaagagaataacatacctaggaatccaacttacaagggatgtgaaggacctcttcaaggagaactacaaaccactgctcaaggaaataaaagaggatacaaacaaatggaagaacattccatgctcatgggtaggaagaatcaatatcgtgaaaatggccatactgcccaaggtaatttatagattcaacaccatccccatcaagctaccaatgactttcctcacagaattggaaaaaactactttaaagttcatatggaaccaaaaaagagcccacattgccaagtcaatcttaagccaaaagaacaaagctggaggcatcatgctacctgacttcaaactatactacaaggctacagtaaccaaaacagcatggtactggtaccaaaacagagatatagaccaatggaacagaacagagccctcagaaataatgccgcatatctataactatctgatctttgacaaacctgacaaaaacaagcaatggggaaaggattccctatttaataaatggtgctgggaaaactggctagccatatgtagaaagctgaaactggatcccttccttacaccttatacaaaaattaattcaagatggattaaagacttacatgttagacctaaaaccataaaaaccctagaagaaaacctaggcaataccattcaggacataggcatgggcaaggacttcatgtcgaaaacaccaaaagcaatggcaacaaaagccaaaattgacaaatgggatctcattaaactaaagagcttctgcacagcaaaagaaaccaccatcagagtgaacaggcaacctacagaatgggagaaaatttttgcaacctactcatctgacaaagggctaatatccagaatctacaatgaactcaaacaaatttacaagaaaaaaacaaacaaccccatcaaaaagtgggcaaaggatatgaacagacacttctcagaagaagacatttatgcagccaaaaaacacatgaaaaaatgctcatcatcactggccatcagagaaatgcaaatcaaaaccacaatgagataccatctcacaccagttagaatggtgatcattaaaaagtcaggaaacaataggtgctggagaggatgtggagaaataggaacacttttacactgttggtgggactgtaaactagttcaaccattgtggaagtcggtgtggcaattcctcagggatctagaactagaaataccatttgacccagccatcccattactgggtatatacccagaggattataaaccatgctgctataaagacacatgcacacgtatgtttattgcggcactattcacaatagcaaagacttggaaccaacccaaatgtccaacaatgatagacgggattaagaaaatgtggcacatatacaccatggaatactatgcagccataaaaaaggatgagttcatgtcctttgtagggacatggatgaagctggaaaccatcattctcagcaaactatcgcaaggacagaaaaccaaacaccgcatgttctcactcatagtcaggaccctcagctgcaggtctgttggagtttactcgaagtccactccagaccctgtttgcctgagtatcagcagcagtggctgcagaacagcagatattagtgtatcacaaatgctactgcctgattgttcctctggaagttttgtctcagaggagtacccgaaggtaatgagtgggcacaaggaggatgaagagggctcggggcaccgcctggcatggatgatgccatctgtcaaggagagtcactggggcctcctattttcaaaggagagaactagccactttgatcagcacgacctaggagatgtcaccctacaccagtcagaacccgaggacgatgccagagagacataccttagaagaggtgttctggggcctggagaggcatttggtgccctcacatctacctgccataccacatgcagggcagcctttaacaaagtccaatcctcagggtctgtccaagcaaagggggtggacacagagaggagattaaggacccagactctggagacacctgcttggcttcaaattcctgttccacgacttgatgactatgtctttgggtga

SEQ ID NO: 14529 - DNA, 3657 bp, Homo sapiens; identical to SEQ ID NO: 6045
  SIMILAR (1)..(1122): 971254mologous to Homo sapiens ALEX1,accession number AB039670,Smith-Waterman Score=1895.

SEQ ID NO: 14530 - DNA, 2839 bp, Homo sapiens
  SIMILAR (1192)..(2142): 951254mologous to Homo sapiens p40,accession number U93564,Smith-Waterman Score=1562.
aaacctcaactctctatgcagcttcgatcgtaggtatgtgtggggcttctgtaaaagtctgatccagggttactttgcccaattacactctccgctgcctgctggaccccacttgtgatgccccttgtaatgatcatggcatgaacacccgctggatgagccatagatactgtgagatggtgagctcactttctttagagaattttcattgttgcacccaaaggagctccattctcttccctcatgtgcctgttggcagaagacaactcgtatggaaagtggtttttggaatcgatgtgattctacatgaggttctatgcagagtcaatgcctctgcaaggagaagcaggcttgcccacacatggtttgccctgagagcatgtactgtctgtatttatctccctgtctatatgcagcccactgtcttacaacagtgcagtgcaagccctgcagctggtaggatatcaaaacctgaaggcctagatttcaagtgccatccagatatgaaatctttcaacctttcggtggctttgaatctaaagtgtgtctcttgtaaatggcacactgagtttgaagtgcctcacagtgaggtctctgctgtgggcgactgctgggcttcaagcagtccaggacccttcagtcaactgcccaagttcagatggcccagttctccaaaaggagagaagggtgcaccagaatgtcaccagggcagagagcgaaacagatcatggtagcgatccttccccagatccaggccctcccccttcctccttctctctcgttatctcagaattcacatggtattctcagttttgccttttggcctgcaaaacccgaaatatttactatctggctctttgcaggaaaagttcaggacccctggtataaattcccataaaacactggatccaaatagagtaatcattaaggtgaggaggaggctggagaaggagaaagccctgagggcctatgttgggaaatcagaggttcgtaacatgcatttaagagaaagatgcaaactatagaagaaaagagagaagaatcaaatagacacaattaaaaatgataaaggggatatcaccactgatgccacagaaatacaaactaccatcagagaatactataaacacctctatgcaaataaactagaaaacctagaagaaatggataaattcctcgacacatacatcctcccaagactaaaccaggaagaagttgaatctctgaatagaccaataacaggctctgaaattgaggcaataattaatagcttaccaaccaaaagaagtccaggaccagatggattcacagccgaattctaccagacgtacaaagaggagctggtaccattccctctgaaactattccaatcaacagaaaaagagggaatcctccctaactcattttatgaggccagcatcatcctgataccaaagcctggcagagacacaacaaaaaaagagaattttagaccaatatccttgatgaacatcgatgcaaaaatcctcaataaaatactggcaaaccgaatccagcagcacatcaaaaagcttatccactatgatcaagtgggcttcatccctgggatgcaaggctggttcaacaaacgcaaatcaataaatgtaatccagcatataaacagaaccaatgacaaaaaccacatgattatctcaatagatgcagaaaaggcctttgacaaaattcaacaacccttcatgctaaaaactctcaataaattaggtattgatgggacgtatctcaaagtaataagagctatctatgacaaacccacagccaatatcatactgaatgggcagaaactggaagcattccctttgaaaactgacacaagacagggatgccctctctcaccactcctattcaacatagtgttggaagttctggccagggcagtcaggcaggagaaggaaatagagggtattcaattaggaaaagaggaagtcaaattgtccctgtttgcagatgacatgattgtatatctagaaaaccccatcgtctcagcccaaaatctcctcaagctgataagcaacttcagcaaagtgtcaggatacaaaatcaacatacaaaaatcacaagcattcttatacaccaataacagacaaacagagagccaaatcatgagtgaactcccattcacaactgcttcaaagaaaataaaatacctaggaatccaacttacaagggatgtgaaggacctcttcaaggagaactacaaaccactgctcaatgaaataaaagaggatacaaacaaatggaagaacattccatgctcgtgggtaggaagaatcaatatcatgaaaatggccatactgcccaaggtaatttgtagattcaatgccatccccatcaagctaccaatgcctttcttcacagaattggaaacaactactttaaagttcatatggaaccaaaaaagagcccgcatcgccaagtcaatcctaagccaaaagaacaaagctggaggcatcacactacctgacttcaaactatactacaaggctacagtaaccaaaacagcatggtactggtaccaaaacagagatatagatcaatggaacagaacagagccctcagaaataacaccgcatatctacaactatctgatctttgacaaacctgagaaaatgagtataatagatacagggggatggtatgaggcaccagtcagttccttcttcaaggagggactatgccgcacaggtactgagaatcaggttaacagacagcctccagctgccagtcccttcaaggtttacgtcagctgcacggggtcacttcaccctaggccacactacttcttggagcatccatatccaag

SEQ ID NO: 14531 - DNA, 2253 bp, Homo sapiens; identical to SEQ ID NO: 9126
  SIMILAR (172)..(1989): 941254mologous to Homo sapiens putative p150,accession number U93572,Smith-Waterman Score=3008.

SEQ ID NO: 14532 - DNA, 2872 bp, Homo sapiens
  SIMILAR (1814)..(3145): 961254mologous to Homo sapiens putative p150,accession number U93563,Smith-Waterman Score=2184.
atgaaggcagaaataaaggtgttctttgaaaccaacgagaacaaagacacaacataccagaatctctgggacacattcaaagcagtgtgtagagggaaatttatagcactaaatgcccacaagagaaagcaggaaagatccaaaattgacaccctaacatcacaattaaaagaactagaaaagcaagagcaaacacattcaaaagctagcagaaggcaagaaataactaaaatcagagcagaactgaaggaaatacagacacaaaaaacccttcaaaaaatcaatgaatccaggagctggttttttgaaaggatcaacaaaattgatagatcgctagcaagactaataaagaaaaaaagagagaagaatcaaatagacacaataaaaaatgataaaggggatatcaccaccgatcccacagaaatacaaactaccatcagagaatactacaaacacctctatgcaaataaactagaaaatctagaagaaatggataaattcctcgacacatacactctcccaagactaaaccaggaagaagttgaatctctgaatagaccaataacaggagctgaaattgtggcaataatcaatagtttaccaaccaaaaagagtccaggaccagatggattcacagccgaattctaccagagctgggcagagacacaaccaaaaaaagagaattttagaccaatatccttgatgaacattgatgcaaaaatcctcaataaaatactggcaaaacgaatccagcagcacatcaaaaagcttatccaccatgatcaagtgggcttcatccctgggatgcaaggctggttcaatatacgcaaatcaataaatgtaacacagcatataaacagagccaaagacaaaaaccacatgattatctcaatagatgcagaaaaagcctttgacaaaattcaacaacccttcatgctaaaaactctcaataaattaggtattgatgggacgtatttcaaaataataagagctatctatgacaaccccacagccaatatcatactgaatgggcaaaaactggaagcattccctttgaaaactggcacaagacagggatgccctctctcaccactcctattcaacatagtgttggaagttctggccagggcaattaggcaggagaaggaaataaagggtattcaattaggaaaagaggaagtcaaattgtccctgtttgcagacaacatgattgtatatctagaaaaccccattgtctcagcccaaaatctccttaagctgataagcaacttcagcaaagtctcaggatacaaaatcaatgtacaaaaatcacaagcattcttatacaccaacaacagacaaacagagagccaaatcatgagtcaactcccattcacaattgcttcaaagagaataaaatacctaggaatccaacttacaagggatgtgaaggacctcttcaaggagaactacaaaccactgctcaaggaaataaaagaggatacaaacaaatggaaaaacattccatgctcagggggaaggaagaatcaatatcgtgaaaatggccatactgcccaagaattggaaaaaaactactttaaagttcatatggaaccaaaaaagagcccgcattaccaagtcaatcctaagccaaaagaacaaagcgggaggcatcatgttacctgacttcaaactatactacaaggctacagtaaccaaaacagcatggtactggtaccaaaacagacatatagatcaatggaacagaacagatccctcagaaataatgccacatatctacaactatctgatctttgacaaacccaagaaaaacaagcaatggggaaaggattccctatttaataaatggtgctgggaaaactggctagccatatgtagaagcctgaaactggatcccttccttacaccttatacaaaaatcaattcaaggtggattaacgacttaaacgttagacctaaaaccataaaaaccagagaagaaaacctaggcattaccattcaggacatcggcatgggcaaggacttcatgtctaaaacaccaaaatcaatggtaacaaaaaccaaaattgacaaatgggatctaattaaactaaagagcttctgcacagcaaaagaaactaccgtcagagtgatcaggcaacctacaaaatgggagaaaattttcacaacctactcatccgacaaagggctaatatccagaatgtacaatgaactcaaacaaatttacaagaaaaaaacaaacaaccccatcaaaaagtgggtgaaggacatgaacagacacttctcaaaagaagacatttgtgtagtcaaaaaacacatgaaaaaatactcaccatcactggccatcagagaaatgcaaatcaaaaccacaatgagataccatctcacaccagttagaatggcaatcattaaaaagtcaggaaacaacaggtgctggagaggatgtggagaaacaggaacgcttttacactgttggtgggactgtaaactagctcaaccattgtggaagtcagtgtggcgattcctcagggatctagaactagaaataccatttgacccagccatcccattactgggtatatacccaaatgactataaatcatgctgctataaagacacatgcacacgtatgtttattgcggcattattcacaatagcaaagacttggaaccaacccaaatgtccaacaattatagactggattaagaaaatgtggcacatatacaccatggaatactatgcagccataaaaaatgatgagttcgtgtcctttgtagggacatggatgaaattggaaatcatcattctcagtaaactatcacaagaacaaaaaaccacacaccgcatattctcactcataggtgggaattga

SEQ ID NO: 14533 - DNA, 2940 bp, Homo sapiens
  SIMILAR (829)..(443): 631254mologous to Homo sapiens Human secreted protein sequence SEQ ID NO:195,accession number Y87156,Smith-Waterman Score =364.
atggtggcctccagatcctctagagtcggtgtcttctatggaggtcaaaacagcgtggatggcgtctccaggcgatctgacggttcactaaacgagctctgcttatatagacctcccaccggggcgtacttggcatatgatacacttgatgtactgccaagtgggcagtttaccgtaaatactccacccattgacgtcaatggaaagtccctattggcgttactatgggaacatacgtcattattgacgtcaatgggcgggggtcgttgggcgatgcagccacttggccagctgggtcagctcgaacacctcggagaccggcgcgatcaggtcctcgaccgaagtggacgctcccgacgactcgatgctgctcagcacctgcgacatcgacctgaccgccgcccgcagggcatggttggggtgcttaccaaccaaaaagagcccaggaccagatggattcacagcagaattctaccagaggtgcaaggaggaactggtaccgttccttctgaaactattccaatcgatagaaaagagggaatccttcctaacttatttgatgaggccagcatcatcctgataccaaagcggggcagagacaccaccaaaaaagagaattttagaccaatatccttgatgaacattgatgcaaaaatcctcaataaaatactggcaaaccgaaaccagcagcacatcaaaaagcttatccaccatgatcaagtgggtttcatccctgggatgcaaggctggttcaatatatgcaaatcaataaatgtaatccagcatataaacagaaccaaagacaaaaaccacatgattatctcaatagatgcagaaaaggcctttgacaaaattcaacaacccttcatgctaaaaactcttaataaattaggtattgatgggacgtatctcaaaataataagagctatctatgacaaacccacagccaatatcatactgaatgggcaaaaactggaagcattccctttgaaaactggcacaagacagggatgccctctctcaccactcctattcaacatagtgttggaagttctggccagggcaatcaggcaggagaaggaaataaagggtattcaattaggaaaagaagaagtcaaattgtccctgtttgcagatgacatgattgtatatctagaaaaccccatcgtctcagcccaaaatctccttaagctaataagcaacttcagcaaagtctcagcatacaaaatcaatgtacaaaaatcacaagcattcttatacaccaataacagacaaacagagagccaaatcatgagtgtattcccattcacaattgcttcaaagagaataaaatacttaggaatccaacttgcaaggaatgcgaaggacctcttcaaggagaactacaaaccactgctcaatgaaataaaagaggatacaaagaaatggaagaacattccatgctcatgggtaggaagaatcaatatcgtgaaaatggccatactgcccaaggtaatttacagattcaatgccatccccatcaagctaccaatgactttcttcacagaattggaaaaaactactttaaagttcatatggaaccaaaaaagagcccgcatcgccaagtcaatcctaagccaaaagaacaaagctggaggcatcacgctacctgacttcaaactacactacaagattacagtaaccaaaacagcatggtactggtaccaaaacagagatatagatcaatggaacagaacagagccctcagaaataacgccgcatatctacaactatctgatctttgacaaacctgagaaaaacaagcaatggggaaaggattccctatttaataaatggtgctgggaaaactggctagccatatgtagaaagctgaaactggatcccttccttacaccttatacaaaaattcatccaagatggattaaagacttaaacgttagacctaaaaccataaaaaccctagaagaaaacctaggcaataccattcaggacataggcatgggcaaggacttcatgtctaaaacaccaaaagcaatggcagcaaaagccaaaattgacaaatgggatctaattcaactaaagagcttctgcacagcaaaagaaactaccatcagagtgaacaggcaacctacaaaatgggagaaaattttcgcaacctactcatctgacaaagggctaatatccagaatctacaaagaactcaaacaaatttacaagaaaaaaaacaaacaaccccatcaaaaagtgggcgaaggacatgaacagacacttctcaaaagaagacatttatgcagccaacaaacacatgaaaaaatgctcaccatcactggccatcagagaaatgcaaatcaaaaccactatgagataccatctcacaccagttagaatggcaatcattcaaaagtcaggaaacaacaggtgctggagaggatgtggagaaataggaacactcttacactgttggtgggactgtaaactagttccacatattctcactcataggtgggaattgaacaatgagatcacatggacacaggaaggggaatatcacactctggggactgtggtggggtggggggaggggggagggatagcattgggagatatacctaatgcaagatgacgggttagtgcctggttggaatggatcaaatattccatccacacgttaaaaaaaagcaattgttatgcttgtgcacatggcaagccagaggcccagattgtcccctttccactaaggtggtcctccagtcaaccaggtgtgggctgcatggtaacccttttccaggattctacagcctggagtaataagtcatgccaagctctctctgctgtatcccggaagctgactggtccacgcacagccgaagcatgagaaaactcattgcggggactcattttccttaaaattcagacttgtacagtaaggacttattaact

SEQ ID NO: 14534 - DNA, 3303 bp, Homo sapiens; identical to SEQ ID NO: 10101
  SIMILAR (433)..(714): 551254mologous to Homo sapiens p40,accession number U93571,Smith-Waterman Score=243.

SEQ ID NO: 14535 - DNA, 2902 bp, Homo sapiens
  SIMILAR (1593)..(1832): 451254mologous to Autographa californica nucleopolyhedrovirus AcOrf-91 peptide,accession number L22858,Smith-Waterman Score=190.
atggctgacatgctaacatgggaatcctgtcttgaggagtcactccaagaggagtcaccattggtcactcactgtggccccagctgctgcatctctggacagtcgcctccaagctcagctcgtccatcctcagtgtccagtgcaatctctgtgttgatgctgcctcagaacaggaagctgcctcctgcctggacgtctcctggaatcttccccacagatctggtggtttactccatgtcacttcctcatgcccttgccagatataactgtgatgtatgtaaaagcatgctgcctccaagattgtatgctcctgaggaaaaagctcgtacctctccactttgtggaacctggtactcaccttcactaccactttgtggagcctggtgcaagaagaatgagaagaagagggaaagagagagagagagaaagagacagagagaggatatactttctggtgcctcttcgtataaggacactattcatattcaattaagacccccaccttatgacgtccttcaacaaatacaaactaccatcagagaatacttcaaacacctctatgcaaataaactagaaaatctagaagaaatggataaactcctcgacacatacaccctcccaagactaaaccaggaagaagttgaatctctgaatagactaataacaggctctgaaattgtggcaataatcaacagcttaccaaccaaaaagagtccaagaccagatggattcacagctgaattctaccagaggtacaaggaggaactggtaccattccttctgaaactattccaatcaatagaaaaagggggactcctccctaactcattttatgaggccagcatcatcctgatgccaaagctgggcagagacacaaccaaaaaagagaattttagaccgatatccctgatgaacattgatgcaaaaatcctcaataaaatactggcaaaccaaatccagcagcacatcaaaaagcttatccagcatgatcaagtgggcttcatccctgggatgcaaggctggttcaatatttgcaaatcaataaatgtaatccagcatataaacagaaccaaagacaaaaaccacatgactatctcaatagatgcaggaaaagcctttgacaaaattcaacaactcttcatgctaaaaactctcaataaattaggtattgatgggacgtatctcaaaataataagagctatctatgacaaacccacagccaatatcattctgaatggggaaaaactggaagcattccctttgaaaactggcacaagacagggatgccctctctcaccactcctattcaacatagtgttggaagttctggccagggcaattaggcaggagaaggaaataaagggtattcgattacgaaaagaggaagtcaaattgtccctgtttgcagatgacatgattgtatatctagaaaaccccatcatctcagcccaaaatctccttaagctgataagcaacttcagcaaaatctcaggatacaaaatcaatgtacaaaaatcacaagcattcttatacaccaacaacagacaaacagagagccaaatcatgagtgaactcctattcacaattgcttcaaagagaataaaatacctaagaatccaacttactaaggacgtgaaggacctcttcaagaagaactacaaaccactgctcaatgaaataaaagaggatacaaagaaatggaagaacattccatgctcatgggtaggaagaatcaatatcgtgaaaatggccatacggcccaaggtaatttatagattcaatgccatccccatcaagctaccaatgactttcttcacagaattggaaaaaactactttcaagttcatatggaaccaaaaaagagcccgcatcgccaagtcaatcctaagccaaaagaacaaagctggaggcatcacactacctgacttcaaactatactacaaggctacagtaaccaaaacagcatggtactggtaccaaaacaaagatatagatcaatggaacagaacagagccctcagaaataatgccgcatatctacaactatctgatctttgacaaacctgacaaaaacaagcaatggggaaaggattccctatttaataaatggggctgggaaaactggctagccatatgtagaaagctgaaactggatcccttccttacaccttatacaaaaattaattcaagatggattaaagatttaaacgttagacctaaaaccataaaaaccctagaaaaaaacctaggcattaccattcaggacataggcatgggcaaggacttcatgtctaaaacaccaaaagcaatggcaacaaaagccaaaattgacaaatgggatctaattaaactaaagagcttctgcacagcaaaagaaactaccatcagagtgaacaggcaacctacaaaatgggagaaaatttttgcaacctactcatctgacaaagggctaatatccagaatctacaatgaactcaaacaaatttacaagaaaaaaacaaacaaccccatcaaaaagtgggtgaaggacatgaacagacacttctcaaaagaagacatttgtgcagccaaaaaacacatgaaaaaatgctcatcatcactggccatcagagaaatgcaaatcaaaaccacaatgagatatcatctcacaccagttagaatggcaatcattaaaaagtcaggaaacaacagcactattcacagtagcaaagacatggattcaacccaaatgtgcatcaatgatacactgtatgaagaaagtgtagaacatatacaccatgaaatacaatccagccataaaaaaggagttcacatcctttgcagcaatatggatggagctgaaagccactttcctaagcaaactaatgcaagaacagaaagccaaatactgcatgttctcactt

SEQ ID NO: 14536 - DNA, 5178 bp, Homo sapiens
  SIMILAR (801)..(310): 1001254mologous to Cloning vector pZC320 SopB,accession number U26464,Smith-Waterman Score=825.
atggctcagttccatgtctctcatcctccagcagagtggcccagacatgttctcctgctgatggcagacagcaagaatgagcttcagaatatgaatacaggccagacctgtgggacaagacagaccctgaagtcaaagctgcagggttggaacaagccagggattcagtctgatcctggaagtcaggggcatcccaggtgcctgaagacctttcctcttgttgctcaatctagcacacaggaaagaaatcatgtcatggaaaaggcagttttgaagagtcagaattgggctataattgaagagttcattaccaagatcggttggttccctgattacagtggcaaggtgaaatatttatcctctccaaaaagctcctgcacaactgttctccaagtcacccacttctcactcttttttcatccgaacccggatgagcttgtcagcaaaattaaagtgtggtctaagcatcgtctgtatcagaacaattcagaggctttcttagaagtgcagattccagagcccaaatgtgaggtgtacagcatgagaacaatgggaagaagacagccggggactgctatggacctgaatgcagggggctccatctgcaatgtcccacgcaccttactgcatctcacaggggaatccacttttcgtgataggcagagggtaggggcttatcttgacattcggggttggtatatcttggttttggtggttgataaagaaaaactggggattcctggacagaaacagaattcttccaagatcctctttgggtcagagaagctgaaacagtgggtctatgtgaagaatcatgcaaaggagtcaattacacaagaagcaatgggaatctgggtagggcagcagaggaagagacagcctttaggatatgaagaacgaaaactaacaaacaggaaggacatccacatcaaaaacccatctgtatgtcaccatcatcaaagaccaaaggtagataaaaccacaaagatggggaaaaaacagagcagaaaaactggaaactctaaaaatcagagcacatctcctactctaaaggaaagcagctcctcaccagcaacagaacaaagctggacagagaatgactttgacgagttgagagaagaaggcttcagaagatcagactactccgagctacaggaggaagttcaaaacaatggcaaagaagttaaaaactttggaaaaaaattagatgaatggataactagaataaccaatgcaaagaagtccttaaaggacctgatggagctgaaaaccaaggcacgagaactatgtgatgaacgcacaagcctcagtagccaatgcaatcaactggaagaaagggtatcagtgatggaagatgaaatgaatgaaataaagcaagaagagaagtttagagaaaaaagaataaaaagaaacgaacaaagcctccaagaaatatgggactatatgaaaagaccaaatctacgtctgattggtgtacctgaaagtgacggggagaatggaaccaagttggaaaacactctgcaggatattatccaggagaacttccccaatctagcaaggcaggccaacattcaaattcaggaaatacagagaacgccacaaagatactccttgagaagagcaaccccaagacacataattgtcagattcaccaaagttgaaatgaaggaaaaaatgttaagggtagccagagagaagggtcgggttacccacaaagggaagcctgtcagactaacagctgatctcttggcagaaactctacaagccagaagacaagacacacataggctcaaaataaagggatggaggaagatttaccaagcaaatggaaaacagaaaaaggcaggggttgcaatcctagtctcagataaaacagaatttaaaccaacaaagatcaaaagagacaaagaaggccattacataatggtaaagggatcaattcaacaagaagagctaactatcctaaatatatatgcacccaatacaggagcacccagattcacaaagcaagtccttagagacctacaaagagacttagactccaacacaataataacgggagactttaacaccccactgtcaacattagacagatcaatgagacagaaagttaacaaggatatccaggaattgaactcagctctgcaccaagcagacctaatagacatctacagaactctccaccccaaatcaacagaaaatacattcttttcggcaccacaccacacctattccaaaattgaccacatagtgggaagtaaagcactcctcagcaaatgtaaaagaaaagaaattataacaaactgtctctcagaccacagtgcaatcaaactagaactcaggattaagaaactccctcaaaactgctcaactatatggaaactgaacaacctgctcctgaatgactactgggtacataacgaaatgaaggcagaaataaagatgttgtttgaaaccaatgagaacaaagacacaacataccagaatctctgggacacattgaaagcagtgtgtagagggaaatttatagcactaaatgcccacgggagaaaacaggaaagatctaaaattgacaccctaacatcacaattaaaagaactagcaaagcaagagcaaacacattcaaaagctagcagaaggcaagaaataactaagatcagagcagaactgaaggaaatagagacacaaaaaacccttcaaaaaattaatgaatccaggagctggttttttgaaaggatcaacaaaattgatagaccgctagcaagactaataaagaaaaaaagagagaagaatcaaatagacacaataaaaaatgataaaggggatatcaccaccgatcccacagaaatacaaactaccatcagagaatactacaaacacctctacgcaaataaactagaaaatctggaagaaatggatacattcctcgacacatacactctcccaagactaaaccaggaagaagttgaatctctgaatcgaccaataacaggctctgaaattgtggcaataatcaatagtttaccaaccaaaaagagtccaggaccagatggattcacagccgaattctaccagaggtacaaggaggaactggtaccattccttctgaaactattccaatcaatagaaaaagagggaatcctccctaactcattttatgagaccagcatcattctgataccaaagccgggcagagacacaaccaaaaaagagaattttagaccaatatccttgatgaacattgatgcaaaaatcctcaataaaatactggcaaaccgaatccagcagcacatcaaaaagcttatccaccatgatcaagtgggcttcatccctgggatgcaaggctggttcaatatacgcaaatcaataaatgtaatccagcatataaacagagccaaagacaaaaaccacatgattatctcaatagatgcagaaaaagcctttgacaaaattcaacaacccttcatgctaaaaactctcaataaattaggtattgatgggacgtatttcaaaataataagagctatctatgacaaacccacagccaatatcatactgaatggacaaaaactggaagcattccctttgaaaactggcacaagacagggatgccctctctcaccgctcctattcaacatagtgttggaagttctggccagggcaatcaggcaggagaaggaaataaagggtattcaattaggaaaagaggaagtcaaattgtccctgtttgcagacgacatgattgtttatctagaaaaccccatcgtctcagcccaaaatctccttaagctgataagcaacttcagcaaagtctcaggatacaaaatcaatgtacaaaaatcacaagcattcttatacaccaacaacagacaaacagagagccaaatcatgagtgaactcccattcacaattgcttcaaagagaataaaatacctaggaatccaacttacaagggatgtgaaggacctcttcaaggagaactacaaaccactgctcaaggaaataaaagaggagacaaacaaatggaagaacattccatgctcatgggtaggaagaatcaatatcgtgaaaatggccatactgcccaaggtaatttacagattcaatgccatccccatcaagctaccaatgactttcttcacagaattggaaaaaactactttaaagttcatatggaaccaaaaaagagcccgcattgccaagtcaatcctaagccaaaagaacaaagctggaggcatcacactacctgacttcaaactatactacaaggctacagtaaccaaaacagcatggtactggtaccaaaacagagatatagatcaatggaacagaacagagccctcagaaataatgccgcatatctacaactatctgatctttgacaaacctgagaaaaacaagcaatggggaaaggattccctgtttaataaatggtgctgggaaaactggctagccatatgtagaaagctgaaactggatcccttccttacaccttatacaaaaatcaattcaagatggattaaagatttaaacgttaaacctaaaaccataaaaaccctagaagaaaacctaggcattaccattcaggacataggcgtgggcaaggacttcatgtccaaaacaccaaaagcaatggcaacaaaagacaaaattgacaaatgggatctaattaaactaaagagcttctgcacagcaaaagaaactaccatcagagtgaacaggcaacctacaacatgggagaaaatttttgcaacctactcatctgacaaagggctaatatccagaatctacaatgaactcaaacaaatttacaagaaaaaaacaaacaaccccatcaaaaagtgggcgaaggacatgaacagacacttctcaaaagaagacatttatgcagccaaaaaacacatgaagaaatgctcatcatcactggccatcagagaaatgcaaatcaaaaccactatgagatatcatctcacaccagttagaatggcaatcattaaaaagtcaggaaacaacaggccagaaaagaccaaaagttttttacctcctttgccaacacaaagttcaattcacagtggtttcctagagcattgtgttgaacaggattctgaggctctgtctggagaggctggtaaaagtctgatgtttgccatgggtgtaggaagtgaacgagcaaagcat

SEQ ID NO: 14537 - DNA, 5808 bp, Homo sapiens
  SIMILAR (1)..(450): 861254mologous to Cloning vector pZC320 SopB,accession number U26464,Smith-Waterman Score=632.
atgggagactttaacaccccactgtcaacattagacagatcaacgagacagaaagttaacaaggatacccaggaattcaactcagctctgtaccaagcggacctaatagacatctacagaactctccaccccaaatcaacagaatatacatttttttcagcaccacaccacacctattccaaaattgaccacatagttggaagtaaagctctcctcagcaaatgtgaaagaacagaaattataacaaactatctctcagaccacagtgcaatgaaactagaactcaggattaagaatctcactcaaaactgctcaactacatggaaactaaacaacctgctcctgaatgactactgggtacataacgaaatgaaggcagaaataaagatgttctttgaaaccaacgagaacaaagacacaacaaaccagaatctctgggacgcattcaaagcagtgtgtagagggaaatttatagcactgaatgcccacaagagaaagcaggaaagatccaaaattgacaccctaacatcacaattaaaagaactagaaaagcaagagcaaacacattcaaaagctagcagaaggcaagaaataactaaaatcagagcagaactgaaggaaatagagacacaaaaaacccttcaaaaaatcaatgaatccaggagctggttttttgaaaggatcaacaaaattgatagaccgctagcaagactaataaagaaaaaaagagagaagaatcaaatagacacaataaaaaatgataaaggggatatcaccaccgatcccacagaaatacaaactaccatcagagaatactacaaacacctctacgcaaataaactagaaaatctagaagaaattaataaattgctcgacacatacactctcccaagactaaaccaggaagaagttgaatctctgaatagaccaataacaggagctgaaattggggcaataatcaatagtttaccaaccaaaaagagtccaggaccagatggattcacagccgaattctaccagaggtacaaggaggaactggtaccattccttctgaaactattccaatcaatagaaaaagaggaaatcctccctaactcattttatgaggccagcatcattctgataccaaagccgggcagagacacaaccaaaaaagagaattttagaccaatatccttgatgaacatcgatgcaaaaatcctcaataaaatactggcaaaccgaatccagcagcacatcaaaaagcttatccaccatgatcaagtgggcttcttccctgggatgcaaggctggttcaatatacgcaaatcaataaatgtaatccagcatataaacagagccaaagacaaaaaccacatgattatctcaatagatgcagaaaaagcctttgacaaaattcaacaacccttcatgctaaaaactctcaataaattaggtattgatgggacgtatttcaaaataataagagctatctatgacaaacccacagccaatatcatactgaatgggcaaaaactggaagcattccctttgaaaactggcacaagacagggatgccctctctcaccgctcctattcaacatagtgttggaagttctggccagggcaatcaggcaggagaaggaaataaagggtattcaattaggaaaagaggaagtcaaattgtccctgtttgcagacgacatgattgtttatctagaaaaccccatcgtctcagcccaaaatctccttaagctgataagcaacttcagcaaagtctcaggatacaaaatcaatgtacaaaaatcacaagcattcttatacaccagcaacagacaaacagagagccaaatcatgagtgaactcccattcacaattgcttcaaagagaataaaatacctaggaatccaacttacaagggatgtgaaggacctcttcaaggagaattacaaaccactgctcaaggaaataaaagaggatacaaacaaatggaagaacattccatgctcatgggtaggaagaatcaatatcgtgaaaatggccatactgcccaaggtaatttacagattcaatgccatccccatcaagctaccaatgactttcttcacagaattggaaaaaactactttaaagttcatatggaaccaaaaaagagcccgcatcgccaagtcaatcctaagccaaaagaacaaagctggaggcatcacactacctgacttcaaactatactacaaggctacagtaaccaaaacagcatggtactggtaccaaaacagagctatagatcaatggaacagaacagagccctcagaaataacaccgcatacctacaactatctgatctttgacaaacctgagaaaaacaagcaatggggaaaggattccctatttaataaatggtgctgggaaaactggctagccatatgtagaaagctgaaactggatcccttccttacaccttatacaaaaatcaattcaagatggattaaagatttaaacgttagacctaaaaccataaaaaccctagaagaaaacctaggcattaccattcaggacataggcatgggcaaggacttcatgtccagaacaccaaaagcaatggcaaccaaagccaaaattgacaaatgggatctaattaaactaaagagcttctgcacagcaaaagaaactaccatcagagtgaacaggcaacctacaacatgggagaaaattttcgcaacctactcatctgacaaagggctaatatccagaatctacaatgaactcaaacaaatttacaagaaaaaaacaaacaaccccatcaaaaagtgggagaaggacatgaacagacacttctcaaaagaagacatttatgcagccaaaaaacacatgaaaaaatgctcatcatcactggccatcagagaaatgcaaatcaaaaccactatgagatatcatctcacaccagttagaatggcaatcattaaaaagtcaggaaacaacagacttcttggaagtgccctagaatcagcaggtccaaatcaaactcagctggccgtgggtcagccattgcagccccacctgccacgggctccaggaagagcagtcatcagtatggagaaggccggactctgctcagaagccactgagcaggtgctccatagactcaccagctggagcggggtcacatctcggaggcaccgtcagcaccaggagggcagccaagcaagggtatggcatttccgagcctctgcggtcaagggtatcgcatttccgagcctctgcggtcaagggtatggcgtttccgagcctctgcggtcaagggtatggcgtttccgagcctctgcagtcaagagcccagagatgggttgtcggggcagctgtgggggcatcccagatgtgggtgccaacatgcgtgatgacctgacaccagtgtgtgatgacctggcaccagtgcttgatgacctgacaccagtgcatcatgacctgacaccagcgcgcaatgacctgacaccagtgcacgatgacctggcaccagtgcgtgatgacctgacaccagtgcgtcatgacctgacaccagtgcgtgatgacctggcaccagtgcgcgatgacctgacaccagtgtgcgatgacctggcaccagtgtgcgatgacgtggccccagtgtgccatgacctggcaccagtgcgcgatgacctgacaccagtgtgcgatgacctggcaccagtgcacaatgaccttgcagcaatccaaacctacctgcaagctgcaagcgatgtgcctgtgggacacagcctggaccccgctgcgaactacaactccccgaaattccgctcccggaaccagagctacatgagggccgtcagcaccctgagccaggccagctgcgtgagccaggtgagcgaggcggagatcaatgggcaattcgagtccgtgtgcgagtccgtcttcagtgaagttgaatctcaggccatggatgccctcgacctcccgggatgtttccgaacaaggagtcacagctaccttcgagccattcaagccggctactcccaagatgacgaatgtattcccatgatgacaccctctgacatcacctccaccatcaggtcaacagcagaaggcgagcgtgatgcagataaatcgtgcatctgtatcaggaactgcatatactggaattacaacatgaatgctgggatgatctcccaggtgatgtttgccattggtggtggaggccgaataatgccgcacagttctctgtatgatagtgtgacggtggagttcatgtggcaacttgactgggccatggagtgcccaaatatctggttaaacattattgtggggtgccctgagcccaaccgaatgaagcgctggccccgtcagcagccatggtcacgtccacttggaagttccaaatcccgaggttcctgcagagagcagctctctgctgtggcaccagctgctgtgttcttcagaaaatacaagttctcgccgtgtgatgtgatgttcaaaccttttcaatggaaacaggaagtgtctcgaacagcagagcagctgacatcacttcattttactgtctacatgttaaatgctgctgtacagccggtggtacagaatgccccatgcaactcgagttcgggaggagactggctggtgacggccacagctgtctcatatacaaattacaagaaaacgcccccaccggtgccccctcggaccacctccaagcctctgatctcggtgacggcgcagagcagcaccgaatccacccaggacgcctaccaggacagccgcgcacagaggatgtccccgtggccccaggacagccgcggcctctacaactccacggacagcctggacagcaacaaggccatgaacctcgcgctggagacggccgctgcccagcgccacctgccagagagccagagcagctctgtgcggaccagcgacaaggccatcctggtgtccaaggcggaggaactcctcaagagccgctgctcctccatcgggattcagatgaagacaaggggctcaccggggtccctaacctgcctgcagccctgggcctcgctgggctccggcgccgaattacacccggtgaaagtggacgtctctgtccgttcccctggatccacggcggcggccgagagctccagggttttctcgcgctctgtcttctgtgcggcacccggctctggggtggaaacggccacagattctgacacggagagccgcggtctgcgggaataccactctgtcggggtgcaagtggaagatgagaagcgacacggacgttttaaacgttctaacagcgtcacggccgccgtccaagctgacctggagctggaggggttcccaggccacatcaccacggaggacaaaggccttcagttcggctcatccttccagcggcactccgagcccagcacccccacccagtacagcgcggtgagaactgtacggacccaggggctcttcagctatagagaaaactatcggacccaagtggacacctccaccctgccccctccagacccctggctggagcccgccatcgacacggtagagactgggaggatgtctccgtgccgcagggatggctcgtggtttttgaagctgctgcacgcagagacaaagaggatggaaggctggtgcaaagagatggagagagaggcggaggagaacgacctctcggaggaaagaggtgacattggacgccgaatgttggggagatgctgccttccacgtgacccacagtccccgcagcacggctgcatggggctggtgcaagtcagcacagccgtgttccgatcgttcacatggcgtttgcatttctcatggttagggtacatttaa

SEQ ID NO: 14538 - DNA, 4093 bp, Homo sapiens
  SIMILAR (1129)..(2826): 981254mologous to Homo sapiens putative p150,accession number U93567,Smith-Waterman Score=2849.
atggggaaaaaacagaacagaaaaactggaaactctaaaacgcagagtgcctctcctcctccaaaggaacgcagttcctcaccagcaacggaaaaaagctggatggagaatgactttgacgagctgagagaagaaggtttcagacgatcaaattactctgagctacgggaggacattcaaaccaaaggcaaagaagttgaaaactttgaaaaaaatttagaagaatgtataactagaataaccaatacagagaagtgcttaaaggagctgatggagctgaaaaccaaggctcgagaactacgtgaagaatgcagaagcctcaggagccgatgtgatcaactggaagaaagggtatcagcaatggaagatgaaatgaatgaaatgaagcgagaagggaagtttagagaaaaaagaataaaaagaaatgagcaaagcctccaagaaatatgggactatgtgaaaagaccaaatctacgtctgactggtgtacctgaaagtgacggggagaatggaaccaagttggaaaacactctgcaggatattatccaggagaacttccccaatctagcaaggcaggtcaatgttcagattcaggaaatacagagaacgccacaaagatactcctcgagaagagcaactccaagacacataattgtcagattcaccaaagttgaagtgaaggaaaaaatgttaagggcagccagagagaaaggtcgggttaccctcaaagggaagcccatcagactaacagcggatctctcggcagaaaccctacaagccagaagagagtgggggccaatattcaacattcttaaagaaaagaattttcaacccagaatttcatatccagccaaactaagcttcataagtgaaggagaaataaaacactttacagacaagcaaatgctgagagattttgtcaccaccaggcctgccctaaaagagctcctgaaggaagtgctaaacatggaaaggaacaaccagtaccagccgctgcaaaatcatgccaaaatacagatcaacgagacagaaagtcaacaaggatacccaggaattgaactcagctctgcaccaagcggacctaatagacatctacagaactctccacaccaaatcaacagaatatactttttttcagcaccacaccacacctattccaaaattgaccacatagttggaagtaaagctctcctcagcaaatgtaaaagaacagaaattataacaaactatctctcagaccacagtgcaatcaaactagaactcaggattaagaatctcaatcaaagccgctcaactacatggaaactgaacaacctgctcctgaatgactactgggtacataacgaaatgaaggcagaaataaagatgttctttgaaaccaacgagaacaaagacacaacataccagaatctctgggacgcattcaaagcagtgtgtagagggaaatttatagcactaaatgcccacaagagaaagcaggaaagatccaaaattgacaccctaacatcacaattaaaagaactagaaaagcaagagcaaacacattcaaaagctagcagaaggcaagaaataactaaaatcagagcagaactgaaggaaatagagacacaaaaaacccttcaaaaaatcaatgaatccaggagctggttttttgaaaggatcaacaaaattgatagaccgctagcaagactaataaagaaaaaaagagaggagaatcaaatagacacaataaaaaatgataaaggggatatcaccaccgatcccacagaaatacaaactaccatcagagaatactacaaacacctctatgcaaataaactagaaaatctagaagaaatggataaattccttgacacatacactctcccaagactaaaccaggaagaagttgaatctctgaatagaccaataacaggagctgaaattgtggcaataatcaatagtttaccaaccaaaaagagtccaggaccagatggattcacagctgaattctaccagaggtacaaggaggaactggtaccattccttctgaaactattccaatcaatagaaaaagagggaatcctccctaactcattttatgaggccagcatcattctgataccaaagccgggcagagacacaaccaaaaaagagaattttagaccaatatccttgatgaacattgatgcaaaaatcctcaataaaatactggcaaaccgaatccagcagcacatcaaaaagcttatccaccatgatcaagtgggcttcatccctgggatgcaaggctggttcaatatacgcaaatcaataaatgtaatccagcatataaacagagccaaagacaaaaaccacatgattatctcaatagatgcagaaaaagcctttgacaaaattcaacaacccttcatgctaaaaactctcaataaattaggtattgatgggacgtatttcaaaataataagagctatctatgacaaacccacagccaatatcatactgaatgggaaaaaactggaagcattccctttgaaaactggcacaagacagggatgccctctctcactgctcctattcaacatagtgttggaagttctggccagggcaatcaggcaggagaaggaaataaagggtattcagttaggaaaagaggaagtcaaattgtccctgtttgcagacgacatgattgtttatctagaaaaccccatcgtctcagcccaaaatctccttaagctgataagcaacttcagcaaagtctcaggatacaaaatcaatgtacaaaaatcacaagcattcttatacaccaacaacagacaaacagagagccaaatcatgagtgaactcccagttcacaattgcttcaaagagaataaaatacctaggaatccaacttacaagggatgtgaaggacctcttcaaggagaactacaaaccactgctcaaggaaataaaagaggatacaaacaaatggaagaacattccatgctcatgggtaggaagaatcaatatcgtgaaaatggccatactgcccaaggtaatttacagattcaatgccatccccatcaagctaccaatgactttcttcacagaattggaaaaaactactttaaagttcatatggaaccaaaaaagagcccgcatcgccaagtcaatcctaagccaaaagaacaaagctggaggcatcacactacctgacttcaaactatactacaaggctacagtaaccaaaacagcatggtactggtaccaaaacagagatatagatcaatggaacagaatagagccctcagaaataacgccgcatacctacaactatctgatctttgacaaacctgagaaaaacaagcaatggggaaaggattccctatttaataaatggtgctgggaaaactggctagccatatgtagaaaactgaaactggatcccttccttacaccttatacaaaaatcaattcaagatggattaaagatttaaacgttagacctaaaaccataaaaaccctagaagaaaacctaggcattaccattcaggacataggcgtgggcaaggacttcatgtccaaaacaccaaaagcaatggcaacaaaagccaaaattggcaaatggtacctaattaaactaaagagcttctgcacagcaaaagaaactaccatcagagtgaacaggcaacctacaacatgggagaaaattttcgcaacgtactcatctgacaaagggctaatatccagaatctacaatgaactcaaacaaatttacaagaaaaaaacaaacaaccccatcaaaaagtgggcgaaggacatgaacagacacttctcaaaagaagacatttatgcagccaaaaaatacgtgaaaaaatgctcatcatcactggccatcagagaaatgcaaatcaaaaccactatgagataccatctcacaccagttagaatggcaatcattaaaaagtcaggaaacaacagtgatctctaccttatgtctgcaggaaccagttgtttaatgggcagacactgggacagtggacaagaaacgtgtgtccaaaatgtcgtgctggacacgtgcagcccctctgaacaactcttaagagctattgctgatcttgtcccgcaaccctga

SEQ ID NO: 14539 - DNA, 3230 bp, Homo sapiens
  SIMILAR (414)..(2981): 981254mologous to Homo sapiens putative p150,accession number U93563,Smith-Waterman Score=4383.
ctttcccaagtttcaagatagctattcctaaaaatgatcatgggcatgaacaacatttttggggatatagagttccaaataatgccatggaagatacagcttatcaactggtccaccagtaccctacaagaatgcaggcccggagatgcaggatcgcgctgtcacagtggtcctcttcgcatcctctcccggcaaagagagatgctccggttaccagcggcgcgcatccccgcaggcgcctctcctctcgccgatacccacccaggcagtcccgacaggcgcgcctgcctacctggtggccggctgtcagcgaagcggcggtgcctcagccccttctcagctgctacagcgctcccagcgccatgttcccggtctccccgggcgcacgctggggaactactactggctggaagttctttgaaaccaacgagaacaaagacacaacataccagaatctctgggacgcattcaaagcagtgtgtagagggaaatttataccactaaatgcccacaagagaaagcaggaaagatccaaaattgacaccctaacatcacaattaaaagaactagaaaagcaagagcaaacacattcaaaagctagcagaaggcaagaaataactaaaatcagagcagaactgaaggaaatagagacacaaaaaacccttcaaaaaatcaatgaatccaggagctggttttttgaaaggatcaacaaaattgatagaccgctagcaagactaataaagaaaaaaagagagaagaatcaaatagacacaataaaaaatgataaaggggatatcaccaccaatcccacagaaatacaaactaccatcagagaatactacaaacacctctacgcaaaaaaactagaaaatctagaagaaatggatacattcctcgacacatacactctcccaagactaaaccaggaagaagttgaatctctgaatagaccaataacaggagctgaaattgtggcaatattcaatagtttaccaaccaaaaagagtccaggaccagatggattcacagccgaattctaccagaggtacaaggaggaactggtaccattccttctgaaaatattccaatcaatagaaaaagagggaatcctccctaactcattttatgaggccagcatcattctgataccaaagccaggcagagacacaaccaaaaaagagaattttagaccaatatccttgatgaacattgatgcaaaaatcctcaataaaatactggcaaaccgaatccagcagcacatcaaaaagcttatccaccatgatcaggtgggcttcatccctggaatgcaaggctggttcaatatacgcaaatcaataaatgtaatccagcatataaacagagccaaagacaaaaaccacatgattatctcaatagatgcagaaaaagcctttgacaaaattcaacaacccttcatgctaaaaactctcaataaattaggtattgatgggacgtatttcaaaataataagagctatctatgacaaacccacagccaatatcatactgaatgggcaaaaactggaagcattccctttgaaaactggcacaagacagggatgccctctctcaccgctcctattcaacatagtgttggaagttctggccagggcaatcaggcaggagaaggaaataaagggtattcaattaggaaaagaggaagtcaaattgtccctgtttgcagacgacatgattgtttatctagaaaaccccatcatctcagcccaaaatctccttaagctgataagcaacttcagcaaagtctcaggatacaaaatcaatgtacaaaaatcacaagcattcctatacaccaacaacagacaaacagagagccaaatcatgagtgaactcccattcacaattgcttcaaagagaataaaatacctaggaatccaacttacaagggatgtgaaggacctcttcaaggagaactacaaaccactgctcaaggaaataaaagaggatacaaacaaatggaagaacattccatgctcatgggtaggaagaatcaatatcgtgaaaatggccatactgcccaaggtaatttacagattcaatgccatccccatcaagctaccaatgactttcttcacagaattggaaaaaactactttaaagttcatatggaaccaaaaaagagcccgcatcgccaagtcaatcctaagccaaaagaacaaagctggaggcatcacactacctgacttcaaactatactacaaggctacagtaaccaaaacagcatggtactggtaccaaaacagagatatagatcaatggaacagaacagagccctcagaaataacgccacatacctacaactatctgatctttgacaaacctgagaaaaacaagcaatggggaaaggattccctatttaataaatggtgctgggaaaactggctagccatatgtagaaagctgaaactggatcccttccttacaccttatacaaaaatcaattcaagatggattaaagatttaaacgttagacctaaaaccataaaaaccctagaagaaaacctaggcagtaccattcaggacataggcgtgggcaaggacttcatgtccaaaacaccaaaagcaatggcaacaaaagccaaaattgacaaatgggatctaattaaactaaagagcttctgcacagcaaaagaaactaccatcagagtgaacaggcaacctacaacatgggagaaaattttcgcaacctactcatctgacaaaaggctaatatccagaatctacaatgaactcaaacaaatttacaagaaaaaaacaaacaaccccatcaaaaagtgggcgaaggacatgaacagacacttctcaaaagaagacatttatgcagccaaaaaacacatgaaaaaatgctcatcatcactggccatcagagaaatgcaaatcaaaaccactatgagatatcatctcacaccagttagaatggcaatcattaaaaagtcaggaaacaacagccagagaggcttttatgattctataaaaagccccacaaaggaatcctatgcagccataaaaaggaacgagatcatgtcctttgcaggctatggatggagctggacgctgttatccttagcaactaacacaggaacggaaaaccaaacactgcatattttcacttataagtgggagctgaacaatgagagcacatggatacatgaagggatgggggatagttaccctgggccattcgatgtccagtaa

SEQ ID NO: 14540 - DNA, 2815 bp, Homo sapiens
  SIMILAR (1396)..(2811): 911254mologous to Homo sapiens putative p150,accession number U93574,Smith-Waterman Score=2234.
atggataaattcttcgacacatacaccctcccaagactaaaccaggaagaagttgaatctctgaatagaccaataacaggctctgaaattgaggcaataattaatagtgtaacaaccaaaaaaagtccaggaccagatggattcacagccgaattctaccagaggtacgaggaggagctgaaaaagagggaatcctccctaactcattttatgaggagcatcatcctgataccaaagcccggcagagacataacaaaaaaagagaattttagaccaatatccctgatgaacatcgatgcaaaaatcctcaataaaatactggcaaaccaaatccagcagtacatcaaaaagcttatccaccatgatcaagtgggcttcatccctgggatgcaaggctggttcaacatacgcaaatcaataaaggtaacccagcatataaacagaaccaaagacaaaaaccacatgattatctcaatagatgcagtaaaggcctttgacaaaattcaacagcgcttcatgctaaaaactctcaataaattaggtattgatgggacatatctcaaaataataagagctatctatgacaaacccacagccaatatcatactgaatgggcaaaaactggaagcattccctttgaaaactggcacaagacagggatgccctctctcaccactcctattcaacatagcgttggaagttctgtccagggcaatcaggcaggagaaggaaataaaggatattcaattaggaaaagaggaagtcaaattctccctgtttgcagatgacatgattgtatatctagaaaaccccatcgtctcagcccaaaatctccttaagctgataggcaacttcagcaaagtctcaggatacaaaatcaatgcgcaaaaatcacaagcattcttatacaccaataacagacaaacagagagccaaatcatgagtgaactcccattcacaattgcttcaaagagaataaaatatctaggaatccaacttacaatggacgtgaaggacttcttcaaggagaactacaaaccaatgctcaatgaaataaaagaggatacaaacaaatggaagaacattccatgctcatgggtaggaagaatcaatatcgtgaaaatggccatactgcccaagatccactccagagtgacagttctgctgcgctcagatactgtgctgcatattgtgaagcttgcagtgaaaattcctacaattgtcctgcttctggaggggagccccagggccttgaggaaacacaggcagaagccagggagtggttccagcaggcctcgagtgagacccagtgctgtgctggcatcaggtctgagtcaatgcagtcatagtggtggtggcaacaggggtgcttatgtcactccaccccaagctttagcagaaaaggcctttgacaaaattcaacaacccttcatgctaaaaactctcaataaattaggtattgatgggacatatctcaaaataataagagctatctatgacaaacccacagccaatatcatactgaatgggcaaaaactggaagcattccctttgaaaactggcacaagacagggatgccctctctcaccactcctattcaacatagccttggaagttctggccagggcaatcaggcaggagaaggaaataaagggtattcaattcggaaaagaggaagtcaaattgtccctgtttgcagatgacatgattgtatatctagaaaaccccattgtctcagcccaaattctccttaagctgataagcaacttcagcaaagtctcaggatacaaaatcaatgtacaaaaaccacaagcattcttacacaccaataacagacaaacagagaaccaaatcatgagtgaactcccattcacgattgcttcaaagagaataaaatacctaggaatccaacttacaagggacgtgaaggacctcttcaaggagaactacaaaccactgctcaaggaaataaaagaggatacaaacaaatggaagaacattccatgctcatgggtaggaagaatcaatatcgtgaaaatggccatactgcccaaggtaatttatagattcaatgccatccccagcaagctaccaatgactttcttcacagaattggaaaaaaatactttaaagttcatatggaaccaaaaaagagcccgcatcgccaagtcaatcctaagccaaaagaacaaagctggaggcatcacgctacctgacttcaaactatactacaaggctacagtaaccaaaacagcatggtactggtaccaaaacagagatatagatcaatggaacagaacagagccctcagaaataacgccgcatatctacaactatctgatctttgacaacaaacctgagaaaaacaagcaatggggaaaggattccatgtttaataaatggtgctgggaaaactggctagccatatgtagaaagctaaaactggatcccttccttacaccttatacaaaaatcaattcaagatggattaaagacttaaacttcagacctaaaaccataaaaaccctagaagaaaacctaggcattaccattcaggacataggcatgggcaagggcttcatgtctaaaacaccaaaagcaatggcaacaaaagacaaaattgacaaatgggatctaattaaactaaagagcttctgcacagcaaaagaaactaccatcagagtgaacaggcaacctacaaaatgggagaaaatttttcgcaacctactcatctgacaaagggctaatatccagaatctacaatgaactcaaacaaatttacaagaaaaaaacaaccccatcaaaaagtgggtga

SEQ ID NO: 14541 - DNA, 3160 bp, Homo sapiens
  SIMILAR (469)..(2850): 981254mologous to Homo sapiens putative p150,accession number U93563,Smith-Waterman Score=4033.
atggtaaagggatcaattcaacaagaggagctaactatcctaaatatttatgcacccaatacaggagcacccagattcataaagcaactcctgagtgacctacaaagagacttagactcccacacattaataatgggagactttaacaccccactgtcaacattagacagatcaacgagacagaaagtcaacaaggatacccaggaattgaactcagctctgcaccaagcagacctaatagacatctacagaactctccaccccaaatcaacagaatatacattgttttcagcaccacaccacacctattccaaaattgaccacatacttggaagtaaagctctcctcagcaaatgtaaaagaacagaaattataacaaactatctctcagaccacagtgcaatcaaactagaactcaggattaagaatctcactcaaagccgctcaactacatggaaactgaacaacctgctcctgaatgactactggagaaagcaggaaagatccaaaactgacaccctaacatcacaattaaaagaactagaaaagcaagagcaaacacattcaaaagctagcagaaggcaagaaataactaaaatcagagcagaactgaaggaaatagagacacaaaaaacccttcaaaaaatcaatgaatccaggagctggttttttgaaaggatcaacaaaattgatagaccgctagcaagactaataaagaaaaaagagaagaatcaaatagacacaataaaaaatgataaaggggatatcaccaccgatcccacagaaatacaaactaccatcagagaatactacaaacacctctacgcaaataaactagaaaatctagaagaaatggatacattcctcgacacatacactctcccaaggctaaaccaggaagaagttgaatctctgaatagaccaataacaggctctgaaattgtggcagtaatcaatagtttaccaaccaaaaagagtccaggaccagatggattcacagccgaattctaccagaggtacaaggaggaactggtaccattccttctgaaactattccaatcaatagaaaaagagggaatcctccctaactcattttatgaggccagcatcattctgataccaaagtcgggcagagacacaaccaaaaaagagaattttagaccgatatccttgatgaacattgatgcaaaaatcctcaataaaatactggcaaaccgaatccagcagcacatcaaaaagcttatccaccatgatcaagtgggcttcatccctgggatgcaaggctggttcaatatacgcaaatcaataaatgtaatccagcatataaacagagccaaagacaaaaaccacatgattatctcaatagatgcagaaaaagcctttgacaaaattcaacaacccttcatgctaaaaactctcaataaattaggtattgatgggacgtatttcaaaataataagagctatctatgacaaacccacagccaatatcatactgaatgggcaaaaactggaagcattccctttgaaaactggcacaagacagggatgccctctctcaccgctcctattcaacatagtgttggaagttctggccagggcaatcaggcaggagaaggaaataaagggtattcaattaggaaaagaggaagtcaaattgtccctgtttgcagacgacatgattgtttatctagaaaaccccattgtctcagcccaaaatctccttaagctgataagcaacttcagcaaagtctcaggatacaaaatcaatgtacaaaaatcacaagcattcttatacaccaacaacagacaaacagagagccaaatcatgagtgaactcccattcacaattgcttcaaagagaataaaatacctaggaatccaacttacaagggatgtgaaggacctcttcaaggagaactacaaaccactgctcaaggaaataaaagaggacacaaacaaatggaagaacattccatgctcatgggtaggaagaatcaatatcgtgaaaatggccatactgcccaaggtaatttacagattcaatgccatccccatcaagctaccaatgactttcttcacagaattggaaaaaactactttaaagttcatatggaaccaaaaaagagcccgcatcgccaagtcaatcctaagccaaaagaacaaagctggaggcatcacactacctgacttcaaactatactacaaggctacagtaaccaaaacagcatggtactggtaccaaaacagagatatagatcaatggaacagaacagagccctcagaaataatgccgcatatctacaactatctgatctttgacaaacctgagaaaaacaagcaatggggaaaggattccctatttaataaatggtgctgggaaaactggctagccatatgtagaaagctgaaactggatcccttccttacaccttatacaaaaatcaattcaagatggattaaagatttaaacgttagacctaaaaccataaaaaccctagaagaaaacctaggcattaccattcaggacataggcgtgggcaaggacttcatgtccaaaacaccaaaagcaatggcaacaaaagccaaaattgacaaatgggatctaattaaactaaagagcttctgcacagcaaaagaaactaccatcagagtgaacaggcaacctacaacatgggagaaaattttcgcaacctactcatctgacaaagggctaatatccagaatctacaatgaactcaaacaaatttacaagaaaaaaacaaacaaccccatcaaaaagtgggcgaaggacatgaacagacacttctcaaaagaagacatttatgcagccaaaaaaacacatgaaaaaatgctcaccatcaatggccatcagagaaatgcaaatcaaaaccacaatgagttatcatctcacaccagccaaaattcagaatgggtcgagaaatatagttaagagcaacatgaattgcttaatatcgcaaaacagtcctcaggtaccgtgtacaactgttgcaaaatatcatcctaattcccgtgtaactccagaaccacgaagtggaacaccaaaggaagacagaagatggatacttatgacttctgggaaattatacttccttattcaaaaatctactgaacacatgctgtctgggagaaaagattga

SEQ ID NO: 14542 - DNA, 8065 bp, Homo sapiens
  SIMILAR (4510)..(5910): 921254mologous to Homo sapiens putative p150,accession number U93569,Smith-Waterman Score=2248.
atggatacattcctcgacacatacactctcccaagactaaaccaggaagaagttgaatctctgaatagaccaataacaggagctgaaattgtggcaataatcaatagtttaccaaccaaaaagagtccaggaccagatggattcacagctgaattctaccagaggtacaaggaggaactggtaccattccttctgcaactattccaatcaatagaaaaagagggaatcctccctaactcattttatgaggccagcatcattctgataccaaagccgggcagagagacaaccaaaaaagagaattttagaccaatatccttgatgaacattgatgcaaaaatcgtcaataaaatactggcaaaacgaatccagcagcacatcaaaaagcttatccaccatgatcaagtgggcttcatccctgggatgcaaggctggttaaatacatgcaaatcaataaatgtaatccagcatataaacagagccaaagacaaaaaccacatgattatctcaatagatgcagaaaaagcctttgacaaaattcaacaacccttcatgctaaaaactctcaagaaattaggtactgatgggacgtatttcaaaatagtaagagctatctatgacaaacccacagccaatatcatactgaatgggcaaaaactggaagcattccctttgaaaactggcacaagacagggatgccctctctcaccattcctattcaacatagtgttggaagttctggccagggccatcaggcagaaggaaataaaaggtattcagttaggaaaagaggaagtcatattgtccctgtttgcagatgacatgattgtatatctagaaaaccccattgtctcagcccagaatctccttaagctgataagcaacttcagcaaagtctcaggatacaaaaccaatgtacaaaaatcacaagcattcttatataccaataacatacaaacagggagccaaatcatgagtgacctcccattcacaattgcttcaaagagaataaaatacctaggaatccaacttacaagggacatgaaggacctcttcaagaactacaaaccactgctcactgaaatgaaacaaagaaatggaagaacattccatgctcatggaattggaaaaaactactttaaagttcataggaaccgaaaaagagcccgcatcgccaagtcaatcctaagccaaaagaacaaagctggaggcatcacactacctgacttcaaactatactacaaggctacagtaaccaaaacagcatggtactgggaccaaaacagagatatagatcaatggaacagaacagagccctcagaaataacgccacatatctacaactatctgatctttgacaaacctgagaaaaacaagcaatggggaaaggaatccctatttaataaatggtgctgggaaaactggctagccatatgtagaaagctgaaactggatcccttccttacaccttatacaaaaattaattcaagatggattaaagacttaaaccttagacctaaaaccataaaaaccctagaagaaaacctaggcattaccattcaggacataggcatgggcaaggacttcatgtctaaaacaccaaaagcaatggcaacacaagccaaaattgacaaatgggagctaattaaactaaagagcttctgcacagcaaaagaaactatcatcagagtgaacaggcaacctacaaaatgggagaaaattttcacaacctactcatctgacaaaggtctaatatccagaatctacaatgaactcaaacaaatttacaagaaaaaaaaacaaccccatcaaaaagattttgcctaccattttacagtatttgtcttctattttggagcctttttattggaagcagcagccacatccctgcatgatttgcattgcaatacaaccataaccgggcagccactcctgagtgataaccagtataacataaacgtagcagcctcactatcacctacctttgcaggtctgggtgaattatctggtggtgtgacccacacactcattcttgaagggtctgaaaccaagacaacagtaactttttcagttatatccaggtggtcttcagattatgacatacaacaggagaattatgccagtcccagtacaaatctgtcaacgtcagatgtggccaatatgatgattcaggcctttcccaaaaatctccttaagctgataagcaacttcagcaaagtctcaggatacaaaatcaatgtgcaaaaatcacaagcattcctatacaccaataacagacaaacagagagccaaatcatgagtgaactcccattcacaattgcttcaaagagaataaaatacctaggaatccaacttacaagggatgtgaaggacctcttcaaggagaactacaaaccactgctcaatgaaataaaagaggatacaaacaaatggaagaacatttcatgctcctgggtaggaagaatcaatattgtgaaaatggccatactgcccaaggaacgcagctcctcaccagcaacggaacaaagctggatggagaatgactttgatgagttgagagaagaaggcttcagacgatcaaacttctccgagctaaaggagaaagttcgaacccatcacaaacaagataaaaaccttgaaaaaaggagctggttttttgaaaagatcaacaaaatcgatagacctctagcaagactaataaagaagaaaagagagaagagtcaaataaacgcaataaaaaacgataaaggggatatcactgccgatcccacagaaatacaaactaccatcacagaatactataaacacctctatgcaaataaactagaaaatctagaagcaatggataaattccttgacacatacaccctcccaagaataaaccaggaagaagttgaatctctgaataggccaataacaggctctgaaactgaggcaataattaatagcttaccaaccaaaaaaagtccaggaccagatggattaacagctgaattctaccagaggtacaaggaggagctggtaccattccttctgaaactattccaatcaatagaaaaagagcgaatcctcccgaactcattttatgagggcatcatcctcctgataccaaagcctggcagagacaacacaaaaaaagataattttaaaccaatatccctgatgaacatggatgcaaaaatcctcaataaaatactggcaaaccgaatccagcagcacatcaaaaagcttatccaccatgatcaagtgggcttcatccctgggatgcaaggctggttcaacatatgcaaatcaataaatgtaatccagcatataaacagaaccaaagacaaaaaccacatgattatctcaacagatgcaggaaaggcctttgacaaaattcaacagcccttcatgctaaaaactctcaataaattaggtattgatgggatgaatctcaaaataataagagctatttatgacaaacccacagccaatatcatactgaatagacaaaaactggaagcattccctttgaaaactggcacaagacagggatgccctctctcaccactcctattcaacatagtgttggaagttctggccagggcaatcaggcaggagaaggaaataaagggtattcaattaggaaaagaggaagtcaaattgtccctgtttgcagatgacatgattgtatatctagaaaaccccatcgtctcagcccaaaatctccttaagctgataagcaacttcagcaaagtctcaggatacaaaatcagtgtgcaaaaatcacaagcattcttatacaccaataacagacaaacagagagccaaatcatgagtgaaatcccattcccaattgcttcaaagagaataaaatacctaggaatccaacttacaagggatgtgaaggacctctttaaggagaactgcaaaccactgctcaaggaaataaaagagaacacaaacaaatggaagaacattccatgctcatggatagaaagaatcaatattgtgaaaatggccatactccccaagaggactccattattatcgctgcctagtacattatatgaggagctgtggagacttaggtcctacttcccattgtgccctcaactttacaacatggagcagaataccacagactgggtaatttataaagaacagtgcatttggctcacagctctggagactggggagtccaagagcactgcaccagcatttggcaagggttatcccatggcagaatacatcatatggggcagattgacacctcacatggctggctactcctctgagacaaaacttccagaggaacgatcaggcagcaacatctgctgttcaccaatatccgctgttctgcagcctctgctgctgatacccaggcaaacagggtctggagtggacctccagcaaactccaacagacctgcagctgagggtcctgactgttagaaggaaaactaacaaacagaaaggacatccacaccaaaaccccatctgtacgtcaccatcatcaaagaccaaaggatcaaattcacacataacaatattaaccttaaatgtaaatgggctaaatgctccaattaaaagacacagactggcaaattggataaagagtcaagacccatcagtgtgctgtattcaggagacccatctcacgtgcagagacacacacaggatcaaaataaagggatggagggagatctaccaagcaaatggaaaacaaaaaaaggcaggggttgcaatcctagtctctgataaaacggactttaaaccaacaaagatcaaaagagacaaagaaggccattacatgatggtaaagggatcaattcaacaagaagagctaactaccctaaatatatatgcacccaatacaggagcacccagattcataaagcaagtccttagagacctacaaagagacttagactcccacacattaataatgggagactttaacaccccactgtcaacattagacagatcaacgagacagaaagttaacaaggatatccaggatttgaactcagctctgcaccaagtggacctaatagacatctacagaactctccaccccaaatcaacagaatatacattcttctcagcactacaccacatttattccaaaattgaccacatagttggaagtaaagcactcctcagcaaatataaaacaacagaaattataacaaactgtctctcagaccacagtgcaatcaaactcgaactcaggattaagaaactcactcaaaaccgctcaactacatggaaactgaacaacctgctcctgaatgactactgggtacataacaaaatgaaggcagaaataaatacattatttgaaaccaacgagaacaaagacacaacataccagaatctctgggacacattcaaagcagtgtgtagagggaaattcatagcactaaatgcccacaagagaaagcaggaaagatctaaaattgacaccctaacatcacaattaaaagaactagagaagcaagaacaaacacattcaaaagctagcagaaggcaagaaataactaagatcagagcaaaactgaaggaaatagagacacaaaaaatccttcaaaaaatcaatgaatccaggagctggttttttgaaaagatcaacaaaattgatagaccactagcaagaccaataaagaagaaaagagagaagaatcaaatagatgcaataaaaaatgataaaggggatatcaccactgatcccacagaaatacaaactaccatcagagaatactataaacacctctatgcaaataaactagaaaatctagaagaaatggataaattcctcaacacatacaccctcccaagactaaaccaggaagaagttgaatctctgaataaaccaataacaggctctgaaattgaggcaataattaatagcttaccaactaaaaaagagtccaggatcagaaggcttcacagccgaattctaccagaggtacaaggaggaaactgaaaaagagggaatcctccctaactcattttatgaggccagcatcattctgataccaaagccaggcagagacacaaccaaaaaagagaattttagaccaatatccttgatgaacattgatgcaaaaatcctcaataaaatactggcaaaccgaatccagcagcatatcaaaaagcttatccaccatgatcaagtgggcttcatccctgggatgcaaggctggttcaatatacgcaaatcaataaatgtaatccagcatataaacagagccaaagacaaaaaccacatgattatctcaatagatgcagaaaaggcctttgacaaaattcaacaacgcttcatgctaaaaaccctcaataaattaggtattgatgggacatatttcaaaataataagagctatctatgacaaacccacagccaatatcatactgaatgggcaaaaactggaagcattccctttgaaaactggcacaagacagggatgccctctctcaccactcctattcaacatagtgttggaagttctggccagggcaattaggcaggagaaggaaataaagggtattgaattaggaaaagaggaagtcaaattgtccctgtttgcagattacatgattgtatatctagaaaaccccattgtctcagcccaaaatctccttaagctgataagcaacttcagcaaagtctcaggatacaaaatcaatgtgcaaaaatcacaagcattcctatacaccaacaacagacaaacagagagccaaatcatgagtgaactcccatttacaattgcttcaaagagaataaaatacctaggaatccaacttacaagggatgtcaaggacctcttcaaggagaactacaaaccgctgctcaatgaaataaaagaggatacaaacaaatggaagaacattccatgctcatgggtaggaagaatcaatattgtgaaaatggccatactgcccaaggtaatttacagattcaatgccatccccatcaagctaccaatgcctttcttcacagaattggaaaaaactactttaaagttcatatggaaccaaaaaagagcccgcattgccaagataatcctaagccaaaagaacaaagctggaggcatcacactacctgagttcaaactatactacaaggctacaggaaccaaaacagcatggtatggtactggtaccaaaacagagatatagaccaatggaacagaacagagccctcagaaataataccacatatctacaaccatctgatctttgacaaacctgacaaaaacaagaaatggggaaatgattccctatttaataaatggtgctgggaaaactggctagccatatgtaggagaaagctgaaactggatcccttccttacaccttatacaaaaattaattcaagatggattaaagacttaaatgttagacctaaaaccataaaaaccctagaagaaaacctaggcaataccattcaggacataggcatgggcaaggacttcatgtctacaacaccaaaagcaatggcaacaaaagccaaaattgacaaatgggatctaattaaactaaagagcttctgcacagcaaaagaaactaccatcacagtgaacaggcaacctacagaatgggagaaaatttttacaatctacccatctgacaaagggctaatatccagaatctacaaagaactcaaacaaatttacaagaaaagaacaaacaaccccatcaacaagtgggtgaaggatatgaacagacacttctcaaaagaagacatttatacagccaaaaaacacgtggaaaaaacgctcatcatcactggccatcagagaaatgcaaatcaaatccacaatgagataccatctcacaccagttagagtggcaatcattaaaaagtcaggaaacaacaggtcacatttcaacatgagatttggagaggacagacacccgaatcacagcaatgggtctcagcaagcagctccatcagctgcctcagacttgtctggaaggtggcagacgtgggcaattcctgccttgctgaagagggatacactgctgagtgaatgctctgaagcagaggagcatttggtgcaactgaagttgtctgaa

SEQ ID NO: 14543 - DNA, 3986 bp, Homo sapiens
  SIMILAR (1637)..(3019): 901254mologous to Homo sapiens putative p150,accession number U93574,Smith-Waterman Score=2115.
atggagaatgactttgacgagctgagagaagaaggcttcagacgatcaaattactctgagctatgggaggacattcaaaccaaaggcaaagaagttgaaaactttgaaaaaaatttagaagaatgtataactagaataaccaatacagagaagtgcttaaaggagctgatggagctgaaaaccaaggctcgagaactacatgaagaatgcagaagcctcaggagccgatgtgatcaactggaagaaagggtatcagcaatggaagatgaaatgaatgaaatgaagggagaagggaagtttagagaaaaaagaataaaaagaaacgagcaaagcctccaagaaatatgggactatgtgaaaagaccaaatctacatctgattggtgtacctgaaagtgatggggagaatggaaccaagttggaaaacactctgcaggatattatccaggagaacttccccaatctagcaaggcaggccaacgttcagattcaggaaatacagagaatgccacaaagatactcctcgagaagagcaactccaagacacataattgtcagattcaccaaagttgaaatgaaggaaaaaatattaaaggcagccagagagaaagacagatcaacgagacagaaagtcaacaaggatacccaggaattgaactcagctctgcaccaagcagacctaatagacatctacagaactctccaccccaaatcaacagaatatacatttttttcagcaccacaccacacctattccaaaattgaccacatacttggaagtaaagctctcctcagcaaatgtgaaagaacagagattataacaaactatctctcagaccacagtgcaatcaaactagaactcaggattaagaatctcactcaaaaccgctcaactacatggaaactgaacaacctgctcctgaatgactactgggtacataacgaaatgaaggcagaaataaagatgttctttgaaaccaatgagaacaaagacacaacataccagaatctctgggatgcattcaaagcagtgtgtagagggaaatttatagcactaaatgcccacaagagaaagcaggaaagatccaaaattgacaccctaacatcacaattaaaagaactagaaaagcaagagcaaacacattcaaaagctagcagaaggcaagaaataactaaaatcagagcagaactgaaggaaatagagacacaaaaaacctttcaaaaaattaatgaatccaggagctggttttttgaaaggatcaacaaaattgatagaccgctagcaagactaataaagaaaaaaagagagaagaatcaaatagacacaataaaaaatgataaaggggatatcaccaccaatcccacagaaatacaaactaccatcagagaatattacaaacacctctacgcaaataaactagaaaatctagaagaaatggataaattcctcgacacaaacaccctcccaagactaaaccaggaagaagttgaatctctgaatagaccaataacaggatctgaaattgtggcaataatcaatagtttactaaccaaaaagagtccaggaccagatggattcacagccgaattctaccagagcatcatcctgataccaaagcctggcagagacacaaccaaaaaaagagaattttagaccaatatccttgatgaacattgatgcaaaaatccttcaataaaatactggcaaaccggaatccagcagcacatcaaaaagcttatccaccatggatcaagtgggcttcatccctgggaatgcaaggctggttcaatatacggtaaatcaataaacggtaatccagcatacaaacagaaccaaagacagaaaccacatgtttatctcaatagatgcagaaaaggcctttgacaaaattcaacaacccttcctgctaaaaactctcaataaattaggtattgatgggacgtatctcaaaataataagagctatctatgacaaacccatagccaatatcatactgaatgggcaaaaactggaagcattccctttgaaaactggcacaagacagggatgccctctctcaccactcctattcaacatagtgttggaagttctggctagggcaattaggcaggagaaggaaataaagggtattcagttacaaaaagaggaagtcaaattgtccctgtttgcagacgacatgattgtatatctagaaaaccccactgtctcagcccaaaatctccttaagctgataagcaacttcagcaaagtctcaggatacaaaatcagtgtgcaaaaatcacaagcattcttctacaccaacaacagacaaacagagagccaaatcatgagtgaactcccattcacaattgcttcaaagagaataaaatacctaggaatccaacttacaagggatgtgaaggacctcttcaaggagaactacaaaccactgctcaaggaaataaaagaggatacaaacaaatggaagaatattccatgctcatgggtaggaagaatcaatattgtgaaaatggccatactgcccaaggtaatttacagattcaatgccatccccatcaagctaccaatgactttcttcacagaattggaaaaaactactttaaagttcatatggaaccaaaaaagagcccgcatcgccaagtcaatcctgagccaaaagaacaaagctggaggaggcatcatgctacctgacttcaaactatactacaaggctacagtaaccaaaacagcatggtactggtaccaaaacagagatatagatcaatggaacagaacagagccctcagaaataacgccacatatctacaactatctgatctttgacaaacctgagaaaaacaagcaatggagaaaggattccctatttaataaatggtgctgggaaaactggctagccatatgtagaaagctgaaactggatcccttccttacaccgtatacaaaaatcaattcaagatggattaaagacttaaacgttagacctaaaaccatgaaaaccctagaagaaaacctaggcatttaccattcaggacataggcatgggcaaggacttcatgtctaataaaacaccaaaagcaatggcaacaaaagccaaaattgacaaatgggatctaattaaactaaagagcttctgcacagcaaaagaaacaaccatcagagtgaacaggcaacctacaacatgggagaaaattttcacaacctactcatctgacaaagggctaatacccagaatctacaatgaactcaaacaaatttacaagaaaaaaacaaacaaccccatcaaaaagtgggcagaggatatgaacagacaattctcaaaagaagacatttatgcagccaaaaaacacatgaaaaaatgctcatcatcactggccatcagagaaatgcaaatcaaaaccacaatgagataccatctcacaccagttagaatggcaatcattaaaaagacaggaaacaacaggtgctggagaggatgtggagaaataggaacacttttacactgttggtgggactgtaaactagttcaaccattgtggaagtcagtgtggcgattcctcagggatctagaactagaaataccatttgacccagccatcccattactgggtatatacccgaatgactataaatcatgctgctataaagacacatgcacacctgggcaccctagaaagcagcccaccctgggttctataccccagaagtcacaggatcattgcgctgaagtgctaaaggacatcctgtttctagcagggactggaggagcccaggctcttctggccagtttctccttatctcaggatgttgaattcccagcaccttctgcagttattcttgagaactacaagcaaaagactgaaatgagcaccacctactggcagagcctaacagggccagccggcaaacaagaaaactgttcacagtcccagccccaagatcccaagtatacagtatggatgtgggggtttagatccaagaaacaatag

SEQ ID NO: 14544 - DNA, 5735 bp, Homo sapiens
  SIMILAR (382)..(1734): 941254mologous to Homo sapiens unknown,accession number AF148856,Smith-Waterman Score=2207.
cacaccaaaaacccatctgtacatcaccatcgtcaaagaccaaaagtagataaaaccacaaagatggggaaaaaacagaacagaaaaactggaaagtctaaaacgcagagcgcctttcctcctccaaaggaacgcagttcctcaccagcaatggaacaaagctggatggagaatgactttgacgagctgagagaagaaggcttcagacgatcaaattactctgagctacgggaggacattcaaaccaaaggcaaagaagttgaaaactttgaaaaaaatttagaagaatgtataactagaataaccaatacagagaagtgcttaaaggagctgatggagctgaaaaccaaggctcgagaactacgtgaagaatgcagaagcctcagaaattggataaagagtcaagacccatcactgtgctgtattcaggaaacccatctcatgtgcagagacacacataggctcaaaataaaaggaaggaggaagatctaccaagccaatggaaaacaaaaaaaggcaggggttgcaatcctagtctctgataaaacagactttaaaccaacaaagatcaaaagagacaaagaaggccattacataatggtaaagggatcaattcaacaagaagagctaactatcctaaaaatatatgcacccaatacaggatcaccaagattcatgaagcaagtcctgagtgacctacaaagagacttagactcccacacattaataatgggagactttaacaccccactgtcaacattagacagatcaacgagacagaaagtcaacaaggatacccaggaattgaactcagctctgcaccaagcggacctaatagacatctacagaactctccaccccaaatcaacagaatatacatttttttcagcaccacaccacacctattccaaaattgaccacatactgggaagtaaagctctcctcagcaaatgtaaaagaacagaaattataacaaactatctctcagaccacagtgcaatcaaactagaactcaggattaagaatctcactcaaaacggctcaactacatggaaactgaacaacctgctcctgaatgactactgggtacataacgaaatgaaggcagaaataaagatgttctttgaaaccaacgagaacaaagacacaacataccagaatctctgggacgcattcaaagcagtgtgtagagggaaatttatagcactaaatgcccacaagagaaagcaggaaagatccaaaattgacaccctaacatcacaattaaaagaactagaaaagcaagagcaaacacattcaaaagctagcagaaggcaagaaataactaaaatcagagcagaactgaaggaaatagagacacgaaaaacccttcaaaaaattaatgaatccaggagctggttttttgaaaggatcaacaaaattgatagaccactagcaagactaataaagaaaaaaagagagaagactcaaatagacacaataaaaaatgataaaggggatatcaccaccgatcccacagaaatacaaactaccatcagagaatactacaaacacctctacgcaaataaactagaaaatctagaagaaatggatacattcctcgacatatacactctcccaagactaaaccaggaagaagttgaatctctgaatagaccaataacaggagctgaaattgtggcaataatcaatagtttaccaaccgtgggcttcatccctgggatgcaaggctggttcaatatacgcaaatcaacaaatgtaatccagcatataaacagagccaaagacaaaaaccacatgattatctcaatagatgcagaaaaagcctttgacaaaattcaacaacccttcatgctaaaaactctcaataaattaggtattgatgggacgtatttcaaaataataagagctatctatgacaaacccacagccaatatcatactgaatgggcaaaaactggaagcattccctttgaaaactggcacaagacagggatgccctctctcaccgctcctattcaacatagtgttggaagttctggccagggcaatcaggcaggagaaggaaataaagggtattcaattaggaaaagaggaagtcaaattgtccctgtttgcagatgacatgattgtttatctagaaaaccccatcatctcagcccaaaatctccttaagctgataagcaacttcagcaaagtctcaggatacaaaatcaatgtacaaaaatcacaagcattcttatacaccaacaacagacaaacagagagccaaatcatgagtgaactcccattcacaattgcttcaaagagaataaaatacctaggaatccaacttacaagggatgtgaaggacctcttcaaggagaactacaaaccactgctcaaggaaataaaagaggatacaaacaaatggaagaacattccatgctcatgggtaggaagaatcaatatcgtgaaaatggccatactgcccaagataatttacagattcaatgccatccccatcaagctaccaatgcctttcttcacagaattggaaaaaactactttaaagttcatatggaaccaaaaaagagcccgcatcaccaagtcaatcctaagccaaaagaacaaagctggaggcatcacactacctgacttcaaactatactacaaggctacagtaaccaaaacagcatggtactggtaccaaaacagagatatagatcaatggaacagaacagagccctcagaaataatgcagcgtatctacaactatctgatctttgacaaacctgagaaaaacaagcaatgggggaaaggattccctatttaataaatggtgctgggaaaactggctagccatatgtagaaaactgaaactggaccccttccttacaccttatacaaaaattaactcaagatggattaaagacttaaacgtaagacctaaaaccataaaaaccctggaagaaaacctaggcaataccattcaggacataggcatgggcaaagacttcatgactaaaacaccagaagcaatggcaacaaaagccaaaattgacaaatgggatctaattaaactaaagagcttctgcacagcaaaagaaactaccatcagagtgaacaggcaacctacaacatgggagaaaattttcgcaacctactcatctgacaaagggctaatatccagaatctacaatgaactcaaacaaatttacaagaaaaaaacaaaaaaaccccatcaaaaagtgggcaaaggatgtgaacagacacttctcaaaagaagacatttatgcagccaaaaaacacatgaaaaaatgctcatcatcactggccatcagagaaatgcaaatcaaaaccacataccatgctggaccagatggatttacagccgaattctaccagaggtacaaggaggaactggtaccattccttctgaaactattccaatcaatagaaaaagagggaatcctccctaactcattttatgaggccagcatcatcctgataccaaagcctggtagagacacaaccaaaaaagagaattttagaccaatatccttgatgaacattgatgcaaaaatcctcaataaaatactggcaaaacgaatccagcagcacatcaaaaagcttatccaccatgatcaagtgggtttcatccctgggatgcaaggcttggttcaatatacgcaaatcaataaaggtaatccagcatataaacagagccaaagacaaaaaccacatgattatctcaatagatgcagaaaaagcctttgacaaaattcaacaacccttcatgctaaaaactctcaataaattaggtattgatgggacgtatttcaaaataataagagctatctatgacaaacccacagccaatatcatactgaatgggcaaaaactggaagcattccctttgaaaactggcacaagacagggatgccctctctcaccgctcctattcaacatagtgttggaagttctggccagggcaatcaggcaggagaaggaaataaaaggtattcaattaggaaaagaggaagtcaaattgtcccctctttgcagatgacatgattgtatatgtagaaaaccccttcgtctcagcccccatatctccctcaagctgataagcaacttcagcaaactctcaggatacaaaatcaatgtacaaaaatcacaagcattcttatacaccaataacagacaaacagagagccaaatcatgagtgaactcccattctgttattgcttcaaagagaataaaatacctaggaatccaacttacaagggatgtgaaggacctcctcaaggagaactacaaaccaactgctcaatgaaataaaaaaaggacacaaacaaatggaagaacaatccatgctcgtggataggaagaataaatattgtgaaaacggccatactgcccaaggaattggaaaaaaactactttaaagttcatatggaaccaaaaaagaacctgcatcgccaagtcaatcctaagccaaaagaacaaagctggaggcatcacactacctgacttcaaactatactacaaggctacagtaaccaaaagagcatggtactggtaccaaaacagagatatagatcaatggaacagaacagagccctcagaaataacgccgcagatctacaactatctgatctttgacaaacctgagaaaaacaagcaatggggaaaggattccctatttaataaatggtgctgggaaaactggctagccatatgtagaaagctgaaactggatcccttccttataccttatacaaaaatcaattcaagatggattaaagacttaaatgttagacctaaaaccataaaaaccctagaagaaaacctaggcattaccattcagggcataggcatgggcaaggacttcatgtctaaaacaccaaaagcaatggcaacaaaagacaaaattgacaaatgggatctaattaaactaaagagcttctgcacaagaatagcaaaggaacctaccatcagcgtgaacaggcaacctacagaatgggagaaaatgtttgcaatctgctcatctgacaaaggggtaatatccagaatctacagtgacctcaaacaaatttacaagaaaaaaacaaccaaaccccatcaaaaagtgggcaaaggacatgaacagacacttctcaaaagaagacatttatgcagccaaaaaacacatgaaaaaatgttcatcgtcactggccatcagagaaatgcaaatcaaaaccacaatgagataccatctcacaccagttagaatggcgatcattaaaaagtcaggaaacaacagggtcacatttctgaaccagaaagccacaggaaaggaaagactggtcacagacttccttcttccctggaccatttgttacgggaagttctcaggaaacaggtcagtaagtgtagagggcatcacaggacaaacttcattgctgggtttcccagaaaagagcagctctcccctactgaagacacttttagcagacgggccttcactaggaacaaatcctttcttgaccaccaatggctgcatgacttatcctgagaagatcatggggattttggatgccaggtcaacccttacactcagcaaggaagtggaagggcctcagtttcaaacactttgtaaacacagagaaatggtagtgggggcagggggtgaggaagatcttaaaattcatgttgtaatgcaagagactccggatactcaaagtaatattgaaaaagaagaacaaagataa

SEQ ID NO: 14545 - DNA, 7130 bp, Homo sapiens
  SIMILAR (5232)..(6761): 941254mologous to Homo sapiens putative p150,accession number U93572,Smith-Waterman Score=2521.
tcattgtggttttgatttgcatttctctgatggccagtgatggtgagcatttttcatgtgttttttgggtgcataaatgtcttcttttgagaagtgtctattcatgtcctttgcccactttttgatggggttgtttgtttttttcttgtgaatttgtttgagttcattgtagattctggatattagccctttgtcagatgagtagattgcaaaaattttctcccattttgtgggttgcctgttcactctgatggtagtttcttttgctgtgcagaagctcttcagtttcattagatcccatttgtcaattttgtcttttgttgccattgcttttggtgttgtagacatgaagtccttgcccatgcctatgtcctgaatggtaatgcctaggttttcttctagggtttttatggttttaggtctaacgtttaagtctttaatccatcttgaattgatttttgtataaggtgtaaggaagggattcagtttcagctttctacatatggctagccagttttcccagctccatttattaaatagggaatcctttccccattgcttgtttttctcaggtttgtcaaagatcacatagttgtagatatacggtgttatttctgagggctctgttctgttccattgatctatatctctgttttggtaccagtaccatgctgttttggttactgtagccttgggcagtatggccattttcacgatattgattcttcctacccatgagcatggaatgttcttccatttgtttgtatcctcttttatttcattgagcggtgatttgtagttctccttgaggaggtacttcacgtcccttgtaaggtggattcctaggtattttattctctttgaagcaattgtgaatgggagttcgctcatgatttggctctctgtttgtctgttattggtgtataagaatgcttgtgatttttgtacattgattttctatcctgagactttgctgaagttgcttatcagcttaaggagtttttgggctgagacaatggggtgttctaaatatgcagtcatatcatctgcaaacagagatgatttgacttcttttcttcctatttgaattccctttatttctttctcttgcctgattgccctggtcagaacttccaatactatgctgaataggagtggtaagagaaggcatccttgtcttgtgctggttttcaaagggaatgctttcagcttttgccgattcagtatgatattggctgtgggttcgtcataaatagctcttattattttgagatacgttccatcaatacctagttttttgagtatttttggcatgaaggggtgttgaattttctcgaaggcctttgctgcatctattgagataatcacttggtttttgtcattggttctgttgtttcctgacctttttaatgaccgccattcctaactggtgtgagatggtatctcatttgtggttttgattttgcatttctctgatggccaatgatggatgagcattttttcatgtgttttttgggctgcataaatgtccttcttttgagaagtgtctgttcatgtgccttcgtccactttttggatggggttgtttgttttttttcttgtaaaagtgttttgagttcattgtagattctggatattagccctttgtcagatgatgtagattgcaaaaattttttctcccattttgtaggttggcctgttcactctgatggtagtttctcttttgcatgtgcagaagaagctctttagtttaaattagatcccatttgtcaattttgtcttttgttggccattgctttcgggtgttttagacatgaagtccttgcctatgcctatgtcctgaatggtaatgcctaggttttcttctagggtttttacggtttttatggtttttaggtctaacgtttaaatctttttttttaatccatcttgaatttgattttttgtataaggtgtaaggaagggatccaagtttcagctttctacatatggctaagccagtttttcccagcaccatttattaaataagggaatcctttcccccattgcttggtttttcccagggtttgtcaaagattagatagttgtagatatatgtggtgttatttctgagggctctgttctgttccattggtctatatctctgttttgggtaccagtaccatgctgttttgggttactgtaggccttgtaggtatagtttgaagtcaggtagccgtgatgcctcccagctttgttcttttgggcttagggattggacttggggcaatgtgggggctcttttttggttccatatgaactttaaagtagtttttttccaattctgtgaagaaagtcattggtagcttgatggggatggcattgaatctgtaaattaccttgggcagtatggccagtatggatgaccattttcacaatattgattcttcctatccatgagcatggaatgttcttccatttgtttgtgtcctcttttatttcggttgagcagtggtttgtagttctccttgaagaggtccttcacgtcccttgtaaggtggattcctaggtatttaattctcttggaagcaattgtgaaatgggagttcactcatgatttggctctcttgtttgtctgtgttattggtgtataggaatgcttggtgatttttgcacatcgattttgtatatttttgtatcctgagactttgctgaagttgcttatcagcttaaggagattttggggtgagacgatggggttttctagataaacaatcatgtcgtctgcaaacagggacaatttgacttcctcttttcctaattgaataccctttatttccttctcctgcctgattgcccctggcccagaacttcccaaacacctatgttgaataggagtggtgagagagggcatccctgtccttgtgccagttttcaaagggaatgcttccagtttttgcccattcagtatgatattggctgtgggtttgtcatggatagctcttattattttgaaatatatgtcccatcaatagcaaatttattaaaagtttttagcatgaagcgttgttgaatttttgtcaaagaccttttctgcatctattgagataatcatgtggtttttgtctttggttctgtttatatgctgaattaggatttattgatttgtgtatgttggaaccagtcttgcatcccagggggatggaagcccactttaatcatggtgggataagcttttttgatggtgctgctgggattcagttttgtcagtatttttattaagggatttttgccgtccaatgttcatcaaagatattggtctaaaattctcttttttttgttgtgtctctgctagactttggtatccaggatgatacttgccctcataaaatgagttagtggaggattcccgctcccttctattgattggaatagttccagaaggaatggtaccagttcctccttgtacctctggtagaaattcggctgtggaatccatctggtcctgggactctttttggtgtggtaaagctattgattattgccacaattgcagatccctgttatttggtctattcagagattcaacttcctcctggtttagtcttggaagagtgtatgtgtcgaggaatgtatccatttcttctagattttctagacacataattgtcagattcaccaaagttgaaatgaaggaaaaaatgttgagggcagccagagagaaagcattcaagcaggcctcccggagagaagatgacattgccaaggtaaccagtggcatgagagttttattcaagccaggaaccacagaggtacaggagctggccctttgctatggtggaatggccaacagaaccatctcagccctcaagaccactcagaggcagctttccaagctctggaaggaggagctgctgcaggacgtgtgtgcaggactggcagaggagctgcatctgcctcccgatgcccctggtggcatggtggacttccggtgcaccctcaccctcagcttcttcttcaagttctacctgacagtccttcagaagctgggccaagagaacctggaagacaagtgtggtaaactggaccccactttcgccagtgcaactttactgtttcagaaagaccccccagccgatgtccagctcttccaagaggtgcccaagggtcagtctgaggaggacatggtgggccggcccctgccccacctggcagcggacatgcagcctctggtgaggccgtgtactgtgacgacattcctcgctacgagaatgagctgtctctccggctggtcaccagcacccgggcccacgccaagatcaagcatcgagatgaagttcaagaatatgctgtttcctatgattgtctgcccagcctggatccctgagctgaattcggtagaacatggacccgacggtatctcctttggagctgcttgccccctgagcattgtggaaaaaaccctggtggatgctgttgctaagcttcctgcccaaaagacagaggtgttcagaggggtcctggagcagctgcgctggtttgctgggaagcaagtcaagtctgtggcgtccgttggagggaacatcatcactgccagccccatctccgacctcaaccccgtgttcatggccagtggggccaagctgacacttgtgtccagaggtgagctgcctgaagcagaggtccaggaagaaggacttgggggagaaaagtctcaccagataggtcattttctggagaaacagagctcaaagttcagtgacccagctttccctgtgatttggatccagggaagcatggagaatgtacctggtttggtggacgggaaagctggatattttctctgtagagaattcacagcaggaactgctacctgcatgccttacctagtggggcaccaggagaactgtccagatggaccacaccttcttccctggctacagaaagaccctgctgagcccggaggagatactgctctccatagagatcccctacagcagggagaaatacaaactaccatcagagaatactacaaacacctctccgcaaataaactagaaaatctagaagaaatggataaattcctcgacacatacactctcccaagactaaaccagaaagaagttgaatctctgaatagaccaataacaggagctgaaattgtgccaataatcaacagcttaccaaccaaaaagagttcaggactagatggattcacagccgaattctaccagaggtacaaggaggaactgcatataaacagaaccaaagacaaaaaccacatgattatctcaatagatgcagaaaaggcctttgacaaaattcaacaacccttcatgctaaaaactctcaataaattaggtattgatgggacgtatctcaaaataataagagctatctatgacaaacccacagccaatatcatactgaatgggcaaaaactggaagcattccctttgaaaactggcacaagacagggatgccctctctcaccactcctattcaacatagtgttggaagttctggccagggcaatcaggcaggagaaggaaataaagggtattcaattaggaaaagaggaagtcaaattgtccctgtttgcagatgacatgattgtatatctagaaaaccccattgtctcagcccaaaatccccttaagctgataagcaacttcagcaaagtctcaggatacaaaatcaatgtacaaaaatcacaagcattcttatacaccaataacagacaaacagagagccaaatcatgagtgaactcccattcacaattgcttcaaagagaataaaatacctaggaatccaacttacaagggacgtgaaggacctcttcaaggagaactacaaaccactgctcaatgaaataaaagaggatacaaacaaatggaagaacattccatgctcatgggtaggaagaatcaatatcatgaaaatggccatactgcccaaggtaatgtatagattcaatgccatccccatcaagctaccaatgcctttcttcacagaattggaaaaaactactttaaagttcatatggaaccaaaaaagagcccgcatcatcaagtcaatcctaagcccaaagaacaaagctggaggcatcacgctacctgacttcaaactatactgcaaggctacagtaaccaaaacagcatggtactggtaccaaaacagaaatatagatcaatgcaacagaacagagccctcagaaataatgccacatatctacaactatctgatctttgacaaacctgacaaaaacaagcaatggggaaaggatcccctatttaataaatggtgctgggaaaactggctagccatatgtagaaagctgaaactggatcccttccttacaccttacacaaaaattaattcaagatggattaaagacttaaacattaggcctaaaaccataaaaaccctagaagaaagcctaggcattaccattcaggacataggcatgggcaaggacttcatgtctaaaacaccaaaagcaatggcaacaaaagacaaaattgacaaatgggatctaattaaactaaagagcttctgcacagcaaaagaaactaccatcagagtggacaggcaacctacagaatgggagaaaattttcacaacctactcatctgacaaagggctaatatccagaatctacaatgaactcaaacaaatttacaagaaaaaatcaaacaaccccatcaaaaagtgggcaaagcatatgaacagatgcttctcaaaagaagacatttatgcagccaaaagacacaggctgaaagacactcctcggaagcagctgcgatttgaaggggagcgtgtgacgtggatacaggcctcaaccctcaaggagctgctggacctcaaggctcagcaccctgacgccaagctggtcgtggggaacacggagattggtaagggccagggaggctgccctggggctgccagggggtctgggggtgtttctaggtcctcttgcccatcctcacctccccctgactttacttgcctctgcaccctatccctctgccccactgactacctggagcccactggaaatccctggacactccagttcctgcaaaggcccctagctgtggagtcccacaggcctgctcagccccttgctggatgtgtgacctcagaatag

SEQ ID NO: 14546 - DNA, 476 bp, Homo sapiens
  SIMILAR (48)..(476): 671254mologous to Homo sapiens Human bone marrow-derived serum protein 1,accession number Y92239,Smith-Waterman Score=452.
  misc_feature (1)...(476): n = a,t,c or g
cttgacncactgagaaccctcgaagngncgnggaattcgagggaaccatggaagccccagctcagtttctcttcctcctgctactctggctcccagataccaccggagaaattgtgttgacacagtctccagccaccctgtctttgtctccaggggaaagagccaccctctcctgcagggccagtcacagtgttagtagtttcttagcctggtaccagctgaaacctggccaggctcccaggctcctcatctatgatgcaaccaacagggccactggcannnnnnnnnnnnnnnnnnnnnnnnnnnnnnnnnnnnnnnnnnnnnnnnnnnnnnnnnnnnnnnnnnnnnnnnnnnnnnnnnnnnnnnnnnnnnagcaacgtagcagctggcctccggagtacagttttggcctggggaccaagctggagatcaaacgaactgcggctgcaccatctgtcttcatcttcccgccatct

SEQ ID NO: 14547 - DNA, 360 bp, Homo sapiens
  SIMILAR (151)..(330): 931254mologous to Homo sapiens immunoglobulin kappa light chain,accession number X95749,Smith-Waterman Score=277.
gggcagggtgagcccaaacaactgggaagacatccaggagtcctcagaccacatgtggtgagcgctaagacgggagacgcctgcaatggacgcaagtgagaaacttgtttccagaacggcccaaagtacagtggaaggaggggtgcgcccctccaatcgggtaactcgcaggagagtgtcacagagcagggcagcaaggtcagcgcctacagcctcagcagccccctgacgctgagcaaagcagactacgagaaacacaaactctacgcctgcgaagtcacccatcagggcctgagctcgcccgtcacaaagagcttcaacaggggagagataatagagggagaagtgcccccgtgtatt

SEQ ID NO: 14548 - DNA, 508 bp, Homo sapiens
  SIMILAR (79)..(456): 671254mologous to Felis catus immunoglobulin kappa light chain,accession number AF198257,Smith-Waterman Score=424.
  misc_feature (1)...(508): n = a,t,c or g
cggccgcgtcgacgtgaataacgccctccaatcgggtaactcccaggagagtgtcacagagcaggacagcaaggacagcgcctacagcctcagcttttggggctgctaatgctctgggtccctggatccggtggggaaattgtgatgacccagactccactctcctcatctgtcacccttggacagccggcctccatctcctgcaggtctagtcaaagcctcgtacacagcgatggaaacacctacttgacttggcttcaacagaggccaggccagcctccaagacccctaatttatcacgtttttaagcggttctctggggtcccagacaggttcagtggcagtggggcagggacagatttcacactggaaaatcaggcagggtggaagcttagggatgtcggggtttattactgcatgcaaggtnacacaatttccgtgcagttttggccaggggaccaagctggagaccaaacgaactgtggccgcaccatctgtcttcatcttt

SEQ ID NO: 14549 - DNA, 1011 bp, Homo sapiens
  SIMILAR (18)..(380): 611254mologous to Homo sapiens 1B1 IgG aberrant light chain with duplicated variable region,accession number R13111,Smith- Waterman Score=368.
  misc_feature (1)...(1011): n = a,t,c or g
gagcgtggtggaattcggaaaccccagcgcagcttctcttcctcctgctactctggctcccatataccagcggagaaattgtgttgacgcaggctccaggcaccctgtctttgtctccaggggaaagagccaccctctcctgcagggccagtcagactattggcagcacctacttagcctggtaccagcagagacctggccaggctcccaggttcctcatctatggtgcatccagcagggccactggcatcccagacnnnnnnnnnnnnnnnnnnnnnnnnnnnnnnnnnnnnnnnnnnnnnnnnnnnnnnnnnnnnnnnnnnnnnnnnnnnnnnnnnnnnnagcagtataataactggcctccgggagggacgttcggtccaagggaccaaggtggaaatcaagcgaactgtgggctgcacccatctgttcttcatctttcccgcccatctgatgagtcagttgaaaatctgggaactgccttctgcttgtgtgcctgtctgtaataacttcttatcccagagaggtccaaagttacagtggtaaggtggataacgcccttccaatcgggtaactcccagggagagtgtcacagagcaggacaagcaaggacagcaccctacagccttcagcagccaccctggacgcttgaggcaaagcaggactacggaggaaacacaaactcttacggcctgcggaagttcacccattcaggggccttgaggttcggcccgttcaacaaaaggagtttttcaacaggggggaggagtgtttaggagggggaggaagttgccccccaccttgcttccttcagttttccaggccttggacccccttcccattccttttgggccttttgaccctttttttccacagggggaccttacccctatttgcggtccttcaggttcatctttcacctcacccccctcctagtcccttggctttaaattatgctaatgttgggaggagaatgaataaattaaagtgaatcttttgcacctgtaaaaa

SEQ ID NO: 14550 - DNA, 657 bp, Homo sapiens
  SIMILAR (434)..(601): 261254mologous to Homo sapiens PRO1318,accession number AF116633,Smith-Waterman Score=64.
taccgaacagatttgcttggtgtgtcttacttgtggctattcatttattctcaccagggacttccttcgctgggcatctggctgggattcttgttggactaatgtacactcaagggcctctgaagaaaatcatggaagcatgtgcaggcggtttttccttcagtgttggttacccaggacggcaatactactttaatagttcaggcagctctggatatcaggattattatccgcatggcaggccagatcactatgaagaagcacccaggaactatgacacgtacacagcaggactgagtgaagaagaacagctcgagagagcattacaagccagcctctgggaccgaggaaataccagaaatagcccaccaccctacgggtttcatctctcaccagaagaaatgaggagacagcggcttcacagattcgatagccagtgaggtggcatcttgggaagacatggcctattcgtgtaattattgcccatttggctcattccccaagcccctaattcattttaattcattttaaacaaaagcagagtacaccggtattgctccagatcgctcacatcacctgggacagtcccatggcccctatgagtcaactcacagcttgcggggagtgggccttctcctggccttgttcttgctcata

SEQ ID NO: 14551 - DNA, 1312 bp, Homo sapiens
  SIMILAR (697)..(368): 331254mologous to Rattus norvegicus pro-alpha-2(I) collagen,accession number AF121217,Smith-Waterman Score=87.
ttacatttgagtaactgtctgactacccaattgtttctcaagcatcatcagtttttccataatagcccaggaatcaggcaccaaacaagcatttgcatagacaaccctggtctgcagcggactgaggtaagaatcattaacaccactgacatcacttttggcagatccccttgcccttagggggcattccagcaggcttctagcctccagaccctgcatttctttgatgaagtgctttctctggccccggatgtcctctttgccttcccctgtaaggcactctatacccccagaatttcggtcactgtgagtgccgcctcgcttccatttccaaatatctgctattaatagccttgctgtagtgggcacgtgtgcccacatcaccaagcttgccttgctggctggctctgggactctgcgataagccgccctccggttgtctgcgatagctcctgaagcaggagagtgtctttcccaccctccgcctaacaggcggtatctgacccttccaggcagcagctccccagcctccggctgcgctggggcccggaaggacgaagcttcccggcagagaacctgggcagaggcgtccgttgggtaggcggccgcgacccgctcgctgcttctcccctagtcttcgggtcccttgaacgcaggtcgcttgtttgcccggccccaggaatccggggcgccccggatcgggaacgtgcgtgatgtaccacgtgcgcgcgaagacgtggggacgcaggcgggtcgtagagagcgtgagtttccgcgtctgtttggtccggctgctgtcgttggttgtgagcggcatctctcgccgtttccccgggctgcgggagctggcggccgggctggggctgctgggcggaggtcggcgcctcccggggggctggggtcttgtcgaagttgccgcatctccgccggaccgcacgggaacgacgtgcccacactcggaggaaggggttggcgctgtaaaactcaggagccgagaagctttaagaacagtgaggttgaagggcacaggctcttggtccttggcagcgatattaggaggcgtgcctagggaacctcggattccggggagctggacgtgaaactctcggtcccagaggctggcttgtaatgctctctcgagctgttcttcttcactcagtcctgctgtgtacgtgtcatagttcctgggtgcttcttcatagtgatctggcctgccatgcggataataatcctgatatccagagctgcctgtttcccatgtcaaaatattaacattattgatatttagaacaggagaaggagacaagtacat

SEQ ID NO: 14552 - DNA, 465 bp, Homo sapiens
  SIMILAR (18)..(392): 531254mologous to Homo sapiens BRCA1 modulator protein 091- 132Q20,accession number W37883,Smith-Waterman Score=337.
  misc_feature (1)...(465): n = a,t,c or g
caccgagaagaggcagcggcggtggcncagagacgattggtgccaaacagggcagaacgcaactcagctctgggtttgtgaatagcacaatggaagaagctggactttgtgggttaagagagaaagcagatatgttgtgtaactctgaatcacatgatattcttcaacatcaagactcaaattgcagtgccacaagtaataaacatttattggaagatgaagaaggccgtgactttataacaaagaacaggagttgggtgagcccagtgcactgcacacaagagtcaagaagggagcttcctgagcaagaagtagcccctccgtctggtcagcaagctttacaattgcaacaggaacaaagaaaaagtcttaggaaaagaagttttattattgatgcaagccctaaacactctttccgactccagaggagaagctggcagctctctgtaagaaatatgctgatct

SEQ ID NO: 14553 - DNA, 723 bp, Homo sapiens
  SIMILAR (149)..(376): 361254mologous to Mus musculus ROX protein,accession number Y07609,Smith-Waterman Score=116.
atggtggtgcggttcacttgtctagtggttccccaggggaaggccacagaaccttctcagggctgttgtgtcctgctggtgatatttgttgaagccccagccactagaagattgagagatcaaagacgccgcacttcagcttccgctttggcgtgcacaggacagagaaagagcaatgaaagaaagaagagagaaacgaagagagagagagaaagagagagacagagaaaagaagagaaaagagaagatgttttgcaagagaagttgtcatacgataatggaacccaccccagagctgagttgcgttctgccctgtttggcaccaatcgtcttggcgccaccgccgctgcctcttctcggtgttacctctcccctacgccacgaggtgacttccgcagcaaaaccggcagagtaccctcacggaagctcatggacttaacgcggggccctataactctggcgaccaatcgctgcatgccaagtaccacacgtgaccggaggaggttgactccgccatccactcttcctaacactaccaacctatcttggggagtgcgggaggacggacacggacacaaggttgtactaagaaagcttgaaaggtccaaagacactaacaatgcagtggacgtcgatgttcctgatgttttctggtttgaaaaattaagacagatggaagagtacatctgctgttggaagaccagttggagcagggaaggctga

SEQ ID NO: 14554 - DNA, 541 bp, Homo sapiens
  SIMILAR (169)..(393): 421254mologous to Homo sapiens BRCA1 modulator protein 091- 132Q20,accession number W37883,Smith-Waterman Score=141.
tgaagtcacctcgtggcgtaggggagaggtaacaccgagaagaggcagcggcggtggcgccaatgaccgattggtgccaaacagggcagaacgcaactcagctctggggtgggttcctgtccagaggggtagagaagagtggctgagggcgcgccctgaatctcagcgggaagagtgcgaccccgagggcgcgctagtttgtgaatagcacaatggaagaagctggactttgtgggttaagagagaaagcagatatgttgtgtaactcgtgaatcacatgatattcttcaacatcaagactcaaattgcagtgccacaagtaataaacatttattggaagatgaagaaggccgtgactttataacaaaagaacaggagttgggtgagcccagtgcacttcacacaagagtcaagaagggaacttcctgagccagaagtagcccctcccgtctggtcagcaagctttacaatgcaacaggaacaaagaaaaaggcctaaggaataatcctttgctctttggttggaggtggccacatactgg

SEQ ID NO: 14555 - DNA, 690 bp, Homo sapiens
  SIMILAR (149)..(376): 361254mologous to Mus musculus ROX protein,accession number Y07609,Smith-Waterman Score=116.
atggtggtgcggttcacttgtctagtggttccccaggggaaggccacagaaccttctcagggctgttgtgtcctgctggtgatatttgttgaagccccagccactagaagattgagagatcaaagacgccgcacttcagcttccgctttggcgtgcacaggacagagaaagagcaatgaaagaaagaagagagaaacgaagagagagagagaaagagagagacagagaaaagaagagaaaagagaagatgttttgcaagagaagttgtcatacgataatggaacccaccccagagctgagttgcgttctgccctgtttggcaccaatcgtcttggcgccaccgccgctgcctcttctcggtgttacctctcccctacgccacgaggtgacttccgcagcaaaaccggcagagtaccctcacggaagctcatggacttaacgcggggccctataactctggcgaccaatcgctgcatgccaagtaccacacgtgaccggaggaggttgactccgccatccactcttcctaacactaccaacctatcttggggagtgcgggagggacccaaccaggatcctgagccctcactttctccctgcgttcctcatgatccatttgactataatgcagaaagtttgtttagctactggctggtatctgtaactcctatgacagctcacactccttga

SEQ ID NO: 14556 - DNA, 1743 bp, Homo sapiens
  SIMILAR (882)..(4): 951254mologous to Homo sapiens putative p150,accession number U93568,Smith-Waterman Score=1457.
atgtgcctgcagccgccgtgtgcaagcgcagggagagcccggaaggtaggggcgcgcggggcgcagacctcggggatggacgcgggggacaccgcggccgcggcagaacggcccagcccgccaggtgacagcttcgccgtgagcgctgcctgggctcggaagggcatcgaggagtggatcgggagacagcgctgcccgggcggtgtctcgggaccccgacagctgcggttggcgggcaccataggccgaagcacccggatgtcctgtgagctccggaactctgcacggggctttcaggcagtctgcgtggaactcgcgcaagcccaaggcagctccccttccgtggcccagaagtcagaactgcccccccgcacctccaatcccactcgatctcgctcccatgagccggaagccatccacatcccacaccgaaagccccaaggcgtggacccggcctccttccacttccttgacaccccaatcgccaaggtctcagagctccagcaacggctccggggcacccaggacgggagcaagcactttgtgaggccccccaaggcccagggcaaaagtgtggcccccctcgggcacaagaagcacaagcaccgagccaaggagagccagcagggctgccggggcctgcaggcaccactggcctcaggtggccctgtcctggggcgggagcacctgcgggagctgcccgccttggtggtgtatgagagccaggccgggcagccggcccaggcttccactacccagtcagtgttgccacagataggggaccagccccgcccatctctctgcatccaggagctccagtgcgacgtgtccatggaggaggacagccggcaggagtggaccttcaccctgtatgactttgacaacaacggcaaggtcacccgagagatggttggatcagagcaccttcttgtgatgtcacaaatcggggcctttctagccttcttaaccttggaggttctgctcagcagctgctactggcgtctcgtcctcttggctctgggtctggggcactggaagccttggagcatggcaagtccagagcaccctgggagccctggctgcatgggacccataacccagtgcacggcaaggacccagcaggaagcaccagccactggccccgacctcccgcacccaggacctgacgggcacttagatgggcaaacagaggcacggagcaggggcctggctggcccagggctgcacgttcttgagcatgccgtcacgggcacctctcgcttgtctcttgtgcctgtcagggagtcaggagacatcgccttccatcctgaccaaccaggtctggctgtccttcgagtccccgttgatctctggaattcaggcattagcttccgaagccttttaacaatcattattcaattcatgacctcggatgtttggggaccacctcaaaatcaacaacctgcccctgagtcttcatcatcaggatctcctcctgagaaaaaccaaataactaaagtacagatgctgggtggctgccaggtcatgtataagtgcttgctcaacatcattcccaaggacccagcactctctaagatgttcggcagcacggaaggtagtgctgatcccacatgtaagcaagcaagcggatccttgagcgctttcatgggtaagaacgtcataaacaacgtgcatccattcgcccccagggaagcccaaaaggtcctcaggttcttgaggccacctggaaccacttccacctaa

SEQ ID NO: 14557 - DNA, 806 bp, Homo sapiens
  SIMILAR (358)..(780): 311254mologous to Bovine herpesvirus 1 latency-related open reading frame 2; putative,accession number M61143,Smith-Waterman Score=105.
gtggcagcccctcggcttgtcgccggagctgagaaccaagagctcgaaggggccatatgacactcctcccggacccctggacacacacagccctggggactggatgccttggagcatggcaagtccagagcaccctgggagccctggctgcatgggacccataacccagtgcacggcaaggacccagcaggaagcaccagccactggccccgacctcccgcacccaggacctgacaggcacctgcccccacacagtggaataaaatacaaactccagcatgaccacgcgggagcttcagcagtactggcagaaccagaaatgccgctggaagcacgtcaaactgctctttgagatcgctttcagctcgcatcgaggagagaaaagtctctagagtttgtggtgtaccaaatcatcgtcatctcagactgggagctttgacaacaacaaggccgtcctggaacggcgctattccgactctcgcgaagctcccagcaaagcgctgctgaagacgttcagggaggagatcgaagacgtggagtttcccaggaagcacctgactggggaacttcgctgaggagatgatctgtgcagcgtcggcgcgccctgcaggagtacctgggcctgctctacgccactccgctgcgtgcgccgctcccgggagttccctggacttcctcacgcggccggatgtgcgcgaggctttcgtgctgcctgcgggccggccagtacccgcgcgccctggagctgctcgtgcgcgtcgtgccgctgcaggagaacgtcaccgcccacctgccctgcgcgtcgc

SEQ ID NO: 14558 - DNA, 560 bp, Homo sapiens; identical to SEQ ID NO: 2514
  SIMILAR (304)..(795): 991254mologous to Escherichia coli putative serine transporter,accession number U01233,Smith-Waterman Score=819.

SEQ ID NO: 14559 - DNA, 1690 bp, Homo sapiens
  SIMILAR (446)..(288): 351254mologous to Homo sapiens Human secreted protein, SEQ ID NO: 4667,accession number G00586,Smith-Waterman Score=73.
atgtcaaatgatggaagatccaggaatcgggacaggcgctacgatgaggtcccaagcgacctgccctatcaagataccaccataagaacccacccaactcttcatgacagtgagcgggcagtgagcgctgatcccttgccaccaccccctctcccattacagccaccattcggcccagacttctactcaagtgacacagaagaaccagctatagcgccagatctcaaaccagtaaggcgctttgtccctgactcctggaagaactttttcagagggaagaaaaaggaccccgaatgggataagccggtgtctgatatcaggtacatctccgatggagtggagtgttcaccaccagcctctccagcaagaccaaaccaccgttcgcccctcaactcctgcaaagatccctacggcgggtcagaaggaacctttagttcccggaaagaggctgacgcagtgtttccccgggatccctatggatctctagaccgacacacacaaacagttcgaacatacagtgagaaggtggaggagtataacctgagatactcctacatgaagtcgtgggcaggcctgctgagaatactgggtgtggtggagctgcttttgggggccggtgtctttgcttgtgtcacagcttacattcacaaggacagtgagtggtacaacttgtttggatattcacaaccgtatggcatgggaggcgttggtggattgggcagtatgtatgggggctattactacactggccctaagaccccttttgtactcgtggttgctggattagcttggatcaccaccattattattctggttcttggcatgtccatgtattaccggaccattcttctggactctaattggtggcccctaactgaatttggaattaacgttgccttgtttattttgtatatggccgcagccataagtctaatgtgaatgataccaacccgaggtggcctctgctactatccgttatttaatacaccagtgaatgcagtgttctgccgggtagaaggaggacagatagctgcaatgatcttcctgtttgtcaccatgatagtttatctcattagtgctttggtttgcctaaagttatggaggcatgaggcagctcggagacatagagaatatatggaacaacaggagataaatgagccatcattgtcatcgaaaaggaaaatgcttaaatcgacgcgggttcacacaactcgcaacaagtggattcgaagtagccagtgtggcccacaccgtgactcctggaatatttcacagattgaatccagcccccgtctccccgggatatccaaagggacttccacacgcggactcaccggcgccgctagaaggactctcagccggaaactcagcccgacactcctctccgccgctttaggggcgccccggaagtcattccgccgcgccctgcggccacgccgaaacgttccggatgctgcagagtgcagctgccggagcggggcgctcaggtgcagggcatggcctccgctgagttggggcgcggaaagggacggtgttccagctggaattcgcagagaaccggaaagagtgatcgccattcgctctcgggaaggtcgaaggctctgcagccatcgacctgggttctgaggagctcgatctggtttttctacttctaaaaggttgggatgaaggaccctggccacagaagtaa

SEQ ID NO: 14560 - DNA, 1110 bp, Homo sapiens
  SIMILAR (783)..(4): 981254mologous to Homo sapiens putative p150,accession number U93572,Smith-Waterman Score=1288.
atgcgcgtgccgggggccgtggatggccatggatggccccgccgggccgcgtatctctcggggacctgcggccaacactgtcttttagagccggggatgggggagtggagggggccctgttgccctagaggcctcgggacccttcccttgcccacccccactcgggccgcggcgggcaggagcagtctgcggagttctggcccatctgtcactctgtcccgggacgctgtgatccacggcggtgggggagggggaagggggagggacaagcatggctcgggtgaagttttaaactctgttcttctctcttgcctttctttggggacattctcccctttgggatatgtcctggacttcgcaggctgcgagaacttgttgacaagtgaaagctcggtagagccccggcttggtttgtggtctgcttattttttgcaaagtgactgttcctatttgcgctggtccttatcggtgcccctttgggggacttcggcactgatcagcgcgctgacagccgccgtccgggctgcgggaaaatggggcgcgccctccggggggcgagtggctgtgtccttgctaatttcctccgtaacctttaaactctcgctggaagctaccgccgcggctggtcacgtgaggcgagccctgggctgctggggaaaaatttcctcggctgggagccgggaccgggccggcggccggcgagggactgccccgcgcccgagactgggaacctgggagggcagggccggagcgctgggccccggggcgcggcccagctgggacacccgcgaagacggcggcggtgaagaggtcggctccgctgccggggagctggggattatgcaaatggggaaagaaaacctccgccctcgcccttctgccaagtcaagtctgggaatttgtaggtattgtgtgggtaaaggttatcattgcctgcggcttaaaagcctaaaaaggcttaaaggcgaggaaggaggcagtcccctggaaaaacaggatatcaagtgcagcaaacacgtcccaaaaatgatccgaaaagttctagggccatctcctaagaacaggcaaagcctttgcctgcaaccgctctggagcttcctaatacagtaa

SEQ ID NO: 14561 - DNA, 543 bp, Homo sapiens
  SIMILAR (1)..(147): 561254mologous to Homo sapiens Human gene 91-encoded protein fragment, SEQ ID NO:490,accession number Y86573,Smith-Waterman Score=126.
atgggggtcagggacccacttgaggaggcagtctgtgccttagcagagcttcagcactgtgctgggagatttgctgctctgttcagagccagcaggcaggaacgtttaagtctgctgaagctgtgcccacagctgccccttcccccacgtgctctatcccagggatataagcctctgattggggctgctggctttctttcagagatgcactgcccagagaggaggaatatagagaggcagtctggccacagtgactttagagctgtggtgggctctgcccagtttgaacttcccagaggcgttgtttacactgtgaggggaaaactgcctactcaagcctcagtaatggcaaacgcccctccccgcaccaggctccagcatctcaggtcgacttcagactgctgtgctggcagtgagaatttcaagccagtggatcttagcttgctgggctccgtgggggtgggatccactgagctagaccacttggctccctggcttcagcccgctttccaggggagtgaatggttctatctcacattctaa

SEQ ID NO: 14562 - DNA, 487 bp, Homo sapiens
  SIMILAR (21)..(605): 961254mologous to Escherichia coli Orf34 5' of tgs,accession number D90758,Smith-Waterman Score=966.
ctagagtcgatccttaggctttatcaagttctcaagctgtgttttcagctctatcaggtcatttatgttcttcgctaaactggttattctagttagcaattcctctaaccttttttcaaggttcttagcttccttgcattgggttagaacacactcctttagctctgagaagtttgttattacccaccttctgaaacctacttctgtcaattcgtcaaactcattctctgtccagttttgttcccttgctggcaaggagttgtgatccagccgaagctctcctgtatgaggtgtctgtcgacccctgctgcgaggtgtctcccagtaaggatacatgggggtcagggatccacttgaggaagcagtctgtcccttagcagaacttgagcactgtgctgggagatctgctgctctcttcagagccggcaggcaggaacgtttaagtctgctgaagctgcgcccacagctgcccctttctccaagtgct

SEQ ID NO: 14563 - DNA, 1938 bp, Homo sapiens
  SIMILAR (1452)..(1162): 971254mologous to Homo sapiens serine protease-like protein precursor,accession number M17016,Smith-Waterman Score=523.
tcagactgctgtgctggcagtgagaatttcaagccagtggttcttagcttgctgggctctgtgggagtgggacccactgaacatgaccacttggctccctggcttcagccccctttccaggggagtgaacggttctgtctcactggggttccaggtgccactggttgccacacaggcctggtttttctgaggcccctctctgccagggcatgagatgggctggcgtctcagtggcaaggcccttatggaaccacatgggtctctgggtatcttaggtgggtagatatgagggaggggccagatcagatcagtgtggtctggagaggacaagagttggtggattctgagaacactcagcagggatgaagagaaggggcagccaagaggctggaggacgagctgagccttgagctcagaggagggtagagaaactaagcccaggggagaatgaggagccccagtgggggatgaggagttaggtcccatggtattatcccttttttctctgtcatgtaacactggagaaggaggtaagaagtttacccaaagccccaggaccaaagtggtccatgttgtctcctgatggtgctcagcttcagccttggcagaagggcaggccctggagaaactggtgtggataggaaggagctgagtatcagcttcatgtgggggtttggggaggtggcaaggggtgaggggagaggagaaagcagaaaacagcaaaattgtgtcattggccttaaaggaagtctttttaatctctgggtcccccacgcacaactcaatggtactgtcgtaataatggcgtaagtcagattcgcactttcgatcttcctgcactgtcatcttcacctcttgtagtgtgtgtgagtgttttcccaggggggccgtctgcccccagccggccacactgcatgtctgccctggcttcacctgggccttgttgctaggtagcctgaggggctgcacagctctggtccgcttggcctttctctccagctggtggggaagaggcaagaaagtccaggtcagccaacgaacttctgggccccgacacagtgatggggctgcacaatcttccctctcctctgaggcataggaactaaccaagaggccaggatggaaaggagggaagggccggcattccagggggagtggaaccaactgcagtagcatgatgtcgttggagaagttcttaggattataggctggatgggggatgggtcttttcacagggataaactgctgggtcggctcctgttctttgatattgtgggcccccaaggtgacatttatggagcttccccaacagtgagcagctgtcagcacgaagtcgtctcgtatcaggaagccaccgcacctcttcagagacttctgatcccagatcataagataagccatgtaggggcgggagtggggcttggcctcatgtcccccgatgatctcccctgaaggaaaagtctgtctgcttgtgggcacccatggaatctgctgggtgggcacctgcttagtggctccagaactcctgggcatttgggagcctgggatagcctggagttgggagtggcctggaggaaggggcttcaatttcctgctctgcatctgccctgggcagcaggaggaaggccagcagaagcaggattggttgcatcttctcaggaaggctgccctggttggagctgctgttgtttcctccttgctctcttttagctccccactgcctctgcctgatgacgtcctctgggtgcttgtgtgagaatcatgcagtgaccacatcatcacccacagctgatgactcagagtggaccacctattcagcccagagcaggaacccaagcctatgaagtgaattgtaggatgtggtatcagccagtagaggtactggagcaccagaaacctgagttcccagtgatagaaccgccaatgcctcatggccat

SEQ ID NO: 14564 - DNA, 1683 bp, Homo sapiens
  SIMILAR (2028)..(2336): 561254mologous to Homo sapiens -14,accession number X90857,Smith-Waterman Score=262.
atgaaggcagaaataaagatgttctttgaaaccaacgagaacaaagacacaacataccagaatctctgggacacattcaaagcagtgtgtacagggaaatttatagcactaaatgcccacaagagaaagcaggaaagatccaaaattgacaccctaacatcacaattaaaagaactagaaaagcaagagcaaacacattcaaaagctagcagaaggcaagaaataactaaaatcagagcagaactgaaggaaatagagacacaaaaaacccttccaaaaattaatgaatccaggagctggttttttgaaaggatcaacaaaattgatagaccgctagcaagactaataaagaaaaaaagagagaagaatcaaatagacacaataaaaaatgataaaggagatatcaccaccgatcccacagaaatacaaactaccatcagagaatactacaaacacctctacgcaaataaactagaaaatctagaagaaatggataaattcctcgaaacatacactctccaaagactaagccagggagaggttgaatctctgaacagaccaataacaggatctgaaattgtggcaataatcaatagtttaccaaccaaaaagagtccaggaccagatggattcacagccgaattctaccagagaatagctattcttccagacgggagtctacggatcctaaatgcttccaaatcagacgagggaaagtacgtttgccgaggggaaaacgtctttggttctgctgaaattatagcttcgctatctgtaaaagaacctacaaggatagaacttactcctaaaagaacagaattgacagtgggagaaagcattgtccttaattgcaaagcaattcacgatgctagtttggatgtcactttctactggactctgaaaggacagcctattgatttcgaggaagagggtggacattttgaaagcatcagggccccatatgaagtaatgttatttggggaaaacatgctacctgacctagacctcagacccccaggcccacctgggatagtaattgttgaggaaataaccgaaagtacggccacactgtcctggagcccagcagctgacaaccacagcccaatctcctcctacaaccttcaagctcgcagcccattttccctgggctggcaaacagtaaagacagctctgaagagagcagcagatctcccagcgcagcgctcaagccctgctaagggacagactgcctcctcaagtgggtccctgacccccatgcctcctgactgggacacaactcccagcagggagttgtcaccgacacctcataaaggagagctctggctggcatctggtcaccaacatcgaagaccaaagatagataaatccacaaagatgaggaaaaaacagcacaaaaaggctgaaaattccaaaaaccagaacacctcttctcctccaaaggatcacaactcctcgccagcaagggaacaaaactggacggagaatgaatatgatgaattgacagaagcaggcatcagaagtgcaatcaaactagaactcaggattgagaaactcactcgaaaccacacaactacatggaaactgaaaaacctgctcctgaatgactactgggtaaataatgaaattaaggcagaaataaataagttctttgaaatcaatgagaacaaagagacaacatactag

SEQ ID NO: 14565 - DNA, 1320 bp, Homo sapiens
  SIMILAR (604)..(1080): 641254mologous to Homo sapiens p40,accession number U93566,Smith-Waterman Score=511.
atggacagtgaagtccaggctgatgatgaagtctcagatgaaaacggggaacttattggaaactggggcaaaggaggcatgggggtcagcgacccacttgaggaggcagtctgtcccttagcagagcttgagcgctctgctgggagatctgctgctctcttcagagccagcaggcaggaatgtttaagtctgctgaagctgacccaacagctgccccttcccccagaggtacggcattcagatctcctttcaagagccctgctcagaggaggagcatcatttgctgacagtctacagctgcaaaaccttcagatccaccgtggcacccatgccaaggttgtgcttaccccaggccagtggcaaagtacagtgagagaactagagctgggctattcctgcctgacagggaacctctcctatgtgcagtctgtgctctggggctccccatcagcctggggctcccctggtccttccattgcctccacctgtcaacaggctaagaagggagttacagtgctggttggggtgattgacctggactatcaagatgaaatcagactactactacacaatggaggtaaggaagagtatgtgtggaatacaggagataccttagggtgtctcttagtattaccataccctgtgattaagatcaatgagaaactacaacaacccaatccaggcaggactacaggtggtccagacccttcaggaatgaagattagcagcggcattagattctcacaggaatgtgaacctattgtgaactgcatatatgagggatctaggttgcatgctccttatgagaatctaatacctgatgatctgaggtggaacagttgcatcctgaaaccatcactcctcctccccctgtttgtggaaaaattgtgttccctgaaactggtctttggcgccaaaaaggttggggaccactggatattaggaaaccaaaagaagaaaaatactcaatgtgggccaaaatatggaaaaacagagtctcatgagcttttggtggagagaattgttttggtggatactgggatgttcctccacccagattccccttcaacagaggatgggttgtcccagccactggaagtgcagtcagcagtcagccttcagtgtcagctgcttcagagattgcctcatgctacagagaggagcctcaccaactattttggcccaatttgggacaactctgaaggctccagagcttctcaaggagacacggcaaccatccgatttctcaatcttttccccacctttcccgcctttctattccacaaagccgccatagtcatcctgggccgttctcaatga

SEQ ID NO: 14566 - DNA, 430 bp, Homo sapiens
  SIMILAR (86)..(3): 601254mologous to Homo sapiens Human secreted protein sequence encoded by gene 11 SEQ ID NO:72,accession number B24447,Smith-Waterman Score=80.
  misc_feature (1)...(430): n = a,t,c or g
ttagcttgctgggctccttgggggtgggacccaccgagccagaccacttggctccctggctgcagccccttttccaggagagtgaacggttagcggctnnnnnnnnnnnnnnnnnnnnnnnnngcgctggcttttgattacattatttttctctgtttcctattttcaattgtattgatttctgctctaatttttattatttcatttcctgtgcttactttggatttgactgcctcctaagatggatatctaaatgattgcttttggatcattcttttctaatacaggcattgaatgctatgcatttcttccaggcactgcttttgctgcatctcacaaatttacatatattgtgttgttattgtcagtcagttaaaatgggtaacaccatcggttgtgccttcctgtacgttctccgggacaggacatc

SEQ ID NO: 14567 - DNA, 637 bp, Homo sapiens
  SIMILAR (339)..(4): 521254mologous to Homo sapiens p40,accession number U93571,Smith-Waterman Score=280.
tcagctattcatacttgtgtatgcttcacgaagttctcgtgctgtgtttttcagctccatcaggtcacttatgttcttctctaaactggttattctagttagtatttcctctaaccttttttcaaggttcttagcttttctgaattgggttagaacatgctcctttagctcagaggagtttgttattacccaccttctgaagcctccttctgtaaattcgtcaaactcattctccatccagttttgttctcttgctggcaaggagttgtgatcctttgcaggagaaaaggtgttctggtttttggaattttcagcctttttgcactggtttttcctcatcttcatggatttatctacctttggtctttgatgctggtgaccttcggatggggtttttgtgtggatgtcctttttgttgatgttgacgctattcctttcagatgtctgttgacccctgctggaaggtctctcccactccggaggcacaggggtcagggacccacttgaggaggcagtctgtcccttagcagaacttgagcactgtgctgggagatctgctgctctcttcagagccagcaggcaggaacgtttaagtgtcctgaagctgtgcccacagctgccccttcccccaggtgct

SEQ ID NO: 14568 - DNA, 446 bp, Homo sapiens
  SIMILAR (910)..(1425): 591254mologous to Homo sapiens p40,accession number U93569,Smith-Waterman Score=432.
ctcgagcatcccaagttgtcttcagactgctgtgctggcagcaagaatttcaagccagtggatcttagcttgctgggctccgtgggggtgggatctgctgagctagaccacttggctccctggcttcagcccccctttccagaggagtaaatggttctgtctcactggcattccaggtgccactggggtatgaaaaaaaactacctgcagctagctcggtgtctgcccaaatggctgcccagttttgtgtttgaaacccaaggcccttgtgatgttagcacccaagggactctcctggtctatgggttgcaaagaccatgggaaaagcatagtatctaggccagatagcaccatccctcacagcatggtccttcacagcttcctttggctaggggagggagttccccaaccccttgtgcttctcggatgaggcaacaccccaccct

SEQ ID NO: 14569 - DNA, 337 bp, Homo sapiens
  SIMILAR (50)..(331): 411254mologous to Hylobates syndactylus dopamine receptor D4,accession number AB032904,Smith-Waterman Score=100.
ggaggatcgcagcgcatttcggccaagacagcctcacacgcttcaccctttacacgcacggtcacttgccccgcgcagccccaccccccccagccctcctagccctgacacacagctgggactctcaggtccgaccagcggtcctgaatccgctcccacggcacgggaaatccttcgtggcgaagcagcaggtggggaagcagcagcccctgcgctgcctcatctacatagaagtcgccctatccgtgatgtcaccgacagtgcctttcccagtccccgtctgcctttctgccgctcagcctaccaacccgctgccggagccggcagggggaagtga

SEQ ID NO: 14570 - DNA, 729 bp, Homo sapiens
  SIMILAR (287)..(490): 361254mologous to Mus musculus SPR2B protein,accession number AJ005560,Smith-Waterman Score=83.
atggctcgttatgccaggggcacgggctccctgcccccaaccccctttgatttctgtgggatggagagggcagagtctctgagtcctgcacggagtgaccattgggaagggttctggaggggctcaggtggagccacggacaggagtggcagtgaagggcagatggcctgggggactcaggcttgggccccacccagcctggggagtgggggtagtcattcttgtgtagcctttggttgcatggacccaaagtttacagaagaagaccctggaggagggaagcctaatctggccccctacaccatcctagagtggctgccctgctgtctacccaaccacacccttgccctgccctgctttcccttccttcaggacacgtctcccttgatgtcaaccgcttgcctgtgggctcaagggactgctgccagccgcccccgctgtctgctgccatcctgtgcccccactctgagtctgcgaggtggccttacccgccagctgcctggtaaaggtgttggtggtttctatcgcgttgactttctggcatctaagtgtggagctcctgtgttccacccaagggaggaccgatggcataaggcgaccgaggcaagtaccaaaaccagtgccgttagcccctgctccaacagcgccattgccatagaccatgatgtaaataatgctcgcctgagtgtttcagtgcatgatttcagcccttatatgtggaaagcctga

SEQ ID NO: 14571 - DNA, 400 bp, Homo sapiens; identical to SEQ ID NO: 2604
  SIMILAR (175)..(345): 421254mologous to Oryctolagus cuniculus endooligopeptidase A related protein; EOPA related protein,accession number AF015037,Smith-Waterman Score=91.

SEQ ID NO: 14572 - DNA, 1308 bp, Homo sapiens
  SIMILAR (1001)..(1102): 381254mologous to Ovis aries small proline-rich protein with paired repeat,accession number L77967,Smith-Waterman Score=60.
tcaccagtcttgactgtggttagaagaggtgtgaaaagggagtttttttctactgggtacaaaacggcctggagtttttctaagcctgcacaaaaaaggcttgctatcatcataaccatcatcgttatcatcatcatcatcatcatcagacaaagccgtaacagcaggaactgaaagttctacaggctgtacaggaagcaaggcagcatctttccggggaagcctcaggaagcttttactcatggcagaaggcaaagctggagggagacaccttatgtggctcatttcgattttcactatcacaaccaagcctgcttgctgtctttctcttcctccgcccttaaaccttagggacttcttttctctctcagcctttgaaggtggtatcatttcaggaggagagaatattgatgccctccttccattctgcccttcctcatgggatagcagctgtaccttggatgtgacactgctgagaataccgggacaacagtcatcctggtggcggaacatggttccaccccaggaaaagcaaaccaaggagatcaagggttgctgtacctttacttcagttgagctgtcagcccagacaaattccagaggggacgtgtgctccagtgaaggtcccagaaagcgtaagttctccatgggattataagccagaaaaggaagcgcactcctaagactatatctatctaatgcgtggtgcgtgtgcgtaaaagtgttgaggatattttctacagcgagcgcatacatcacacgaagggattcttctttagggccggtttggaccttccttaatttttcttttgggtcccctggagaaattccaacccctttcttcttttttcccgtttttccccttcccttagttgcgtggttttgcccagcttcattttgtttaccccaatgtccttttggtcccttcagaaccttctcccccccctcattccggggatgcgcattgctctcccccgaaaacgtttccggcttgggcatgcgtgtttgtgcccccagccttttccatccatgcatcctgcatcccactacccccactgtagcgcccactcctctgattcctggcccagcagcttgacctccggtcctcctctcaagcgtgcaagtcacacccccggaatccgtagatgtgcatctgtgccccgtgccccactcctgatctttgagaaattttcggatgtttcgatgggctcgggaacattcggttaataagctgagaactggagttagaccctctctatagctgcttcccatcaaggaacatgtggccagggttagcagatgttccat

SEQ ID NO: 14573 - DNA, 384 bp, Homo sapiens
  SIMILAR (1)..(3849): 861254mologous to Homo sapiens putative p150,accession number U93563,Smith-Waterman Score=5599.
atggagtggggcacggggcacagatgcacatctacggattccgggggtgtgacttgcacgcttgagaggaggaccggaggtcaagctgctgggccaggaatcagaggagtgggcgctacagtgggggacccgctcgatagcccctgcttcgccggcccggacgatgtagagggcgcgctcctcatccatggccgcaggtgcgggggagccgcggccgctctgcgcgcccaagccgctgcctccagcaaccggcgcctcacggccgcccctgacaaggcccaggactcggtcgaggcctggctagcggaccgaggcggagtcaggcccaaggccctgcttgctctcctgcctctccctccctcggagaactgtccagtcttttaa

SEQ ID NO: 14574 - DNA, 511 bp, Homo sapiens
  SIMILAR (67)..(510): 981254mologous to Homo sapiens unnamed protein product,accession number AK001482,Smith-Waterman Score=727.
ggtcaatgcccgcgtacgttatcttggatcctccagagcggccgcggctcccccgcacctgcggccatggatgaggattgcgccctctacatcgtccgggccggcgaagcaggggctatcgagcgggtcctgagggattacagcgacaagcatagggctactttcaaatttgaatcaacagatgaagataaaagaaagaaactctgtgaaggcatatttaaagtccttataaaggacatcccaacaacatgtcaagtgtcctgcctggaagtactccgcattctctccagagacaaaaaggttttagttcctgtgacaactaaggaaaatatgcagatactgctgcgactagccaagctaaatgagttagatgattctttggagaaagtatcagagttcccagttattgtggagtcattaaaatgtctgtgtaatatagtgttcaacagtcagatggcacagcagctcagcctggaacttaatcttgctgcaaagctctgtaaccttctga

SEQ ID NO: 14575 - DNA, 762 bp, Homo sapiens
  SIMILAR (363)..(671): 281254mologous to Homo sapiens Human HUPF-I mutant protein fragment 18,accession number Y21366,Smith-Waterman Score=88.
atgcagtcgagctgctgcacagatgcacacccaggaaagaagggctatgtctccacaaatgcaggagctgttccaggggcagctaacttcctccaaatgttccccagagcaatctgccgtctggagacccacttggacggaggcatccactccagcagccagggccaggtcaacggggacaacctgcaggcagacagcattgccacagaagaaagaattgtccagcatcagaataataatggccacaaccacgccctctgcctagagcgtcacacaaattgcaaccgcctgcagataatgcaggaatcaaagactacagtcactggacgccaggtgggtcatttcacaaatgatgccctgaaatccggccacccagctgaacgcatggaactaaatccatttcccaccaactgcctcaggtacgcacagtgtgctcgaggcactgcagacactcagagacagccaagtcccagggtacatcaggatcccagccctgccattctgcactccttccatctcctcatgaacatgggccgcagcacctccttcagctcccttctcatcgatgtcacccagacactgctccattcaactgtgatgctgtcaaggcatgccctgggcacgcaacagcagctctggaacatccctacctgtcagggcgccaaagccctccctccccaactcatctcccgaagctgcccgctgggcgtggctacacagtgtgtgcactgccaaagggccctggagaacgttctgcagtaa

SEQ ID NO: 14576 - DNA, 413 bp, Homo sapiens; identical to SEQ ID NO: 8619
  SIMILAR (174)..(413): 951254mologous to Homo sapiens reverse transcriptase,accession number L27428,Smith-Waterman Score=416.

SEQ ID NO: 14577 - DNA, 2448 bp, Homo sapiens; identical to SEQ ID NO: 7826
  SIMILAR (896)..(2062): 851254mologous to Homo sapiens putative p150,accession number U93569,Smith-Waterman Score=1644.

SEQ ID NO: 14578 - DNA, 1587 bp, Homo sapiens; identical to SEQ ID NO: 8950
  SIMILAR (85)..(390): 941254mologous to Homo sapiens myo-inositol-1(or 4)- monophosphatase,accession number X66922,Smith-Waterman Score=484.

SEQ ID NO: 14579 - DNA, 4729 bp, Homo sapiens; identical to SEQ ID NO: 7861
  SIMILAR (268)..(1095): 831254mologous to Homo sapiens myo-inositol-1(or 4)- monophosphatase,accession number X66922,Smith-Waterman Score=1092.

SEQ ID NO: 14580 - DNA, 1569 bp, Homo sapiens; identical to SEQ ID NO: 10063
  SIMILAR (25)..(1092): 951254mologous to Homo sapiens putative p150,accession number U93569,Smith-Waterman Score=1723.

SEQ ID NO: 14581 - DNA, 1430 bp, Homo sapiens
  SIMILAR (7)..(216): 871254mologous to Homo sapiens p40,accession number U93570,Smith-Waterman Score=314.
gcccaaaatctccttaagctgataagcaacttcagcaaagtctcaggatacaaaatcaatgtacaaaaatcacaagcattcttatacaccaacaacagacaaacagagagccaaatcatgagtgaactcccattcacaattgcttcaaagagaataagatacctaggaatccaacttacaagggatgtgaaggacctcttcaaggagaactacaaaccactgctcaaggaaataaaagaggatacaaacaaatggaagaacattccacgctcatgggtaggaagactcaatatcgtgaaaatggtcatactgcccaaggtaatttatagattcaatgccatccccatcaagctaccaatgactttcttcacagaattggaaaaaactactttaaagttcatatggaatcaaaaaagagcccccattgccaagtcaatcctaagtcaaaagaacaaagctggaggcatcacactacctgacttcaaactatactacaaggctacagtaaccaaaacagcatggcactggtaccaaaacagagatatagaccaatggaacagaacagagccctcagaaataataccacatatctacaaccatctgatctttgacacacctgacaaaaacaagaaatggggaaaggattccctatttaacaaattgtgctgggaaaactggctagccatatgtagaaagctgaaactggatcccttctttacaccttatacaaaaattaattcaagatggattaaagacttacacgttagacctaaaaccataaaaaccctagaagaaaacctaggcaataccattcaggacatagggataggcaaggactttatgactaaaacacaaaaagcaatggcaacaaacgccgaaatacacaaatgggatctcattaaactaaagcacttctgcacagcaaaagaaactaccatcagagtgaacaggcaacctaccaaatgggagaacatttttgcaatctactcatctgacaaacggctaatatccagaatctacaaagaactcaaacatatttacaaaagaaaaacaaacaaccccatcaacaagtgggcgaaggatatgaacagacacttctcaaaagaagacatttatgcagccaacagacacatgaaaaaatgctcatcatcactggccatcagagaaatgcaaatcaaaaccacaatgagatatcatctcacaccagttagaatggcgatcattaaaaagtcaggaaacaacaggtgctggagaggatgtggagaaataggaacactgcaaactatcacaaggacaaaaatccaaacactgcatgttctcaatcataggtgggaattgaacaatgagaacacttggacacaggaaggggaacatcacactctggggcctgttgtggggtgggggaggggggagggacagcattaggagat

SEQ ID NO: 14582 - DNA, 576 bp, Homo sapiens
  SIMILAR (676)..(1635): 921254mologous to Homo sapiens putative p150,accession number U93564,Smith-Waterman Score=1630.
atgggcaaggacttcatgtctaaaacaccaaaagcaatggcaacaaaagccaaaattgacaaatgggatctaattaaactaaagagcttctgcagagcaaaagaaactaccatcagagtgaacaggccacctacagaatgggagaaaatttttgcaatctacccatctgacaaagggctaatatccagaatctacaaagaactcaaactaatttacaagaaaaaaacaaacaaccccatcaaaaagtgggcaaaggacatgaacagacacttctcaaaagaatacatttatgcagccaaaagagacatgaaaaaatgctcatcatcactggccatcagagaaatgcaaatcaaaaccacaatgagataccatctcacaccagttagaatggcgatcatcaaaaagtcaggaaacaacagggcccatgaacaaagtggccatggtgccagggatggaggttacacatgggctgagcaacatggacttccactcaccaaggctgacctgtccacagccactgctgagtgcctagagcagagaccaacactgagccctcatatggcactatttctcagg

SEQ ID NO: 14583 - DNA, 3325 bp, Homo sapiens; identical to SEQ ID NO: 10079
  SIMILAR (385)..(1035): 881254mologous to Homo sapiens putative p150,accession number U93563,Smith-Waterman Score=985.

SEQ ID NO: 14584 - DNA, 2195 bp, Homo sapiens
  SIMILAR (85)..(729): 381254mologous to Feline leukemia virus gag-pol precursor polyprotein gPr80,accession number M18247,Smith-Waterman Score=388.
atgcagaacaagggaattgatgcaaaaatcctcaataaaatactggcaaaacaaatccagcagcacatcaaaaagcttatgcaccatgatcaagtgggcttcatccctgggatgcaaggctggttcaatatacgcaaatcaataaatgtaatccagcatataaacagagccaaagacaaaaaccacatgattatctcaacagatgcagaaaaagcctttgacaaaattcaacaacccttcatgctaaaaactctcaataaattaggtattgatgggatgtatttcaaaataataagagctgtctatgacaaacccacagccaatatcatactgaatgggcaaaaactggaagcattccctttgaaaactggcacaagacagggatgccctctctcaccactcctattcaacatagtgttggaagttctggccagggcaattaggcaggagaaggaaataaagggtattcaattaggaaaagaggaagtcaaattgtccctgtttgcagacgacatgattgtatgtctagaaaaccccattgtctcagcccaaaatctccttaagctgataagcaacttcagcaaagtctcaggatacaaaatcaatgtacaaaaatcacaagcattcttatacaccaacaacagacaaacagagagccaaatcatgagtgaactcccattcacaattgcttcaaagagaataaaatacctaggaatccaacttacaagggatgtgaacgacctcttcaaggagaactacaaaccactgctcaaggaaataaaagaggatacaaacaaatggaaaaacattccatgctcatgggtaggaagaatcaatatcatgaaaatggccataatgcccaaggtaatttacagattcaatgccatccccataaagctaccaatgactttcttcacagaattggaaaaaactactttaaagttcatatggaaccaaaaaagagcccgcatcaccaagtcaatcctaagccaaaagaacaaagctggaggcatcacactacctgacttcaaactatactacaaggctacagtaaccaaaacagcatggtactggtaccaaaacagagatatagatcaatggaacagaacagagccctcagaaataacaccgcatatctacaactatctgatctttgacaaacctgagaaaaacaagcaatggggaaaggattccctatttaataaatggtgctgggaaaactggctagccatatggagaaagctgaaactggatcccttccttacaccttatgcaaaaatcaattcaagatggattaaagatttaaatgttagacctaaaaccataaaaaccctagaagaaaacctaggcaataccattcaggacataggcatgggcaaggacttcatgtccaaaacaccaaaagcaatggcaacaaaagacaaaattgacaaatgggatctaattaaactaaagagcttctgcacagcaaaagaaactaccatcagagtgaacaggcaacctacaaaatgggagaaaattttcgcaacctactcatctgacaaagggctaatatccagaatctacaatgaactcaaacaaatttacaagaaaaaaacaaacaaccccatcaaaaagtgggcgaaggacatgaacagacacttctcaaaagaagacatttatgcagccaaaaaacacatgaaaaaatgctcatcatcactggccatcagagaaatgcaaatcaaaaccacaatgagataccatctcacaccagttagaatggcaatcattaaaaagacaggaaacaacaggtgctggagaggatgtggagaaataggaacacttttacactgttggtgggactgtaaactagttcaaccattgtggaagtcagtgtggcgattcctcagggatctagaactagaaataccatttgacccagccatcccattactgggtatatacccgaatgactataaatcatgctgctataaagacacatgcacacctgggcaccctagaaagcagcccaccctgggttctataccccagaagtcacaggatcattgcgctgaagtgctaaaggacatcctgtttctagcagggactggaggagcccaggctcttctggccagtttctccttatctcaggatgttgaattcccagcaccttctgcagttattcttgagaactacaagcaaaagactgaaatgag

SEQ ID NO: 14585 - DNA, 3165 bp, Homo sapiens
  SIMILAR (1201)..(1860): 701254mologous to Homo sapiens olfactory receptor,accession number Y10529,Smith-Waterman Score=795.
atgaacaaggtgattctaaaatctatatggaaatgccatggaccaagaagagccaaaataaacctgaaaaagaacaagaataagagtttcctgaagtgtggcctatggagactagcattagaatcactggaggagcttaaagatatagagacagggatagggcctgagattctgactttgttcttaactcttgaaatgagaagcgtgaatccgtggtggtttcatgacctgcataatcacactacctgtttttctgtcacagattgccttctctcagcacagcaattttatggacctggtcctggatgttcagttcctgtaccagctaaccagtcattttggactcgagaggaatattctaacttaaagctccccagagcatctcataaagctgtggtcaatggaaacattatgtgggttgttggaggatatatgttcaaccactcagattataacatggttctagccaccatgtatgtgttcggtggtttcaatagtctcctcctcagcgacatcctggtattcacctcggaacagtgtgatgcgcatcggagtgaagccgcttgtttagcagcaggacctggtattcggtgtctcttgaccatgacagatgtgaccagcacacagattgttacagctgcacagccaacaccaatgactgccactggtgcaatgaccattgtgtccccaggaaccacagctgctcagaaggccaggtatgagaattgccccaaggataaccccatgtactactgtaacaagaagaccagctgcaggagctgtgccctggaccagaactgccagtgggagccccggaatcaggagtgcattgccctgcccgaaaatatctgtggcattggctggcatttggttggaaactcatgtttgaaaattactactgccaaggagaattatgacaatgctaaattgttctgtaggaaccacaatgcccttttggcttctcttacaacccagaagaaggtagaatttgtccttaagcagctgcgaataatgcagtcatctcagagcatggcccgtgtcaccgtgtgttctcagtcctcgcatgagagcctggttgacactggttctctctgctttggggaccgtatctggctgtgcgctatgtggagggctgagctcgtgtcttcctggaacaccagtactctgggactgaaggctgctgcctgcatcaacccactcaatggtagtgtctgtggaaggcctgcaaaccacagtgctaagcagtgccggacaccatgtgccttgaggacagcatgtggagattgcaccagcggcagctctgagtgcatgtggtgcagcaacatgaagcagtgtgtggactccaatgcctatgtggcctccttcccttttggccagtgtatggaatggtatacgatgagcacctgcccccctgaaaattgttcaggctactgtacctgtagtcattgcttggagcaaccaggctgtggctggtgtactgatcccagcaatactggcaaagggaaatgcatagagggttcctataaaggaccagtgaagatgccttcgcaagcccctacaggaaatttctatccacagcccctgctcaattccagcatgtgtctagaggacagcagatacaactggtctttcattcactgtccagagaataaaatacctaggaatccaacttacaagggacgtgaaggacctcttcaaggagaactacaaaccactgctcaacgaaataaaagagggcacaaacaaatggaagaacattccatgctcatggatagaagaatcaatatggtgaaaaaggtaatttatagattcaataccatccccatcaagctgccaatgactttcttcacagaattggaaaaaactactttaaagttcatatggaaccaaaaaagagcccacatcgccaagtcaatcctaagccaaaagaacaaagctggaggcatcacactacctgacttcagactatactacaaggctacagtaaccaaaacagcatggtactggtaccaaaacagagatttagaccaacggaacagaacagagccttcagaaataataccacacatctacaactatctgatctttgacaaacctgacaaaaacaagaaatggggaaaggatttcctatttaacaaatggtgctgggaaaactggctagccatatgtagaaagctgaaactggatcccttccttacactttatacaaaaattaattcaagatggattaaagacttaaatgttagacctaaaaccataaaaaccctagaagagaacctaggcaataccattcaggacacaggcatgggcaaggacttcatgactaaaacaccgaaagcaatggtaacaaaagctaaaattgacaaatgggatctaattaaactaaagagcttctgcacagcaaaagaaactaccatcagagtgaacaggaaacctacagaatgggagaaaatttttgcaacctactcatctgacaaagggctaatatccagaatctacaaagaactcaaacaaatttacaagaaaaaaacaaacaaccccatcaaaaagtgggcaaaggatatgaacagacacttctcaaaagaagacatttatgcagccaacagacacgtgaaaaaatgctcatcatcactggccatcagagaaatgcaaatcaaaaccaccatgagatatcatctcacaccagttagaatggcgatcattaaaaagtcaggaaacaacgggtgctggagaggatgtggagaaataggaacacttttatactgttggtgggactgtaaactagctcaaccattgtggaagtcagtgtggcgattcctcagggatctagaactagaaataccatttgacccagccatcccattactgggtatatacccaaaggaatataaatcatgctgctacaaagacacatgcacacgtatgtttattgaggcactactcacaatagcaaagacttggaaccaacccaaatgtccaacaatgatagactggattaagaaaatgtggcacatatacactgtggaatactatgcagccataaaaaatgatgagttcatgtcctttgtagggacatggatgaagctggaaaccatcattctcagcaaactatcgcaaggacaaaaaaccaaacacagcatgttctcactcataggtgggaattga

SEQ ID NO: 14586 - DNA, 2101 bp, Homo sapiens; identical to SEQ ID NO: 7410
  SIMILAR (1)..(426): 641254mologous to Homo sapiens Human G-protein coupled receptor GRIR-1,accession number Y28279,Smith-Waterman Score=394.

SEQ ID NO: 14587 - DNA, 1073 bp, Homo sapiens
  SIMILAR (1)..(942): 891254mologous to Homo sapiens putative p150,accession number U93564,Smith-Waterman Score=1518.
atggccatactgcccaaggtagtttatagattcaatgccatccccatcaagctaccaatgacttccttcacagaattggaaaaacctactttaaagttcatgtggaaacacaaaagagcccgcattgccaagacaatcctaagccaaaagaacaaagctggaggcatcacgctacctgacttcaaacaatactacaaggctacagcaaccaaaacagcatggtactggtaccaaaacagagatatagaccaatggaacagaacagaaccctcaaaaataataccacacatctacaaccatctgatatttgacaaacctgacaaaaacaagaaatggggaaaggattccctatttaataaatggtgctgggaaaactggctagccatatgtagaaagctgaaactggatcccctccttacaccttatacaaaaattaattcaagatggattaaagacttacatgttagacctaaaaccataaaaaacctagaagaaaacctaggcaataccattcaggccacaggcatgggcaaggacttcatgactaaaacaccaaaagcaattgcagcaaaagccaaaattgacaagtgggatctaattaaactaaagggcttctgcacagcaaaagaaactaccatcagagtgaacaggcaacctacaaaatgggagaaaatttttgcaatctactcatctgacaaagggctaatatccagaatctacaaagaacttaaacaaatttacaagaaaaaatcaaacaaccccatcaaaaagtgggtgaaggataacagacacttctcaaaagaagacatttatgcagccaacagacacatgaaaaaatgctcatcatcactggccatcagagaaatgcaaatcaaaaccacaatgagataccatctcacaccagttagaatggcgatcattaaaaagtcaggaaacaacagaggaacgtgcagccttgtggtggtgaagaaacttgtcaaagggcacagactgagctcttctgttaagaggctgccattgccagagggtgtagatggattggagctgctcaaagccactgacagtggcgggag

SEQ ID NO: 14588 - DNA, 3507 bp, Homo sapiens
  SIMILAR (217)..(612): 341254mologous to Baboon endogenous virus strain M7 gag-pol precursor polyprotein,accession number D10032,Smith-Waterman Score= 186.
atggtaaagggatcaattcaacaagaggagctaactatcctaaatatttatgcacccaatacaggagcacccagattcataaagcaagtcctcagtgacctacaaagagacttagactcccacacattaataatgggagactttaacaccccactgtcaacattagacagatcaacgagacagaaagtcaacaaggatacccaggaattgaactcagctctgcaccaagcagacctaatagacatctacagaactcttcaccccaaatcaacagaatatacatttttttcagcaccacaccacacctattccaaaattgaccacatagttggaagtaaagctctcctcagcaaatgtaaaagaacagaaattataacaaactatctctcagaccacagtgcaatcaaactagaactcaggattaagaatctcactcaaagccgctcaactacatggaaactgaacaacctgctcctgaatgactactgggtacataacgaaatgaaggcagaaataaagatgttctttgaaaccaacgagaacaaagacaccacataccagaatctctgggacgcattcaaagcagtgtgtagagggaaatttatagcactaaacgtctacaagagaaagcaggaaagatccaaaattgacaccctaacatcacaattaaaagaactagaaaagcaagagcaaacacattcaaaagctagcagaaggcaagaaataactaaaatcagagcagaactgaaggaaatagagacacaaaaaacccttcaaaaaatcaatgaatccaggagctggttttttgaaaggatcaacaaaattgatagaccactagcaagactaataaagaaaaaaagagagaagaatcaaatagacacaataaaaaatgataaaggggatatcaccaccgatcccacagaaatacaaactaccatcagagaatactacaaacacctctatgcaaataaactagaaaatctagaagaaatggatacattcctcgacacatacactctcccaagactaaaccaggaagaagttgaatctctgaatagaccaataacaggctctgaaattgtggcaataatcaatagtttactaaccaaaaagagtccaggaccagatggattcacagccgaattctaccagaggtacaaggaggaactggtaccattccttctgaaactattccaatcaatagaaaaagagggaatcctccctaactcattttatgaggccagcatcattctgataccaaagccgggcagagacacaaccaaaaaagagaattttagaccaatatccttgatgaacattgatgcaaaaatcctcaataaaatactggcaaaccgaatccagcagcacatcaaaaagcttatccaccatgatcaagtgggcttcatccctgggatgcaaggctggttcaatatacgcaaatcgataaatgtaatccagcatataaacagagccaaagacaaaagccacatgattatctcaatagatgcagaaaaagcctttgacaaaattcaacaacccttcatgctaaaaactctcaataaattaggtattgatgggacgtatttcaaaataataagagctatctatgacaaacccacagccaatatcatactgaatgggcaaaaactggaagcattccctttgaaaactggcacaagacagggatgccctctctcaccgctcctattcaacatagtgttggaagttctggccagggcaatcaggcaggagaaggaaataaagggtattcaattaggaaaagaggaagtcaaattgtccctgtttgcagacgacatgattgtttatctagaaaaccccatcgtctcagcccaaaatctccttaagctgataagcaacttcagcaaagtctcaggatacaaaatcaatgtacaaaagtcacaagcattcttatacaccaacaacagacaaacagagagccaaatcatgggtgaactcccattcataattgcttcaaagagaataaaatacctaggaatccaacttacaagggatgtgaaggacctcttcaaggagaactacaaaccactgctcaaggaaataaaagaggagacaaacaaatggaagaacattccatgctcatgggtaggaagaatcaatatcgtgaaaatggccatactgcccaaggtaatttacagattcaatgccatccccatcaagctaccaatgactttcttcacagaattggaaaaaactactttaaagttcatatggaaccaaaaaagagcccgcatcgccaagtcaatcctaagccaaaagaacaaagctggaggcatcacactacctgacttcaaactatactacaaggctacagtaaccaaaacagcatggtactggtaccaaaacagagatatagatcaatggaacagaacagagccctcagaaataacgccgcatatctacaactatctgatctttgacaaacctgagaaaaacaagcaatggggaaaggattccctatttaataaatggtgctgggaaaactggctagccatatgtagaaagctgaaactggatcccttccttacaccttatacaaaaatcaattcaagatggattaaagatttaaacgttagacctaaaaccataaaaaccctagaagaaaacctaggcattaccattcaggacataggcgtgggcaaggacttcatgtccaaaacaccaaaaacaatggcaacaaaagccaaaattgacaaatgggatctaattaaactaaagagcttctgcacagcaaaagaaactaccatcagagtgaacaggcaacgtacaacatgggagaaaattttcgcaacctactcatctgacaaagggctaatatccagaatctacaatgaactcaaacaaatttacaagaaaaaaacaaacaaccccatcaaaaagtgggtgaaggacatgaacagacacttctcaaaagaagacatttatgcagccaaaaaacacatgaagaaatgctcatcatcactggccatcagagaaatgcaaatcaaaaccactatgagatatcatctcacaccagttagaatggcaatcattaaaaagtcaggaaacaacaggtgctggagaggatgtggagaaataggaacacttttacactgttggtgggactgtaaactagttcaaccattgtggaagtcagtgtggcgattcctcagggatctagaactagaaataccatttgacccagacatcccattactggctgcagggccaggttctgcagggttgcggctcagtatggtgggtgcatcaccaccatcagtgacaactggtccaggccatttgctccttatgcatgattatcttgataattggactgctgagaggacagaaagcatttccatgctgctggatcataggctctgctgtaagggaacaagtaattatgcaggcactcaccatgcacacttgaccagcacagcgttgaagaacaggtctcacatttccaccttgttgatgaaagcagcttgg

SEQ ID NO: 14589 - DNA, 1935 bp, Homo sapiens; identical to SEQ ID NO: 10224
  SIMILAR (1942)..(2676): 721254mologous to Homo sapiens olfactory receptor,accession number Y10529,Smith-Waterman Score=906.

SEQ ID NO: 14590 - DNA, 3303 bp, Homo sapiens
  SIMILAR (1072)..(2229): 941254mologous to Homo sapiens putative p150,accession number U93564,Smith-Waterman Score=1984.
atgggagactttaacaccctactgtcagcattagacagatcaacgagacagaaagttaacaaggatattcaggaattgaactcagctctgcaccaagcagacctaatagacatctacagaactctccaccccaaatcaacagaatatacattcttctcagcaccacaccgcacttattccaaaattgaccacttagttggaagtaaagcactcctcaggaaatgtaaaagaacagaaattataacaaactgtctctcagaccacagtgcaatcaaactagaactcaggattaagaaactcactcaaaaccactcaactacatggcaactgaacaacctgctcttgaatgactactgggtacataacgaaatgaaggcagaaataaagatgttctttgaaaccaatgaaaacaaagacacaacataccagaatctctggtatgtcaaagataccagaatctctggtatgctctggtatgtgaaagcagtgtgtagagggaaatttatagcactaaatgcccacaagagaaagcaggaaagatctaaaattgacaccctaacatcacaattaaaagaactagagaagcaagagcaaacacattcaaaaactagcagaaggcaagaaataactaagatcagagcagaactgaaggaaatagagacacaaaaaacccttcaaaaaatcaatgaatgcaggagctggttttttgaaaagatcaacaaaattgatagaccgctagcaagactaattaagaagaaaagagagaagaatcaaatagatgcaataaaaaatgacaaaggggatatcatcaccgatcccacagaaatacaaactaccatcagagaatactataaacacctctacggaaataaactagaaaatctagaagaaatggataaattcctggacacatacaccctcccaagactaaaccaggaagaagttgaatctctgaatagaccaataacaggctctgaaattgaggcaataattaatagcttaccaaccaaaaaaagtccaggaccagatggattcacagccgaattctaccagaggtacaaggaggagctgagaataaaatacctaggaattcaacttacaagggacgtgaaggaccttttcaaggagaactacaaaccactgctcaatgaaataaaagaggatacaaacaaatggaagaacattccatgctcatgggtaggaagaatcaatatcatgaaaatggccatactgcccaaggtaatttatagattcaatgccatccccatcaagctaccaatgactttcttcacagaattggaaaaaactactttaaagttcatatggaaccaaaaaagagcccgcatcgccaagtcaatcctaagccaaaagaacaaagctggaggcatcacgctacctgacttcaaactatactacaaggctacagtaaccaaaacagcatggtactggtaccaaaacagagatacagatcaatggaacagaacagagccctcagaaataatgctgcatatctacaaccatctgatctttgacaaacctgacaaaaacaagcaatggggaaaggattccctatttaataaatggtgctgggaaaactggctagccatatgtagaaagctgaaactggatcccttccttataccttatacaaaaattaattcaagatggattaaagacttaaacgttagacctaaaaccataaaatccctagaagaagacctaggcaataccattcaggacataggcatgggcaaggacttcatgtctaaaacaccaaaagcaatggcaacaaaagccaaaattgacaaatgggatctaattaaactaaagagcttctgcacagcaaaagaaactaccatcagagtgaacaggcaacctacagaatgggagaaattttttgcaatctactcttctgacaaagggctcatatccagaaggtacaatgaactcaaacaaatttacaagaaaaaaacaaacagccccatcaaaaagtggacaaaggatatgaacagacacttctcaaaagaagacatttatgcagccaaaagacacatgaaaaaatgctcatcatcactggccatcagagaaatgcaaatcaaaaccacaatgagataccatctcacaccagttagaatggcgatcattaaaaagtcaggaaacaacaggtgctggagaggatgtggagaaataggaacacttttacactgttgggtggactgttctattattgtcaaggtcccatcttcacttcaagctcatttacagttatcagggaaagaggttgatgtgaactcagaagtccatgttcaggaaatggctgaagttcgtaaagatgatgttgtaacagtgactgaattctaccagacattcaaagaagaattggtaccaatcctattgacactattccgcaagacagagaaagaaggaacactccctaattcatcctatgaagctagcatcaccctaataccaaaaccaggaaaggatacaaccaaaaaagaaaactacaggctgatatccctgatgaacacagacgctaaaattcttaacaaaatactagctaaccgaatccaacaacatatcaaaaagacaatccaccatgatcaagtgggttccataccagggatggagggatggtttaacatatgcaagtcaataaatgtgatacaccacataaacagaattaaaaacaaaaatcacatgatcatctcaatagatgcagaaaaagcattagacaaaatccagcatctctttatgattaaaactctcagcaaaatcggcatacaagggacatacctcaatgtaataaaagccatctatgacaaacccacagctaacataatactgaatggggaaaagttgaaagcattccctctgagaaatgaaacaagacaaggatgccctctctcaccactcctcttcaacacagtactgaaagtcctagccagagcagtcagacaagagaaggaaataaagggtatccaaattggtaaagaggaagtcatactgtcactgtttgctgatgatatgattgtttacctcaaaaaccctaaagactcctctagaaagctcctagaactgataaaaggattcaacaaagtttccagatacaaaattaatgtacacaaatcagtagctcttctaaacaccaacagcaaccaagcagagaatcaaatcaataactcaaccccttttacaatagctgcaaaaaaaaatgaagtacttaggaatatacctagccaaggaggtgaaagacctctacaaggaaaactacaaaacattgctgaaagaaatcatagatga

SEQ ID NO: 14591 - DNA, 3147 bp, Homo sapiens; identical to SEQ ID NO: 10229
  SIMILAR (3897)..(4535): 711254mologous to Homo sapiens olfactory receptor,accession number Y10529,Smith-Waterman Score=797.

SEQ ID NO: 14592 - DNA, 2748 bp, Homo sapiens; identical to SEQ ID NO: 2297
  SIMILAR (2008)..(2553): 461254mologous to Feline leukemia virus gag-pol precursor polyprotein gPr80,accession number AF052723,Smith-Waterman Score= 398.

SEQ ID NO: 14593 - DNA, 2745 bp, Homo sapiens
  SIMILAR (2846)..(2202): 981254mologous to Cloning vector pZC320 SopB,accession number U26464,Smith-Waterman Score=1050.
atgaagaagcagcacgccctcactcttcacacgaaacaggaacaccaaggtgtgtttgtgtgcacgcacatgcatgtgtctgaacacatgagtgtctactggaggctggagccagctgtaccaggttcacaggagccagttatgcacatctttttccagctccatgttcagcaacttcatgttggcagcttgaaactgactgtgatgagagtatttatgggactgacctttttttttaggaagtatttagagggcaaagctgaaagcaagatgttggagtgcagggagaagagatcagagcagcctactcactggcaggctaggctccaggaggaaagtcctcaggacctgggagaggtggaccctcatctccaggcccaggaacaggacaggtgctatccatgcttgatgggtttctcagatggtattttgaaaaatggtttgcttctgtgttcaaatgttttgcaaaagaagaagaaaaacaagcaatcctgctggtattttcgactagatgaggaagggaaatgggccctttatgcaggcctgccagaggtatttaaagataacaggaagggggaaaacagttggatgctgatttctcgttggtactatgcatataatagatgttcagtagatgcagttggaggaaggtgtaacaataaaagcaggacatcaagtctagccttcccgcggatcgtaatgaatggaactgcgggagctgtctccgctaaaattaactggaaacaacaacttgatgtggggatctcagggacagtcacacttcacgatgcctcactggcgacctcagggacagtcacacttcacgatgcctcactggcgacctcagggacagtcacacttcacgatgcctcactggcgatctcagggacaatcacgcttcatgataccgcacatcctgtgatggttgagttattacaaagcatcaagaaggcaacaaatttttcagcctctattgagtttgcaggtaacgtaaatgaaagttgggaagtcaaattgtcactgtttgcagatgacatgattgtatatctagaaaaccccattgtctcagcccaaaatctccttaagctgataagcaacttcagcaaagtctcaggatacaaaatcaatgtacaaaaatcacaagcattcttatacaccaatagcagacaaacagagagccaaatcatgagtgaactcccattcacaattgcttcaaagagaataaaatacctaggaatccaccttacaagggatgtgaaggacctcttcaaggagaactacaaaccactgctcaatgaaattaaagaggatacaaacaaatggaagaacattccatgctcgtgggtaggaagaatcaatatcgtgaaaatggccatactgcccaaggtaatttatagattcaatgccatccccatcaagctaccaatgactttcttcacagaattggaaaaaactactttaaagttcatatggaaccaaaaaagaacccgcatcgccaagtcaatcctaagccaaaagaacaaagctggaggcatcacgctgcctgacttcaaactatactacaaggctacagtaaccaaaacagcatggtactggtaccaaaacagagatatagatcaatggaacagaacagagccctcagaaataatgccacatatctacaactatctgatctttgacaaacctgagaaaaacaagcaatggggaaaggattccctatttaataaatggtgctgggaaaacagtctagccatatgtagaaagctgaaactggatcccttccttacaccttatacaaaaatcaattcaagatggattaaagacttaaacgttagacctaaaaccataaaaaccctagaagaaaacctaagcattaccattcaggacataggcacgggcaaggacttcatgtctaaaacaccaatagcaatggcaacaaaagccaaaattgacaaatgggatctcattaaactaaacagcttctgcacagcaaaagaaactaccatcagagtgaacaggcagcccacaaaatgggagaatatttttgcaacctactcatctgacaaagggctaatatccagaatctacaatgaactcaaacaaatttacaagaaaaaaacaaacaaccccatcaaagagtgggcaaaggacatgaacagacacttctcaaaagaagacatttatgcagccaaaaaacacatgaaaaaatgctcaccatcactggccatcagagaaatgcaaatcaaaaccacaatgagatatcatctcacaccagttagaatggcgatcattaaaaagtcaggaaacaacagatgcttgagaggatgtggagaaataggaacacttttacactgttggtgggactgtaaactagttcgaccattgtggaagtcagtgtggcgattcctcagggatctagaactagaaataccatttgacccagccatcccattactggatatacacccaaaggactataaatcatgctgctataaagacacatgcacactggggacaccctgtcctccactcgcccttacctgggaagttgtcctaaggaggatatgccgggcaatgcagtggccactagccagcgtccttggagcactcaaaatgtgggtagtccgaagggagagcaatcgagaaagccttggggaaatgaatgagtacgatccttcttccttcaggcatcaccctgcccatcagcccagccacctacccaactgtccatacgaagttttctaa

SEQ ID NO: 14594 - DNA, 3267 bp, Homo sapiens
  SIMILAR (946)..(1890): 921254mologous to Cloning vector pZC320 SopA,accession number U26464,Smith-Waterman Score=1481.
atggggaaaaaacagagcggaaaaactggaaactctaaaaagcagagcgcctctcctcctccaaaggaacacagttcctcaccagcaatggaacaaagctggatggagaatgactttgacgagatcaacaaaattgatagactgctagcaagattaataaagaagaaaggagagaagaatcaaatagacacaacaaaaaatgatataggggatatcaccaccaatcccacagaaatacaaactaccatcagagaatactataaacacctctacacaaataaactagaaaatctagaagaaatggataaatttctcgacacatacaccctcccaacaataaaccaggaagaaattgaatctctgaatagaacaataacaggatctgaaattctggcaataatcaatagcttaccaacgaaaaagagtccaggaccagatggattcacagccgaattctaccagaggtacaaggaggagctggtaccattccttctgaaactattccaatcaatagaaaaagagggaatcctccttaactcattttatgaggccagcatcatcctgataccaaagccgggcagagacacaaccaaaaaagagaattttagaccaatatccttgatgaacattgatgcaaaaatcttcaataaaatactggcaaaccgaatccagcagcacatcaaaaagcttatccaccatgatcaagtgggcttcatccctgggatgcaaggctggttcaatatacgcaaatcaataaatgtaatccagcatgtaaacagaaccaaagacaaaaaccgcatgattatctcaatagatgcagaaaaggcctttgacaaaattcaacaacccttcatgctaaaaactctcaataaattaggtattgatgggacgtatctcaaaataataagagctatctatgacaaacacacagccaatatcatactgaatgggcaaaaactggaagcattccctttgaaaactggcacaagacagggatgccctctctcaccactcctattcaacatagtgttggaagttctggccagggcaattaggcaggagaaggaaataaagggtattcaattaggaaaagaggaagtcaaattgtccctgtttgcagatgacatgattatatatctagaaaaccccatcgtctcagcccaaaatctccttaagctgataagcaactttagcaaagtctcaagatacaaaatcagtgtacaaataccacaagcattcttatacaccaataacaggcaaacagagagccaaatcatgagtgaactcccattcacaattgcttcaaagagaataaaatacctaggaatccaacttacaagggatgtgaaggacctcttcaaggagaactacaaaccactgctcaatgaaataaaagaggatacaaagaaatggaagaatattccatgctcatgggcaggaagaatcaatatcgtgaaaatggccatactgcccaagaattggaaaaaaactactttaaagttcatatggaaccaaaaaagagcccgcatcgccaagtcaatcctaagccaaaagaacaaagctggaggcatcacgctacctgacttcaaactatactacaaggctacagcaaccaaaacagcatggtactggtaccaaaacagagatctagatcaatggaacagaacagagccctcagaaataacaccacatatctacaactatctgatctttgacaaacctgacaaaaataagcaatggggaaaggattccctatttaataaatggtgctgtgaaaactggctagccatatgtagaaagctgaaactggatcccttccttacaccttatacaaaaattaattcaagatggattaaagacttaaacattagacctaaaaccataaaaaccctagaagaaaacctaggcattaccattcaggacataggcatgggcaaggacttcatgtctaaaacaccaaaagcaatggcaacaaaagccaaaattgacaaatgggatctaattaaacaagagagcttctgcacagcaaaagaaactaccatcagagtgaacaggcaacctacaaaatgggagaaaattttcgcaacctactcatctgacaaagggctaatatccagaatctacagtgaactcaaacaaatttacaagaaaaaaacaaacaaccccatcaaaaagtgggcgaaggacatgaacagacacttctcaaaagaagacatttatgcagccaaaaaacacatgaaaaaatgcccatcatcactggccatcagagaaatgcaaatcaaaaccacaatgagataccatctcacaccagttagaatggccatcattaaaaagtcaggaaacaacaggtgctggagaggatgtggagaaataggaacacttttacactgttggtgggactgtaaactagttcaaccattgtggaagtcagtgtggcgattcctcagggatctagaactagaaataccatttgacccagccatcccattactgggcatacacccaaaggactataaatcatgctgctataacgacacatgcacacctgttatctctggtctgaaggtacttaagaaagtagctgagcccctcagtccaggccatggtctcatggtcagtcttgcagtcttgtccccatttctgcttcctggggcaacggaaagtaagaccgccataggaatgttggaatttctggttctggaagtggggccatcggcaatgaaaatctgcatgaagcagggaggaatttgtgctggagtagtgccccaaatccaaggtatactggacttaaaagtccttgaaatttctctgcaacttgcttcagcttctttgttttaccacaatgctctcctcaactactgttttagcaattcagtgtcaggaatggaattaagagacacagggtcacatgtggtatctgcaaaaagcaacaccacaaaaacgcatacacagggagaggggcccagagaatcttgggtgtggcagggtcaaagtagcagtttctgggacattgttcttcagtttggctttcaagaagccctttcagctgaagtaggaaattccacatttattcttattttcccgcctatccctcctatccctttgaccagtggttctcagtgtgatcactggagccacaccatcactattccttgcgaacttgatagaaatgtaaattctctggctctatcccagacccatggaaacagaaactctgagctccttccatcaaaaagtggaatccagttgtctacccttcacaactga

SEQ ID NO: 14595 - DNA, 2985 bp, Homo sapiens; identical to SEQ ID NO: 7459
  SIMILAR (757)..(311): 1001254mologous to unidentified cloning vector 29kD protein essential for the replication of mini F plasmid,accession number AB015619,Smith-Waterman Score=775.

SEQ ID NO: 14596 - DNA, 3105 bp, Homo sapiens; identical to SEQ ID NO: 14528
  SIMILAR (760)..(828): 651254mologous to Homo sapiens alternative HHLA3 protein,accession number AF126164,Smith-Waterman Score=75.

SEQ ID NO: 14597 - DNA, 1443 bp, Homo sapiens
  SIMILAR (265)..(1335): 921254mologous to Homo sapiens putative p150,accession number U93567,Smith-Waterman Score=1802.
atggccagtaaacaggaatttgagaaatttgtgttgttgttattgccaaaaccatttatcttcatggagtcatctgagttctccacaagcaaagatggatggagaagtaaaagaaaagccatgggtgccatagctgagaggaagagcaagaatgaacagaatggtgatgggaagaagacactggagcccttcccagcagaatccaatggggaagaagagacaagggtcttgaattactttccatcccatttgtacagagtcagaactgaattggaaaaaactactataaagttcatatggaaccaaaaaagagcccatattgcaaagtcaatcctaagccaaaagaacaaagctggaggcatcacgctacctgacttcaaactatactacaaggctacagtaaccaaaacagcatggtacttgtaccaaaacagagatatagaccaatggaacagaacagagccctcagaaataatgctgcatatgtacaactatttgatctttgacaaacctgacaaaaacaagcaatggggaaaggattccctatttaataaatggtgccgggaaaactggctagccatatatagaaagctgaaactggatcccttccttacaccttatacaaaaattaatttaatgtggattaaagacttacatgttagaccgaaaaccatagaaaccctagaagaaaacctaggcaataccattcaggacataggcatgggcaaggacttcatgtctaaaacaccaaaagcaatggcaacaaaagccaaaattgacaaatgggatctaattaaactaaagagcttctgcacagcagaagaaaccaccatcagagtgaacaggcaacctacagaatgggagaaaatttttgcaatctactcatctgacaaagggctaatatccagaatctacaatgaactccaacaaatttacaagaaaaaaacaaacaaccccatcaaaaagtgggcaaaggatatgaacagacacttctcaaaagaagacatttatgcagccaaaagacacatgaaaaaatgctcatcatcactggccatcagagaaatgcaaatcaaaaccacaatgagataccatctcacaccagttagaatggcgatcattaaaaagtcaggaaacaacaggtgctggagaggatgtggagaaataggaacacttttatatggttggtgggactgtaaactagttcaaccattgtggaagacagtgtggcgattcctcaaggatctagaactagaaatagcatttgacccagccatcccattactgggtatatacccaaaggattataaatcatgctgctatcaagacacgtgcacaccagaggagcctcagcccacggccatcaccaacacaggcccatggggagtactgccaggcttccaccaatgttcatttaaagcccaagtgctctttagtcagcttatg

SEQ ID NO: 14598 - DNA, 3726 bp, Homo sapiens; identical to SEQ ID NO: 10240
  SIMILAR (1)..(888): 1001254mologous to Cloning vector pZC320 SopA,accession number U26464,Smith-Waterman Score=1548.

SEQ ID NO: 14599 - DNA, 1841 bp, Homo sapiens
  SIMILAR (86)..(1507): 911254mologous to Homo sapiens putative p150,accession number U93563,Smith-Waterman Score=2302.
aaccaatgacaaaaaccacatgattacctcagtagatggagaaaaggcctttgacaaaattcaacagcccttcatgctaaaaactctcaataaactagtgttggaagttctggccagggcaatcaggcaagagaaaggaataaagggtattcaattaggaaaagaggaagtcaaattgtccctgtttgcagatgacatgattgtatatttagaaaaccccatcgtctcagcccaaaatctccttaagctgataagcaacttcaacaaagtctcaggatacaaaatcaatgtgcaaaaatctcaagcattcgtatacaccaataacagacaaacagagagccaaatcatgagtgaactcccattcacaattgcttcaaagagaataaaatacctaggaatccaacttacaagggacgtgaaggacttctttaaggagaactacaaaccactgctcaacgaaataaaagaggacacaaacaaatggaagaaaattccatgctcatgggtaggaagaatcaatattgtgaaaatggccatactgcccaaggtaatttatagattcaatgccatccccatcaagctaccaatgactttcttcacaaaattggaaaaaactactttaaagttcatatggaaccaaaaaagagcccacattgccaagacaatcctaagccaaaagaacaaagctggaagcatcgcgctacctgacttcaaactatactggaaggccacagtaaccaaaacagcgtggtattggtaccaaaacagagatatagatcaatggaacagaatagagccctcagaaataataccacatatctacaaccatctgatctttgacaaacctgacaaaaacaagaaatggggaaaggattccctatttaataaatggtgctgggaaaactggctagccatatgtagaaagctgaaactggatcccttccttacaccttatacaaaaattaattcaagatggattaaagacttaaatgttagacctaaaaccataaaaaccctagaagaaaacctaggtaatactattcaggccatgggcatgggcaaggacttcatgactgaaacaccaaaagcaatggcaacaaaagccaaaattgacaaatgggatctaattaaactaaagagcttctgcacagcaaaagaaactaccatcagagtgaacaggcaacctacagaatgggagaaaatttttacaatctacccatctgacaaagggctaatatccagaatctacaatgaactcaaacaaattaacaagaaaaaatcaaacaatcccatcaataagtgggcaaaggatatgaacagacgcttctcaaaagaagacatttatgcagccaacagacacatgaaaaaatgctcatcatcactggccatcagagaaatgcaaatcaaaaccacaatgagataccatctcacaccagttagaatggcgatcattaaaaagtcaggaaacaacaggtgctggagagcatgtggagaaataggaacggttggatataaaaacgatagacaagaaacacaacgaacaaggaaattacataatatcttagaggataagccctatggggaaataaatcaaattttccttcaagttggacagcggaagaatggatatgcaagacctcaaaaaagttgccttccatgtaacattttccagtatgtgttccagaaaaaaatgaaagagaaaaccaagaaagagaaaaaatggaatctaggaaacacaagaattaagccagagaaaggcaaagaaaacatgggaggaacagttcttcccccttcctctcccatcatctgggttgaatatgagccaccagtatcatccccca

SEQ ID NO: 14600 - DNA, 744 bp, Homo sapiens
  SIMILAR (651)..(743): 871254mologous to Homo sapiens Human secreted protein, SEQ ID NO: 7214,accession number G03133,Smith-Waterman Score=148.
atggctggttatgaacaacagaggcaaagtagccagaggggggctgacttaatttggactggcaggagcagagtgcaggccctggtggagagccagcaagaaagcaggacttactcctacaaccacaaagaactaagtcccaccaacaatctgaatgaacttggaaacaaattctctctccaagccagaaaggaagtgctcagtcatccttggtgttctcatgatggaaaagtggtactgacggctgagaccttccaagataggcacaaaactgggcagaagtgggcctcaacgcccattctggctgcacttaaggagctcttcagcccgccgctgcaccgtggtagcccttctctgggctggccgaggccggagccggctccctccacttgcggggaggtgtggagggagacgcaccggctggaactggggctgcgcacggcgcttgcgggccacttagagttccgggccccggggtgtgatgttacccttcctgttacatggctgcagcaagagagaatgagagagaagcgaaagcataaaccccttataaaaccatcagatctcatgagacttacttactaccataagaatgccaacagacgtgaaaaaatgctcatcatcgctggccatcagagaaatgcaaatcaaaaccacaaatgtgatatcatctcacaccagttagaatgccgatcattaagaagtcaggaaacaacaggtgctggagaggatgtggagaaatag

SEQ ID NO: 14601 - DNA, 3591 bp, Homo sapiens
  SIMILAR (2147)..(3007): 1001254mologous to Cloning vector pZC320 SopA,accession number U26464,Smith-Waterman Score=1503.
atggaggaagatctaccaagcaaatggaaaacaaaaaaaggcaggggttgcaatcctagtctcgataaaacagactttaaaccaacaaagatcaaaagagacaaagaaggccattacataatggtaaagggatcaattcaacaagaggagctaactatcctaaatatttatgcacccaatacaggagcacccagattcataaagcaagtcctgagtgacctacaaagagacttagactcccacacattaataatgggagactttaacaccccactgtcaacattagacagattaatgagacagaaagtcaacaaggatacccaggaattgaactcagctctgcaccaagtggacctaatagacatctacagaactctccaccccaaatcaacagaatatacatttttttcagcaccacaccacacctattccaaaattgaccacatacttggaagtaaagctctcctcagcaaatgtaaaagaacagaaattataacaaactatctctcagaccacagtgcaatcaaactagaactcaggattaagaatctcactcaaagccgctcaactacatggaaactgaacaacctgctcctgaatgactactgggtacataacgaaatgaaggcagaaataaagatgttctttgaaaccaacgagaacaaagacaccacataccagaatctctgggacgcattcaaagcagtgtgtagagggaaatttatagcactaaatgcctacaagagaaagcaggaaagatccaaaattgacaccctaacatcacaattaaaagaactagaaaagcaagagcaaacacgttcaaaagctagcagaaggcaagaaataactaaaatcagagcagaactgaaggaaatagagacacaaaagacccttcaaaaaatcaatgaatccaggagctggttttttgaaaggatcaacaaaattgatagaccgttagcaagactaataaagaaaaaaagagagaagaatcaaatagacacaataaaaaatgataaaggggatatcaccactgatcccacagaaatacaaactaccatcagagaatactacaaacacctctacgcaaataaactagaaaatctagaagaaatggatacattcctcgacacatacactctcccaagactaaaccaggaagaagttgaatctctgaatagaccaataacaggatctgaaattgtggcaataatcaatagtttaccaaccaaaaagagtccaggaccagatggattcacagccgaattctaccagaggtacaaggaggaactgcatataaacagagccaaagacaaaaaccacatgattatctcaatagatgcagaaaaagcctttgacaaaattcaacaacccttcatgctaaaaactctcaataaattaggtattgatgggacgtatttcaaaataataagagctatttatgacaaacccacagccaatatcatactgaatgggcaaaaactggaagcattccctttgaaaactggcacaagacagggatgccctctctcaccgctcctattcaacatagtgttggaagttctggccagggcaatcaggcaggagaaggaaataaagggtattcaattaggaaaagaggaagtcaaattgtccctgtttgcagacgacatgattgtttatctagaaaaccccatcgtctcagcccaaaatctccttaagctgataagcaacttcagcaaagtctcaggatacaaaatcaatgtacaaaaatcacaagcattcttatacaacaacaacagacaaacagagagccaaatcatgagtgaactcccattcacaattgcttcaaagagaataaaatacctaggaatccaacttacaagggatgtgaaggacctcttcaaggagaactacaaaccactgctcaaggaaataaaagaggacacaaacaaatggaagaacattccgtgctcatgggtaggaagaatcaatatcgtgaaaatggccatactgcccaaggtaatttacagattcaatgccatccccatcaagctaccaatgactttcttcacagaattggaaaaaactactttaaagttcatatggaaccaaaaaagagcccgcatcgccaagtcaatcctaagccaaaagaacaaagctggaggcatcacactacctgacttcaaactatactacaaggctacagtaaccaaaacagcatggtactggtaccaaaacagagatatagatcaatggaacagaacagagccctcagaaataatgccgcatatctacaactatctgatctttgacaaacctgagaaaaacaagcaatggggaaaggattccctatttaataaatggtgctgggaaaactggctagccatatgtagaaagctgaaactggatcccttccttacgccttatacaaaaatcaattcaagatggattaaagatttaaacattagacctaaaaccataaaaaccctagaagaaaacctaggcattaccattcaggacataggcgtgggcaaggacttcatgtccaaaacaccaaaagcaatggcaacaaaagccaaaattgacaaatgggatctaattaaactaaagagcttctgcacagcaaaagaaactaccatcagagtgaacaggcaacctacaacatgggagaaaattttcgcaacctactcatctgacaaagggctaatatccagaatctacaatgaactcaaacaaatttacaagaaaaaaacaaacaaccccatcaaaaagtgggcaaaggacatgagcagacacttctcaaaagaagacatttatgcagccaaaaaacacatgaaaaaatgctcatcatcactggccatcagagaaatgcaaatcaaaaccactatgagatatcatctcacaccagttagaacggcaatcattaaaaagtcaggaaacaacaggtgctggagaggatgtggagaaataggaacacttttacactgttggtgggaccgtaaactagttcaaccattgtggaagtcagtgtggcgattcctcagggatctagaactagaaataccatttgacccagccatcccattactgggtatatacccaaaggactataaatcatgctgctataaagacacatgcacacacctttcaggatcctcagacgctcctggcatctgggagctgctagttggaggggccagtgactgtacccatttgctggacgtcaagcatgatgtttgcatcttgggttccctatgtgatttcacccttgcagcaattttgcaagctgagcagaacagtaaggcactaattctgcggggttggcttcgatggacttcaggttctgtgcaacgctggcccaagctgctcagagccatggtgctcagcggagtgtgtacactcctcctgtgggctgaggacgcgccacggtcccagcacagcacagtgcatgctgtgaaactaagacttgaacgtcagtggaaggtcagtgctgaagctgagtccaagcggccacgaatcgtaaaaatgtccagaggaattcagcactcctctaggagaattatgcaacaggaaaacccaatggacccaaatcaattcagcaactttttttaa

SEQ ID NO: 14602 - DNA, 5569 bp, Homo sapiens
  SIMILAR (822)..(4): 721254mologous to Cloning vector pZC320 SopB,accession number U26464,Smith-Waterman Score=912.
atgaaggcagaaataaagatgttctttgaaaccaacgagaacaaagacacagcataccagaatctctgggacgcattcaaagcagtgtgtagagggaaatgtatagcactaaatgcccacaagagaaagcaggaaagatccaaaattgacaccctaacatcacaattaaaagtactagaaaagcaagagcaaacacattcaaaagctagcagaaggcaagaaataactaaaatcagagcagaactgaaggaaatagagacacaaaaaacacttcaaaaaatcaatgaatccaggagctgtttttttgaaagcatcaacaaaattgatagaccactagcaagactaataaagaaaaaaagagagaagaatcaaatagacacaataaaaaatgataaaggggatatcaccaccgatcccacagacatacaaactaccatcagagaatactacaaacacctctacgcaaataaactagaaaatctagaagaaatggataaattcctcgacacatacactctcccaagactaaaccaggaagaagttgaatctctgaatagaccaataacaggagctgaaattgtggcaataatcaatagtttaccaaccaaaaagagtccaggaccagatggattcacagccgaattctaccagaggtacaaggaggaactggtaccattccttctgaaactattccaatcaatagaaaaagagggaatcctccctaactcattttatgaggccagcatcattctgataccaaagccgggtagagacacaaccaaaaaagagaattttagaccaatatccttgatgaacattgatgcaaaaatcctcaataaaatactggcaaaccgaatccagcagcacatcaaaaagcttatccaccatgatcaagtgggcttcatctctgggatgcaaggctggttcaatatacgcaaatcaataaatgtaatccagcatataaacagagccaaagacaaaaaccacatgattatctcaatagatgcagaaaaagcctttgacaaaattcaacaacccttcatgctaaaaactctcaataaattagtgttggaagttctggccagggcaatcaggcaggagaaggaaataaagggtattcaattaggaaaagaggaagtcaaattgtccctgtttgcagacgacatgattgtttatctagaaaagcccatcgtctcagcccaaaatctccttaagctgataagcaacttcagcatagtctcaggatacaaaatcaatgtacaaaaatcacaagcattcttatacaccaacaacagacaaacagagagccaaatcatgagtgaactcccattcacaattgcttcaaagagaataaaatacctaggaatccaacttacaagggatgtgaaggacctcttcaaggagaactacaaaccactgctcaaggaaataaaagaggacacaaacaaatggaagaacattccatgctcatgggtaggaagaatcaatgtcatgaaaatggccatactgcccaaggtaatttacagattcaatgccatccccatcaagctaccaatgactttcttcacagaattggaaaaaactactttaaagttcatatggaaccaaaaaagagcccgcatcgccaagtcaatcctaagccaaaagaacaaagctggaggcatcacactacctgacttcaaactatactacaagtctacagtaaccaaaacagcatggtactggtaccaaaacagagatatagatcaatggaacagaacagagccctcagaaataacgccacatacctacaactatctgatctttgacaaacctgagaaaaacaagcaatggggaaaggattccctatttaataaatggtgctgggaaaactggctagccatatgtagaaagctgaaactggatcccttccttacaccttatagaaaaatcaattcaagatggattaaagatttaaacgttagacctaaaaccataaaaaccctagaagaaaacctaggcattaccattcaggacataggcgtgggcaaggacttcatgtccaaaacaccaaaagcaatggcaaccaaagccaaaattgacaaatgggatctaattaaactaaagagcttctgcacagcaaaagaaactaccatcagagtgaacaggcaacctacaaaatgggagaacattttcgcaacctactcatctgacaaagggctaatatccagaatctacaatgaactcaaacaaatttacaagaaaaaaacaaacaaccccatcaaaaagtgggtgaaggacatgaacagacacttctcaaaagaagacatttatgcagccaaaaaatacatgaaaaaatgctcatcatcactggccatcagagaaatgcaaatcaaaaccactatgagatatcatctcacaccagttagaatggcaatcattaaaaagtcaggaaacaacaggtgctggagaggatgtggagaaataggaacacttttacactgttggtgggactgtaaactagttcaaccattgtggaagtcagtgtggcgattcctcagggatctagaactagaaataccatttgacccagccatcccattactgggtatatacctaaaagattataaatcatgctgctataaagacacatgcacacgatctcatccaggataccacattgcatttagtcatcaggtcttcttaggctttgctaacattttcctcattttggatgaccttgaaagttctgagtactggtcaggcctatgcatgctttgtgatgaatttgtagccacagtgcagtgcttgggcgaaaagacatatgcccagtgtggattggcagcagatggtgctcatcagaatgcattgaacagtaatccaagccctcatgaagccatcattagcaaagcctttcctactgatggtgtgggccctgcccatgggggcgtgggacctgttgcatggatgatctggtttgtaggagagccagagaggtggcaggagtctcagactggaagccccaccctgagggatggtctggcagacaggccatccttgaagggcagcagccagcagccccaggcagagggagagaaaaaagaagcagcacagacacctgtagaaatagcactaatttggcctgatttaaattcaggtgctaacttgtggcagtcctgtgaatgtcaggctcagggcctgaggagttgcttgtggcctcactcacagggaaggcatgcatctgatggaagaactcagccacagccaaccccagcagtagaacccactctggaggtcaagggctccttgagggcagggacttactgcatggtagaccctgagcagcctgtcctccagggcaggagagaatgcagcacatggctattggagtccaagtcattcacctgctggttatttgacagggacttcctgagtgcctactcgagagaaacagaaccaatagagggtgtgtgtgtggacagaaaaagggagagggagagggagagggaaattgtattgaaggaattggctgatgcagttatagcagctggaaagtccaacatctgcagggttccacttcttggaccacctgcagggccatctcacagcattgtgaacattccttcaggctcctatttggggaaggagaaccttgtgggaaaatgtgccctgaatgtgagtgtgaatgtgaatgtgcaatttattgctgatgtggtagatgggactgaggcaaaaggacctggtggagaatggaaaagaaccagtgacaaaaaccacgatttctcaatagacgccaaaaaggccttcggcaaaattcaacaacgcttcatgctaaaagcactcaataaactaggtattgatggaacatatctcaaaataataagagctatctatgacaaacccacagcaaatatcataccgaatgggcaaaaactggaagcattccctttgaaaactggcacaacacagggatgccctttctcaccactcctattcaacatagtgttggaagttctggccagggtaatcaggcaggagaaggaaataaagggtactcaattaggaaaagaggaagtcacattgtccctgtttgcagatgacatgattgtatatctacaaaaccccattgtctcagcccaaaatctccttaagctgataggcaacttcagcaaagtctcaggatacaaaatcaatgtgcaaaaatcacaagcattcttatacaccaataacagacaaacagagagccaaatcatgagtgaactcccattcacaattgcttcaaagagaataaaatacctaggaatccaacttacaagggacgtgaaggacctcttcaaggagaactacaaaccactgctcaaggagataaaagaggatacaaacaaatggaagaacattccatgctcatgggtaggaagaatcaatatcgtgaaaatggccatactgcccaaggtaatttatcgattcaatgccatccccatcaagctaccaatgactttcttcacagaattggaaaaaactactttaaagttcaaatggaaccaaaaaagagcctgcattgccaagtcaatcctaagccaaaagaacaaagctggaggcatcatgctacccgacttcaaactatactacaaggctacagtaatcaaaacagcatggtactggtaccaaaacagagatatagaccaatggaacagaacagagccctcagaaataatgccgcatatctacaactatctgatcttcgacaaacctgaccaaaacaagcaatggggaaaggattccctatttaataaatggtactgggaaaactgcctagccatatgtagaaagctgaaactagatcccttccttacaccttatacaaaaattaattcaagatggattaaagacttaaatgttagacttaaaaccataaaagccctagaagaaaacctaggcaataccattcaggacataggcatgggcaaggacttcatgtctaaaacaccaaaagcaatggcaacaaaagacaaaattgacaaatgggatctaattaaaccaaagagcttctgcacagcaaaagaaactaccatcagagtgaacaggcaacctacaaaatgggagaaaattttcgcaacctactcatctgacaaagggctaatatccagaaactacaatgaactcaaacaaatttacaagaaaaaaacaatcggccccatcaaaaagtgggcagaggatatgaacaggcacttctcaaaagaagacacttatgcagccaaaaaacacatgaaaaaatgctcatcatcactggccatcagagaaatgcaaatcaaaaccacaatgagataccatctcacaccagttagaatggtgatcattaaaaagtcaggaaacaacaggtgctggagaggatgtggagaaacaggaacactttcacactgttggtgggactgtaaactaatcaaccattgtggaatttttgagagattaaggaccgaagactggtggggactcataaatgatacaagtaaagtattagccacaacagaagaaaaaggggtgcccaaacgcataatcttgaaatttgatgtctgtgctgtcattaatagca

SEQ ID NO: 14603 - DNA, 8177 bp, Homo sapiens
  SIMILAR (3373)..(4545): 901254mologous to Cloning vector pSacBII SacB,accession number U09128,Smith-Waterman Score=1853.
atgaatgaaatgaagcgagaagagaagtttagagaaaaaagaataaaaagaaacgaacaaagcctccaagaaatatgggactatgtgaaaagaccaaatctatgtctgattggtgtacctgaaagtgacggggagaatggaaccaagttggaaaacactctgcaggatattatccaggagaacttccccaatctagcaaggcaggccgacattcaaattcaggaaatacagagaacaccacaaagatactcctcgagaagagcaactccaagacacataattgtcagagtcaccaaagttgaaatgaaggaagaaatgttaagggcagccagagagaaagaaatacaaactaccatcagagaatactataaacacctctatgcaaataaactagaaagtctagaagaaatggataaattcctcaacacatacacctttccaagactaaaccacgtagaagttgaatctctgaatagaccaataacaggctctgaaattgaggcaataattaatagcttaccaacaaaaaaaagtccaggaccagatggattcacagccgaattctaccagaggtacaaggaggagcaggtaccattcattctgaaactattccaatcaatagaaaaagagggaatcctccctaactcattttatgaggccagcatcatcctgataccaaagccgggcagagacacaaccaaaaaagagaattttagaccaatatctttgatgaatattgacgcaaaaatcctcaataaaatactggcaaaccgaatccaggaacacatcaaaaagcttatccaccatgatcaagtgggcttcatccctgggatgcaaagctggttcaacatacaaaaatcaataaatgtaatccagcatataaacagaaccaaagacaaaaaccgcatgattatctcaatagatgcagaaaaggcctttgacaaaattcaacaacccttcatgctaaaaactctcaataaattaggtattgatgggacgtatctcaaaatagtaagagctatctatgacaaacccacagccaatatcatactgaatgggcaaaaactggaagcattccctttgaaaactggcacaagacagggatgccctctctcaccactcctattcaacatagtgttggaagttctggccagggcaattaggcaggagaaggaaataaagggtattcaattaggaaaagaggaagtcaaattgtccctgtttgcagatgacatgactctgtatctagaaaaccccattgtctcagcccaaaatctccttaagctgataagcaacttcagcaacatctcaggatacaaaattaatgtacaaaaatcacaagcattcttatacaccaacaacagacaaacagagagacaaatcatgagtgaattcccattcacaattgcttcaaagggaataaaatacctaggaatccaacttacaaggtatgtgaaggacctcttcaagaagaactacaaaccactgctcaatgaaataaaagaggatacaaacaaatggagtaacattccatgctcatgggtaggaagaatcaatattgtgaaaatggccatactgcccaaggtaatttacagattcaatgccatccccatcaagctaccaatgactttcttcacagaattggaaaaaactactttaaagttcatatggaaccaaaaaagagcccgcatcaccaagtcaatcctaagccaaaagaacaaagctggaggcatcacactacctgacttcaaactatactacaaggctacagtaaccaaaacagcatggtactggtaccaaaacagagatatagatcaatggaacagaacagagacctcagaaataatgccacgtatctacaactatctgatctttgacaaacctgagaaaaacaagccatggggaaaggattccctatttaataaatggtgctgggaaaactggctagccatatgtagaaagctgaaactggatccctttcttacacgttatacaaaaattaattcaagatggattaaacacttacatgttagacctaaaaccataaaaaccctagaagaaaacctaggcattaccattcagggcataggcatgggcaaggacttcatgtctaaaacaccaaaagcaatggaaacaaaagccaaaattgacaaatgggatctaattaaactaaagagcttctgcacagcaaaagaaactaccatcagagtgaacaggcaacctacaaaatgggagaaaatttttgcaagctactcatctgacaaagggctaatatccagaatctacaatgaactgagacaaatttacaagaaaaaatcaaacaaccccatcaaaaagtgggtgaaggatatgaacagacacttctcaaaagaagacatttatgcagctaaaaaacacatgaaaaaatgctcatcatcactggccatcagagaaatgcaaatcaaaaccacaatgagataccatctcacaccagttagaatggcgatcattaaaaagtcaggaaacgacaggtgctgtagaggatgtggagaaataggaacacttttacactgttggtgggactgtaaactagttcaaccattgtggaagtcagtgtggcgattcctcagggatctagaactagaaataccatttgacccagccatcccattactgggtatatacccaaacgactataaatcatgctgctataaagacacatgcacattgagtctaccagaaatccgcaactgcccaacgaaaagtgtcccagtccccttctctgttgatgaaactcagtatcatgttgaagatactagtcctgtaagctggcaagtaaaagttctaggcaagcatatacatcagggaagcagctatgaagatgtttggctgcctcagcgcatgcaaggaaaactaacaaacagaaaggacatccacaccaaaaacccatctgtacatcaccatcatcaaagaccaaaagtagataaaaccacaaagatggggaaaaaacagaacagaaaaactggaaactctaaaaagcagagcgcctctcctcctccaaaggaacgcagttcctcaccagcaatgcaacaaagctggacggagaatgactttgacgagctgagagaagaaggcttcagacgatcaaattactctgagctacgggaggacattcaaaccaaaggcaaagaagttgaaaactttgaaaaaaatttagaagaatgtataactagaataaccaatacagagaagtgcttaaaggagctgatggagctgaaaaccaaggctcgagaactacgtgaagaatgcagaagcctcaggagccaatgcgatcaactggaagaaagggtatcagcaatggaagatgaaatgaatgaaatgaagcaagaagggaagtttagagaaaaaagaataaaaagaaacgagcaaagcctccaagaaatatgggactatgtgaaaagaccaaatctacgtctgattggtgtacctgaaagtgatgcggagaatggaaccaagttggaaaacactctgcaggatattatccaggagactttccccaatctagcaaggcaggccaacgttcagattcaggaaatacagagaacgccacaaagatactcctcgagaagagcaactccaagacacataattgtcagattcaccaaagttgaaatgaaggaaaaaatgttaagggcagccagagagaaaggtcgagttaccctcaaagggaagcccatcagactaacagcggatctctcggcagaaaccctacaagccagaagagagtgggggccaatattgaacattcttaaagaaaagaattttcaacccagaatttcatatccagccaaactaagcttcataagtgaaggagaaataaaatactttacagacaagcaaatgctgaccgattttgtcaccagcaggcctgccctaaaagagctcctgaaggaagcgctaaacatggaaaggaacaaccggtaccagccactgcaaaatcatgccaaaatgtaaagaccatcgagactaggaagaaactgcatcaactaacgagcaaaatcaccagctaacatcataatgacaggatcaaattcacacataacaatattaactttaaatgtaaatggactaaattctccaattaaaagacacagactggcaagttggataaagagtcaagacccatcagtgtgctgtattcaggaaacccatctcatgtgcagagacacacataggctcaaaataaaaggatggaggaagatctaccaagcaaatggaaaacaaaaaaaggcaggggttgcaatcctagtctctgataaaacagactttaaaccaacaaagatcaaaagagacaaagaaggccattacatgatggtaaagggatcaattcaacaagaggagctaactatcctaaatatgtatgcacccaatacaggagcacccagattcataaagcaagtcctgagtgacctacaaagagacttagactcccacacattaataatgggagactttaacaccccactgtcaacattagacagatcaacgagacagaaagtcaacaaggatacccaggaattgaactcagctctgcaccaagcagacctaatagacatctacagaactctccaccccaaatcaacagaatatacatttttttcagcaccacaccacagctattccaaaattgaccacatacttggaagtgaagctctcctcagcaaatgtaaaagaacagaaattataacaaactatctctcagaccacagtgcaatcaaactagaactcaggattaagaatctcactcaaagccgctcaactacatggaaactgaacaacctgctcctgaatgactactgggtacataacgaaatgaaggcagaaataaagatgttctttgaaaccaacgagaacaaagacacaacataccagaatctctaggacgcattcaaagcagtgtgtagagggaaatttatagcactaaatgcccacaagagaaagcaggaaagatccaaaattgacaccctaacatcacaattaaaagaactagaaaagcaagagcaaacacattcaaaagctagcagaaggcaagaaataactaaaatcagagcagaactgaaggaaatagagacacaaaaaacccttcaaaaaatcaatgaatccaggagctggttttttgaaaggatcaacaaaattgatagaccgctagcaagactaataaagaaaaaaagagagaagaatcaaatagacacaataaaaaatgataaaggggatatccaccaccgatctcacagaaatacaaactaccatcagggaatactacaaacacctctacgcaaataaactagaaaatctagaagaaatggataaattcctcgacacatacactctcccaagactaaaccaggaagaagttgaatctctgaatagaccgataacaggagctgaaattgtggcaataatcaatagcttaccaaccaaaaggagtgcaggaccagatggattcacagctgaattctaccagaggtacaaggaggaactggtaccattccttctgaaactattccaatcaatagaaaaagagggaatcctccctaactcattttgtgaggccagcatcattctgataccaaagccaggcagagacacaacaaaaaaagagaattttagaccaatatccttgatgaacattgatgcaaaaatcctcaataaaatactggcaaaacgaatccagcagcacatcaaaaagcttatccaccatgatcaagtgggcttcatccctgggatgcaaggctggttcaatatacgcaaatcaataaatgtaatccagcatatcaacagagccaaagacaaaaaccacatgattatctcaatagatgcagaaaaggcctttgacaaaattcaacaacacttcatgctaaaaactctcaatagattaggtattgatgggacgtatttcaaaataataagagctatctatgacaaacccacagccaatatcatactgaatgggcaaaaactggaagcattccctttgaaaactggcacaagacaaggatgccctctctcaccactcctattcaacatagtgttggaagttctggccagggcaattaggcaggagaaggaaataaaaggtattcaattaggaaaagaggaggtcaaattgtgcctgtttgcagacgacatgattgtgtatctagaaaaccccattgtctcagcccaaaatctccttaagctgataagcaacttcagcaaagtctcaggatacaaaatcaatggacaaaaatcacaagcattcttatacaccaacaacagacaaacagagagccaaatcatgagtgaactcccattcacaattgcgtcaaagagaataaaatacctaggaatccaacttacaagggatgtgaaggacctcttcaaggagaactacaaaccactgctcaacaaaataaaagaggatacaaagaaatggaagaacattttcattccatgcttatgggtaggaagaatcaatatcgtgaaaatggccatactgcccaagggaatttatagattcaatgccatccccatcaagctaccaatgactttcttcacagtactggaaaaaactactttaaagttcatatggaaccaaaaaagagcccgcattgccaagtcaatcctaagccaaaagaacaaagctggaggcatcacgctacctgacttcaaactattctacaaggctacagtaaccaaaacagcacggtactggtaccaaaatggagatatagatcaatggaatggaagagaccccttagaaataacgccacatatctacaactatctgatcttcgacaaacctgagaaaaacaagcaatggggaaaggattccctatttaataaatggtgctgggaaaactggctagccatatatggaaagctgaaaatggatcccttccctacaccttatacaaaaattaattcaagatggattaaagacttaaactttagacctaaaaccataaaaaccctagaagaaaacctaggcattaccattcaggacataggcatgggcaaggactttatgtctaaaacaccaaaagcaatggcaacaaaagccaaaattgacaaatgggatctaattaaactaaatagcttctgcacagcaaaagaaactaccatcagagtgaacaggcaacctacagaatgggagaaaatttttgcaatctactcatctgacaaagggctaatatccagaatctacaatgaactcaaacaaatttacaagaaaaaagcaaacaaccccatcaaaaagtgggcaaaggacatgaacagacactcctcaaaagaagacatttacgcagccaaaaaacacatgaaaaaatgctcatccatcattggccatcagagaaatgcaaaatcaaaaccacaaatgagataccatctcacaccagttagaatggcaatcattaaaaagtcaggaaacaacaggtgcttggagaggatgtggagaaataggaacacttttacacttgttggtgggacatgtaaactagttcaaccattgtggaagtcagtgtggcgattcctcagggatctagaactagaaataccatttgacccagccatcccattactgggtatatacccaaaggactataaatcatgctgctataaagacacatgcacacgtttgtttattgtggcattattcacacaatagcaaagacttggagccaacccaaatgtccaacaatgatagactggattaagaaaatgtggccacatatacaccatggaatactatgcaagccataaaaaaatgatgagtttatgtcctctgtcgggacgtggatgaagctggaaaccatcattctcagcaaactatcgcaaggacaaaaaaccaaacagtgcatgttctcactcataggtgggaattgaacaatgagaacacatggacacagggaaggggaacatcaccacactggggcctgttgtggggtggagggaggcggggagggatagcattaggagagatacctaatattaaatgatgagttcatgggtgtagcacaccagcatggcacatgtatacatatgtaacaaacctgcacgttgtgcacatgtaccctaaaacttaaaagtataatataaaaaataaattcttacttgaattgtgcaatttgtagaactttaataaaaaaatgatacatctt

SEQ ID NO: 14604 - DNA, 2415 bp, Homo sapiens
  SIMILAR (372)..(707): 1001254mologous to Escherichia coli K12 uptake of enterochelin; tonB-dependent uptake of B colicins,accession number AE000383,Smith-Waterman Score=551.
  misc_feature (1)...(2415): n = a,t,c or g
ccgtcttcttgttttttaccccccccggcgaaaaggggattttcttccaaaggcgattaaattggggaacccccagggtttttcccctccccacgttgttaaacccccggcccggggaatttaattttgggggccccataaaaaaactaatacctccgccagcccgcggacgtaaacttggatcctttaaaacggccccccctttttttttggnnnnnnnnnnnnnaacctgtttatttcgggcttatgattaactaactgcaaggtctatttgcaggaaaggccaagaatcccctccttgccgttgtcacccacatccacagagcagccctagtgcacaggtgcagccactgccacccacggcacacgggaacaggacccatcgctcgcaggcctgctctcctgcccagggagatgccacgtgtgtctgtccggcagattcatggcaccggttcccaagcagctacgggagggcttagatttgtttggtggtccccagggcctttccctcggaggcttgggcgcatccccacagcccccaaggggatggggggctcttgccacggggcccaaattccacagctcgcacggctgggggcccttcccgtggcccatggggaaggaagccaagtatttccagaggtggcttggaggcccctgggtggcggggagaggaacagggagagcatgagacagacccacagggctgaggccaaccctgcttttatttcacaagagcttctcgatggcttgacaggagcttcgggtttcaggatggagtccggcctcggcccccgcgaacacttgatgtcctccagcacagccatgtcccacgagaaggtcaggagggcagagggcaccagcccgcactcgttcaaggccaggttctcgtcctcggacagcttctgccctcccgaggccagcagctcaaaaggcagccagtcgctctgcacgggcctcccggacgaacccgtacaccgcccccaagccgctcccgagcgtagaaagtgccctgcaggaggcagccatcggggaggcgcacgcgcagcagcgtgtaagttgtacttgcgcagcccccgctgctcctccttctcccgcatggccttggtccgcagcacgctcagccgctccaccgcctcggacctgagcctctgctcccgcttgatctcctctgctgtgaggttgaagaagtccccaggcagttcgaactgcgaggccaggggcgagggctggaagacgcggcgctgcctgtccagcttggcgcgcacggccctccgcagccagcagctgttccttgtgcctctccaggctctggggctgggccaaggtggtctcgctcagcacgtagaactcctcggggtcctctacagcgtggcaggacatgggtgtcacctgatcctgggcgggaagcaacaccttctggaacccaatggcctcaaaaaactcgtgggtcccttccaggcagttaatgcgctcctgaaacaccttgttctgcagcttgatcttccggtacttctcctcctcggggtgcaggtggatgttgtccaggtaccgtcccaccagccctggaagggcacaattaaccacagcggtggggaagccacagtgccggaagagtggagagccagagctgaagggccgcagtgccagcagggggctcctgcggggtgctccctcggcgttggcgggcagcgtggacctccaggcctgcccccgatcccggtccctggtctttgttgaacgtgtagatcttcatgaatggaggcggccactgggtcggtggagaagtgcaagagaatggcctccttgatgcaggcgtcccgctggtccttcctcagggtggccccagtgagcggacaggtgaagtacacgccaggcacagccaggtgggcagagccttcctctctgggctcagataccacgttggtccctggggcctcggggctcccgctgacggtggcttcggcttgaagttcctttctcacctggtttcggatggtgtcctgcgatgtgggggccccaggcccgggactgcttctgctccagccgggctaagagcagcagcggctgccatctgtgccctcattggtgggtccctggcggggcggcctgggggctggctggttgggcttctctttgtgggccttttcccccacggactctttgagcttctgaccgggtcccgcgctcttgaacttgatgtcggccttgaactcctgaaagaatttcttcatggtggcggctcggtcttgcggcggggggacgcgggggcggggaggcacggggcccagtcggggacggggccgccggagaccagccaccggaagaaaataaaaaaaaaaaaaaaaaaaaaaaaaatttacctcgccgccggaagtcccgccttcccctggcctgccacgtgacaatcgacta

SEQ ID NO: 14605 - DNA, 822 bp, Homo sapiens
  SIMILAR (10)..(246): 741254mologous to Homo sapiens regulator of G-protein signaling,accession number AF300649,Smith-Waterman Score=289.
atggctgagactgagctccacagggactttctttctgcagcattgtggaaaaatcccccagaccttgcgtctctgtccctgcccttgctgggctacatcgctgctctggtgaaggcagctgccttcacagctgctgtgtccctgatgaacaagaaatggccaggaccctgcactgagtgcctgcggacatatttagacagcacgtggcctctgctggcactgtctggggacagcagaaaagagtactggggagtggacatgggaagattctatgtaaaattcaacaaaagtgaactttcaaaagagcccatagggccctcccaggcctgccaggccagctcacagctccagtccactggtccaccctacaaggctcctaccacctggataccacagcaggcctgcccttgcccaggcagcagccagccgccctcctactgctctggcactctgcagtctccattgctgctctcctaccgctctgtctccatcgccaccaccaaccacagcaaggcagtgtacccggccctcaatagcgcccccaaccaacgcccccaccccctctccatgggcagtccagccccgcccccagagagcgccctcaacaaccccctccccactgccagcagtgtagcaccctatagtgaccctaacccgtcccccaccaccagcattgcagccccaaatagtgcccccaacccgctccccactgtgggcagtgcagccatggatagtgtccccaaccagctcccagatgcaggcaatgatgccctggatatcacgcccgcccccgtcccccacaggcagagtagcaccggatag

SEQ ID NO: 14606 - DNA, 2789 bp, Homo sapiens
  SIMILAR (736)..(692): 401254mologous to Ictalurus punctatus metallothionein,accession number AF087935,Smith-Waterman Score=46.
atggcagcggtgaggaagcagctgccgcggggtgtgcttgggtacggaggctcaggagctctgctcagcactgcggctgccgacacgtccttgctgttgggctcccttcaggagagaaagtccgcgtccgcgggccctggctatctccggagctccgtggcagcctggtccgggctgtggctgactggagcctcggaggcacactcggtcgtcttggcctgcttctctcgcaaggatgtggaagcttccctgagtgtaggtctccccgtccacccagacgcctcctgcgctcggcgtttggatgctgcagacggagtggcaggaggctctcctcgtctaccccagtccacggatggctggagattaaccgctcacagtctaccccagtccacggatggctggagattaactgctcacagtctacccccgcccacggatggctggagattaaccgctcacagtctaccccagtccacggatggctggagattaaccgctcacagtctacccccgcccacggatggctggagattaaccactcacagtctaccccagtccacggatggctggagattaaccgctcacagtctaccccagtccacggatggctggagattaaccgctcacagtctaccccagtccacggatggctggagattaaccattcacagtctaccccagtccacggatgcctggagattaaccgctcacagtctaccccagcccatggatggctggagctgcaggagtgcccagtggtgcgtggccaagagactgtggtgctcaaacaccccaacatcaagcagcctggcacttgtacctacccttctcacagcgccttcccttcaaactcctttgtgatccaccgagcagctcacagtaacatcaccttgggaaacacaggaaacccaaccacattccggttccccatgatgcagagaccagccctaatgactgcaattacggctccgtttaacagacaactgactggatgttacaatggagctgtcagccccactgaattaatcctgctggaggaccattttcatctgttgctcctgttccaggcaaacagccctggccgagcgcagcgccccgccgtgcacaacacgctcctggagctgaatcgcgcaccgcccggaggcggcgtggagaaaccgagcacgggagccagcagcggacgcatcgttcgatgccaaaccgatatgtgggaacggaaaacaaagcgaaagctgccactctccattctctcagagtcttctggaagcttccgtccagcaagtcaggaacccgtgttattacagctcttggattcacacgctcatcccggccccgcgtgtcaccgcgagtggactcacaccctcatcccgaccccgcgtgtcaccgcgagtggattcacagcctcatcccgaccccgcgtgtcaccgcgagtggattcacacgctcatcccgaccccacgtgtcaccgcgagtgggttcacacgctcatcccgaccccgcgtgtcaccgcgagtggactcacacgctcatcccgaccctgcgtgtcaccgcgagtggactcacaccctcatcccgaccccgcgtgtcaccgcgagtggattcacacactcatcccgaccctgcgtgtcaccgcgagtggattcacacgctcatcccgaccccgcgtgtcaccgcgagtggactcacaccctcatcccgaccccgcgtgtcaccgcgagtggattcacacactcatcccgaccccgcgtgtcaccgtgagtggactcacaccctcatcccgaccccgcgtgtcaccgcgagtggattcacacgctcatcccggccccgcgtgtcaccgcgaggggactcacaccctcatcccgaccccacgtgtcaccgcgagtggactcacacgctcatcccgaccccgcgtgtcacagcaagcgggttcacagcctcatcccgaccctgcgtgtcaccgcgagtggattcacacgctcatcccgagccccgcgtgttatcgcgcagtgggctcacaccctcatcccgaccccgcatgtcaccgcgagtgggttcacaccctcatcccgaccccgcgtgtcaccacgagtgggttcacaccctcatcccgaccccgcgtgtcaccgcgagtgggttcacagcctcatcccgaccccgcgtgtcaccgcgagtggattcacacgctcatcccgaccctgcgtgtcaccacgagtgggttcacagcctcatcccgaccccgcgtgtcaccgcgagtggattcacaccctcatcccgaccccgcgtgtcaccgcgagtggactcacacgctcatcccgaccccgcgtgtcaccgcgagtgggttcacagcgtcatcccgaccccacgtgtcaccgcgagtggactcacacgctcatcccgaccccgcgtgtcaccgcgagtggattcacagcctcatcccgaccccgcgtgtcaccgcgagtggactcacacgctcatcccgaccccgcgtgtcaccgcgagtgggttcacagcctcatcccgaccccgcgtgtcaccgcgagtggattcacacgctcatcccgatcccgcgtgtcaccgcgagtgggttcacagcctcatcccgaccccacatgtcaccgcgagtgggttcacacgctcatcccgaccccgcgtgtcaccgcgagtggattcacacgctcatcccgaccccgcgtgtcaccgcgagtgggttcacagcctcatcccgaccccgcgtgtcaccgcgagtggattcacacgctcatcccgaccccacatgttcacgtgtttaa

SEQ ID NO: 14607 - DNA, 440 bp, Homo sapiens
  SIMILAR (44)..(136): 541254mologous to synthetic construct beta- galactosidase,accession number M18897,Smith-Waterman Score=67.
aaggcaggagaggaacactgagtctgggaggcgattctcagctctcacctgggccagtctgcacgtggccacggaaagaaaatattgggcctcaaacctggctcagacgctgcttccttacgaaaatctagcctagtcttccccaccctctgcccggcttcgttccgcagaatgagcccgcgcggttaacatgatcgccgtagggacttccaactctcggttctaccaggaaatagggccaaggcctacgcgtaggctcccacccccataccagcagagacaaagccgtagccgtagaagagcgtcgtggtggctgcagcaacttccagacgtgggtccctccacgcccgcctcccgaccccacttactaggccttttcatattggctgtagaaggaagcacaaacacatcaacctgcctccgcacgaaacgtcgacccg

SEQ ID NO: 14608 - DNA, 659 bp, Homo sapiens
  SIMILAR (114)..(245): 1001254mologous to Homo sapiens putative nucleotide binding protein, estradiol-induced,accession number BC001024,Smith-Waterman Score=216.
tgctaaatggataatgccagtactctcttgtggaaggtattaccagaacaagggatgtagttctgatcattttctccttgataatgtagttctggtcattttttccttgataggtgattgaagcctccgatgttgtcctagaggtgttggatgccagagatcctcttggttgcagatgtcctcaggtagaagaggccattgtccagagtggacagaaaaagctggtacttatattaaataaatcaggtgagtaaagagggtaccctttgtcttctgtgtacatgggtgaggtacgaggaaacagtctgatagtcactgaagactgattagatccaactctgatctcagcaaagccagagtacgtgcactttgccagagacagtgctaggcagtggggagccaggtgacttttacaactgactcaactggtttctactattcttttgccattcagtatttaccatcttttaaataaagagtgtaagctgctatacccagcttattgtgtagtatatttcatctaggaagtgatgacagtgtgacaaattccccacacctacacaatgtcgggtattagttcaagagtgaaataaattggaacgtatgtgacaaaatatttaaatgaaatgcataattatgcatctgagtttgagcggcaa

SEQ ID NO: 14609 - DNA, 890 bp, Homo sapiens
  SIMILAR (762)..(382): 961254mologous to Escherichia coli K12 putative fimbrial protein,accession number AE000322,Smith-Waterman Score=623.
  misc_feature (1)...(890): n = a,t,c or g
atgctttgggccccagagtggtgtatactggcactggtgttagcaggtccaggcaggccaattcctgggactccagctggcttgctggagtgccaggaatggcagcagtggatcgagcaggncgggagtcgggcgtggagggacccacgtctggaagttgctgcagccaccacgacgctcttctacggctacggctttgtctctgctgagttaaagaaagcaagtaaacgcatgacctgccataagcggtataaaatccaaaaagaaggctccagaacatcatcgaaaaataagaggggaggctaagaagcggggtcacaacaagcctaggaaagacccaggagttccaaacagtgctcccctttaaggaggctcttcttgagggaagctgagctaaggaaacagaggcttgaagaactaaaacagcagcagaaacttgacaggcagaaggaactagaaaagaaaagaaaacttgaaacctaatcctggatatttaagccatcaaatgtgggaccctatggaaaaaggagtttgggctttgcaaaactgagaaacaaagcccaggtcgggcaaacagaattcaaagaagctgtactgccaagaacttaaaaaggtgattgaagcctccgatgttgtcctagaggtgttggatgccagagatcctcttggttgcagatgtcctcaggtaggaagaggccattgtcccagagtggacagaaaaagctggtactttatatttaaataaatcagatctgggtaccaaaggaggatttgggagagctggctaaaattattttgaaggaaagatttgcccaacagtgggtgtttcagagcctcaaccaaaacccaaagggttaaagggaagataaccaaggtatcctttattagtg

SEQ ID NO: 14610 - DNA, 3206 bp, Homo sapiens
  SIMILAR (670)..(1155): 251254mologous to Rattus norvegicus serine-arginine-rich splicing regulatory protein SRRP86,accession number AF234765,Smith- Waterman Score=132.
ccttggcctgagaagggtccaatcagaggcgagctggctaccagcaacccctgaagcttggcctgataagacgagcaagaccaattggattcttcttctgaggatttggtcttgggaaactgaataccgagagcctcagaaatctgtgccttctttcccgaagcctgacccaaaggccaaggctggagtctcacctcggcaccaggctccctcctccagtaggccacaaggaactcaaactggggccccaggtcctccagctcaataaccaggtggaagccatctttggtgatctccatcccaggtcgggtaaggatggctgttggcaagacaacaggagagtcaaagccagccccagacagggttgatttcccaagaacagaagggcccacacagatagtctctacaccctggttactggtgatggagttatacttgcctttcagacccagatactgcaggaccagaagggccaccctgatcactggtcttggattggaaaggggtggggcatgttctgggctaaatctgccttccctggggtcagtgtgagaggtgacagcatgctggcagtcctcacagccctcgctcactctgggcgcgtcctctgcctgggctcccactttggccgcacttgaggagcccttcagcccaccgctgcactgcgggagcccctttctgggctggccaagactggagccggctccctcagcccctccatgggctcctgtgcggcccgagcctccccaacaaggaccaccctctgctccagggcgcccaatcccatcgaccacccaagggctgaggagtgcggacgcagggcgcaggactggcacgcagctccaccggcagcccgcgaaggtctgcagcttcactcctgaagccagcgagaccacgagcccaccaggaggaacgaacaactccagacgcgccgccttaagagctgtaacactcaccgtgaagatctgcagcttcactccagaaggaagaaactctgaacacatccgaacatcagaagggacagactccagacgcgccaccttaagagctgtaacactcaccgcgagggtctgcggcttcattcttgaagtcagtgagatcaagaacccaccaattccggacacaagtggacactcagaagaaaggcagttcctacagggagttttcagagaacaaagcctttccccatcgcgtccctcatcagagaagtgtttatgcctgcttgttgaagagctacctgaggagggctccaggacgccactgcggccgccgtgatggccgtaacggcacgaggcctgcgctccgccgccgccgcgtagctgtgtacatgtgtctttatagcagcatgatttataatcttttgggtatatacccagtaatgggattgctgagtcaaatggtatttctagttctagatccttgaggaatcgccacactgtcttccacaatggttgaactagtttacagtcccaccaacagtgtaaaagtgttcctatttctccacatcctctccaacacctgttgtttcctgactttttaatgattgccattctaactggtatgagatggtatctcattgtgattttgatttgcatttctctgatgaccagtgatgatgagcattttttcatgtgtctgttggctgcataaatgtctccgtttgagaagtgtctgttcatatcctttgcccactttttgatggttttttttttcttgtaaatttgtttgagttctttgtagaatctggatattagtcctttgtcagatgggtagattgcaaaatttttctcccattctgtaggttgcctgttcactctgatggtagtttcttctgctgtgcagaagctctttaggttaattatatcccatttgtcaattttggcttttgttgccattgcttttggtgttttagtcatgaagtccttgcccatgcctatgtcctgaatggtattgcctaggttttcttctaggacttttatggctttaggtctaacatttaagtctttaatccatcttgaattgatttttgtataaggtgtaaggaagggatccagtttcagctttctacatatggctagccagttttcccagcaccatttattaaatagggaatcctttccccattgcttgtttttctcaggtttgtcaaagatcagatagttgtagatatgcggcattatttctgagggctctgttctgttccattgatctatatctctgttttggtaccagtaccatgctgtttcggttactgtagccttgtagtatagtttgaatagtgatgcctccagctttattcttgctttgttcttttggcttaggattgacttggcgatgcgggctcttttttgattccatatgaactttaaagtagttttttccagttctgtgaagaaagtcgttggtagcttgatgggggtggcattgaatctataaattaccttgggtagtatggccattttcatgatattgattcttcctatccatgagcatggaatgttcttccatttgtttgtatcctcttttatttcattgagcagtggtttgtagttctccttgaagaggtccttcacatcccttgtaagttggattcctaggtattttattctctttgaagcaattgtgaatgggagttcactcatgatttggctccctgtttgtctgttattggtgtataagaatgactgtgatttttgcacattgattttgtatcctgagactttgctgaagttgcttatcagcttaaggagattttgggctgagacaatggggttttctagatatacaatcatgtcatctgcaaacagggacaatttgacttcctcttttcctaattgaataccctttatttccttctcctgcctgattgccctggccagaacttccaacattgagtttctattaaagggatgcttcaggatgctccaggctgaggtctgtgagcccaatgtggccctgacacgaaggttgtatggcacagtggccgtgatgtcatcagtgacatcacactcaggaccttcagtgagtgagcaccagctgctggggatccagatgtggctcgtgtacaggctctcgtactcctctgctccgaagcgtgatattcttgccacattggtcatttctccaaaatgctgagcactttttgccttaggacctttgactaactgttcactccatctcaaacgctctgcccctgctgttcgcat

SEQ ID NO: 14611 - DNA, 2874 bp, Homo sapiens
  SIMILAR (1842)..(4): 971254mologous to Homo sapiens myosin X,accession number AF234532,Smith-Waterman Score=3122.
ctactttgccgttcgcacttctacggtgcccttgagcttctcctcgctgtcgttttcaaagtacatcagcttggactggcggaggacaaaccagcgcttcttccaatttctcctggacagcgtggaggagccccccccttttttgtggagccagccttgcttgagggcctcctgcttggagcggaaccacaagaaggtttcatccttgaggacgcaccagcggcgtttccaagagttcatcaggccacctttcatgtacagaaagctgtggaaatacggcagagtgacacagctgtacacagagtcacgccggtatgaaagctcatcatctgtatcaaacctggaatcaaagtcctcttcactatcttcaaacgaggactgcgccccctcagagctgaaccggtaggcacccgagctgttgtaggtccccacagagcagcggtagtcgggggaccactggctgccgtaggagttggagaaggtcacgctgctgccggaagtgatggcaccgtcctcatagtcatcctggtcgtagtcgtagtcgccgtctggggagggcaagtccccagcgttctggggcatgcagtaggtggactcgccgctggaggagttgtgtaggctcccggagtcctgcactgatggggcgagcagcaccgtgctgtccgcactggggctggtgggcaccaccgtgtcgttcatgtatgggtcctcctctgaagagtcatcgctggtccggatgccacttgttcgctggtctgagtggccgtgctcgctggggttgggggagtccttgaaggcgtcgtcgtcggcttcgaagccctcatcgacctcctcctctgggtagggctggctgaagttgaagttgggcttctcctcgcatgcgctctcagccagctcgctggaaaattcgcttcccaccgacagggaccgctcgatattccggacacactcgtcgatctcgtcgaaattgagggactcgaggaactcctgggccgccctgcacgcttcctcctccagcctgcggagctcctggtcccgccgctcctgcagcttctgcagggaagcctcggtcagcgacagctcctgctgctccttcatgcgctgcaggtcctcgatttctttctccagacggaggatctcttccacctgcttattttccttctgtttctccagttcacgggtcagttcagcttccttctggctcttctgcaaggcttcgagttcttgctgcttcctcgtttcttcttcctgctgggcgcggagctcggcttctcttcgctctctctctctttctctttcttcttcctcccgtttcttcttttcttcctcttcctgtttcttcttttcttcttgctcccttttctctgccagcaattgtctgtaaactctccgagcaatctgacctctgagttgcttctggaaaactatggctgcctttttcaggtgcaaaaatctcctcctcagaaggaatgctctgtaattcttctgtattatcaccacacaataaaggacctttctgtattgttttcgtgctaagaagcccaagacatgggcccgaatcaccatggccgcgtggctcacttcctcttccctccgcttctccagtttctgttccaaggattctcgaagaaagaccttggtcttccccagctgccactcgctgttggaggcatcatagagctgcagcaggctcgtgcacttccctcggacgtcctcaggcagagccagattcctcatcagcactttatacccagctttgcggattctcacagtctccagcatccctgagtaccgcagctggttcagcacaaccgcctggtcaaactggtctggcatcctgcgatcacaatcacgagggggtagatctggatttccattggtggttttcttttcggctgcaatttccttttcttcccgtacatatccttcagccaccgaggcattcagcagagagagggaagcacttctgtattccatcattccagccctctcgcaagcagcaatgcggttccggacctgaggacccacatttgtaaacaaatgcacagaggagtgaaaggggctgacaacctggataattctaagaagtcctaactcgcaagttgatgcttctgccctctctatccttccattaatcttgtccatatcattcaccagttctgtctctttgaatatcttctcatcaggtccccagttgagcgcgtcttctctgaactcttgtagtaatccaggaatgtgggtgagtacaaaccaccgtttcttcagtttcagtgaagacatctttggactgttcttcacctctttgtgcaaccatcctctcacgatgaattcctggccctccactctggtgtcccctttggacctctgcagcagggttatccagtggtgcatctcctccggcgtgtcggcgttgcagtgcagcacccggttggccgtgatgatcacaaacgagttgggtctatcagggctgtcagaggcacacacagaatcaatcagccccacatccaaggtgcccacagcattctgtgggtttgcctgctcatcatgcatctcctggatctcctggtccgtggacgcgtggacctgactcagcacgctgaaccactggaaaccttgagctaaacacagggtgccgattggtgtatttacaatccttgagctagacataaaggttctccacgtcctcaccagagcagctagtggatcccgcaccagggctgcaggtggagctgcctgccagtcctgcgccgtgcgctcgcattccttagcccttaggtggtcgatgggactgggcgccgtggagcagggggcggtgctcgtcagggaggctccggccgcacaggagcccatggagtgggtgggaggctcaggcat

SEQ ID NO: 14612 - DNA, 630 bp, Homo sapiens
  SIMILAR (611)..(96): 331254mologous to Mus musculus neural variant mena+ protein,accession number U72521,Smith-Waterman Score=123.
ctagatacaaaggttctccacgtccccaccagactcaggagcccagctggcttcacctagtggatcctgcaccagggctgcaggtggagctgcctgccagtcctgcgccgtgcgctcgcattcgtcagcccttgggtggtcgttgggactgggcgccgtggagcagggggtggtgctcgtcggggaggctcgggcagcacaggagcccatggagtgggtgggaggctcaggcatggcgggctgcaggtcccaagccctgccccgcgggaaggcagctaaggcccggcgagaaatcgagcacagcgccggtgggccggcactgctgggggatccagtacactctccgcagccactggcccgggtgctaagtccctcattcctcggggccagcggggctggctggctgctccggaactccagctggcccgcaagcgccgcacgcagccccggttcccgctcgcgcctctccctccacacctccctgcaagctgagggagtgggctccagccttggccagcccagaaaggggctcccacagtgcaggtgggggctgaagggctcctcaaatgccgccaaagtgggagcccaggcaggggaggtgcaagcgagggctctgaggactgccagcat

SEQ ID NO: 14613 - DNA, 383 bp, Homo sapiens
  SIMILAR (313)..(17): 411254mologous to Gallus gallus attachment region binding protein,accession number Y14166,Smith-Waterman Score=138.
tcagcttgcatggaggtgtggagggagaggcgcgagcgggaactgaggctgcgcagggcccttgagggctagctggacttccgggtgggcgtgggcttggcggccccgcactcggagcagccagctggcccgggccttagctgccttcccgcggggcagggctcgggacctgcagcccgccatgcctgagcctcccaccccctccgtgggctccggagcggccggagcctccccgatgagcgccaccgcctgctccacagcgcccagtcccatcgaccacccaagggctgaggagtgcgggcgcagggcgcgggactgacaggcagctccacctgtagccccagtgcgggatccactgggtgaagccagctgggctcctgagt

SEQ ID NO: 14614 - DNA, 1098 bp, Homo sapiens
  SIMILAR (634)..(1017): 411254mologous to Fowlpox virus gag,accession number AF006065,Smith-Waterman Score=274.
atggaagactcaggagcccagctggcttcacctagtggatcccgcaccggggctgcaggtggagctgcctgccagtcccgtgccgtgcgctcgcattgctcagcccttgggtggtcgatgggactgggtgccgtggagcagggggtggtgctcgtccgggaggctctggccgcacaggagctcatggagtgggtgggaggctcaggcatggcgggctgcaggtcccgagccctgccccgcgggaaggcagctaaggcccggccaacaccctttggtcacatgaataaaagtcaagccctttctttgctcattgctcagcctctgggtattaatctgctgagctggtggccacctaaatacaatcgtcctgttcccctcattggtctctccggtctcctgattccagccacattttgcctgggggagacccgtgactccaggcatgctatcaggacaacttcaacccgaggggagatcagctctcccgcaacctggtgccgctctctgacagcacaacagaacctaaggggctacaggatgattcaaggaacagtgtgctacaggacctcggtagcccaccagtggctagaaaacaatgcactggaaggcacccttaatgtcctggcatatgcacagggccagttcccagaagcagacccgcactgggacccaaacaaggaagcccaactacagcaactgcagaggtaccaagaggcactcctgcaagttttgagaaaaggagagaaaaaggcattcaatatgggaaacatttcagaggtgcttcagagagcagatgaaagctgtagccagttttatgagagactctatgaggccttccagctttgcagtccatttgaccctgaggctactgagaaccagtgcatggtaaacgcagtgtttgtagggcaaacccagggagacatcaggcgaaagctgcaaaagctagagtgtttcactggcatgaatgtcactcaggttttagaagtggccaccaaggtgtacactaactgtgaggaggagactcagggaaaaggccaatttgctggtggcagcacttatggaaaggggggcgaatgtcccaagacgaagtggatgtag

SEQ ID NO: 14615 - DNA, 780 bp, Homo sapiens; identical to SEQ ID NO: 11446
  SIMILAR (145)..(612): 261254mologous to Arabidopsis thaliana contains similarity to phytocyanin/early nodulin-like protein~gene_id:K19P17.3,accession number AB007644,Smith-Waterman Score=122.

SEQ ID NO: 14616 - DNA, 936 bp, Homo sapiens
  SIMILAR (86)..(418): 311254mologous to Caenorhabditis elegans RRM-type RNA binding protein,accession number U24189,Smith-Waterman Score=94.
atgtctactagggtagtgcaaagggaaaatgtaggattggagccccagattccccactggggcattcctagtggagccatgagaagagggccaccatcctccaggccccagagtggtagttccaccaacagcttgcactgtgcatttggaaaagccacagactcaggagcccagctggcttcacccagtggatcctgcacctgggctgcaggtggagctgcctgcaagtccggcgccctgcgcccgaactcctcagcccttgggtggtcgatgggattcggcgccgtggagcagggggtggcgctcctcggggaggctcgggcgcacaggagcccatggagagggtgggaggctcaggcatggcgggctgcaggtcccgagccctgccccgcgggaaggcagctaaggcccggggatacgtgtcttctggccagctctcttcctgcttctgctatcttgctgacgcacgctgctggcacaattggccttgtcccttggactgggcctgagaaaggaggagttattcatcccccaccagcttccaggcccccggaaagactttcagtccccccaacaacacatgggaattatgggaatacaattcaagatgagatttgggtggggacacagaaccaaaccatatcaggtacccagaatgccttcactgaaaatcagtacactccagctcgtcttcagacaatgattaaaaccaccgtgcaggaacaatggcaagcctttagcccgattgggagtggcaatgtgcgcctcactggatcaggagtgcagcagacaccctgctggatccggaggggtagaagtcagctgcgggtctgcgacggcagcaaacagcagtggtggacagcaagcgaaagctcagctcgagccctaacaaacacggaccagaaaagtgtgcagttccaagatttaatagagtga

SEQ ID NO: 14617 - DNA, 996 bp, Homo sapiens
  SIMILAR (774)..(866): 801254mologous to Homo sapiens Amino acid sequence of a human secreted protein,accession number Y10869,Smith-Waterman Score=128.
atggcagaaggtaaaggagaagcaggcaccttcttcacagggtggcagactggaccaccagaaaggcagattgtggttggaatatgttccatggcaaagaaatccaaatccaaaccaatgaaggaaattcttgaacggatctccttatttaaatatatcacagtagtagtatttgaagaggagggcagggctcgggacctgcagcctgctatgcctgagcctcccacccactccatgggctcctgtgcggcccgagcctccccaacgagcaccaccccctgctccacggcgcccagtcccatcgaccacccaagggctgaggagtgcgagcacacggcgcgtgactggcaggcagctccacctgcagccctggtgcgggatccactgggtgaagccagctgggctcctgagtctggtggggacgtggagaacctttatgtccagctcagggattgtaaatacaccaatcagcaccctgtgtctagctcagggtttgtgaatgcaccaatggacactctgtatctagctactctggtggggccttggagaacctttatgtctagttcagggattgtaaatacaccaattggcactctgtatctagctcaaggattgcagccactggactccagcaactcgaggaagaggcagccattgataccagacctagaattcactaaaggtcaatgccttcaggaattttcatctgatttgatgattgatgccctccccatcatgagccccaggaagtctcccatgccacgagcagagggtttaataggcaagagggaagggagaaaacagaaggaagaagctccccagtacagagacagagggtggggggctccaaagccacgaaaggaggtggcaagtgtggtggacaccagccagtggagctatatttacccgttttatcagatatcttttgatattgcaaggcagttgtttcaggtagaccagcttgcagacaggagagctgagagcaaaatgcagtga

SEQ ID NO: 14618 - DNA, 3342 bp, Homo sapiens; identical to SEQ ID NO: 3545
  SIMILAR (1786)..(2649): 571254mologous to Homo sapiens unnamed protein product,accession number AK001559,Smith-Waterman Score=754.

SEQ ID NO: 14619 - DNA, 901 bp, Homo sapiens; identical to SEQ ID NO: 11454
  SIMILAR (798)..(364): 681254mologous to Homo sapiens Deleted in Colorectal Carcinomas,accession number R13144,Smith-Waterman Score=455.

SEQ ID NO: 14620 - DNA, 1200 bp, Homo sapiens
  SIMILAR (571)..(855): 601254mologous to Homo sapiens CGI-26 protein,accession number AF132960,Smith-Waterman Score=269.
atgaagccgtgggccctcaaggtgagtgtcacagctcttaaggtggcgcgtctggagtttgttcctcctgatgttcggatgtgttcagagtttcttccttgtggagtgaagctgcagaccttcgcggtgagtgttacagctcttaaggcggcgcgtctggagttgttcgtttctcccggtgggctcgtggtctcgctggcttcaggagtgaagctgcagactttcccagtgagtgttacagctcataaaagcagtgtggacccaaggagtgagcagcagcaagatttattgcaaagagcgaaagaacaaaccttccacactgtggaaggggaccggagcgggtccccgccagactcaggagcccagctggcttcacccagtggatcccgcaccagggctgcaggtggagctgcctgccagtcccgcgccctgcgcccgcactcttcagcccttgggtggtctatgggactgggcgccgtggagcagggggcggtgctcatcagggaggctcgggccgcacatgagcccatggagcgggtgggaggctcaggcatggcgggctgcaggtcccgagccctgccccgcgagaaggcagctaaggcccggcgagaaaccgagggcagcgccgctgtatcaggctggctttctggaatagctcagtggccaaagattgatcacgaagggtttagagctgtgaaaatgccccaggctgcttggctcctgaaagctgttacctttatagatcttactacactttcaggtgatgatacatcttccaacattcaaaggctctgttataaagccaaatacccaatccgggaagatctcttaaaagctttaaatatgcatgataaagtggccgctggatttccagctggacagactcatttgaagacacgattagaagagatcagattggctgtggaagatggagctacagaaatcgacgtggtaattaacagaagcttggtgctgacaggccagtgggaagggcatactccccagttgtttattcagcattaccatgcaacatatgacacagcagactgttccttccttctggtaatgctttgttgttgtggctttggtgcctacattcctgaggtcttcctttctgtttctgattacccctgcgtctcatttgcaagctccttcacctcctctgtcatccctgaagtgtccatgtttctcagaatctga

SEQ ID NO: 14621 - DNA, 2302 bp, Homo sapiens
  SIMILAR (1214)..(2299): 941254mologous to Homo sapiens putative p150,accession number U93563,Smith-Waterman Score=1815.
cctgcgatcacaatcacgagggggtagatctggatttccattggtggttttcttttcggctgcaatttccttttcggcgctgtgctctgtttctcgctgggccttagctgccttcccgtggagcaaggttcgggacctgcagcccgccatgcctgagcctcccacccactccatgggctcctgtgcggccggagcctccctgacgagcaccgccccctgctccacggcgcccagtcccatcgaccacctaagggctaaggaatgcgagcgcacggcgcaggactggcaggcagctccacctgcagccctggtgcgggatccactaggtgaagccagctgggctcctgagtctggaactaacatttccattacacctggaaatgccacatttgtgacccgggtgcagggacaggcttggtttgcctcatgtatcactggtcatgatatgtctagtttaaaaacttccagtgtcgtggtattaaggagacaatctgaggcacttctaccagccaatttgacatgcaattggcaagattcttctgcccttgccaccttagaaagtgccctgtcccaggtcagacacaaaagattcacatttacacttatggtctttacaggctcagccatagtcattatggcaactgttagcattgctgttgtatctattactgaatcagtacaaacaactgcttttgtagataatctggccaaaaatatatgtgatgaacttctcctacaggacatggatgaagctggaaaccaacattctcagcaaaataacacaagaacagaaaaccaaacaccacatgttctcactcataagtgggagttgaacaatgagaacatacggatacagggaggggaacattacatactggggcctgttggtggcaggttgccaacatccaaactcgctgttgattgccagctcctgctccttgcagcagcccagcatgctctctgctggtgccaaaatacccttccaccaaaccccgctaacttctggaactgtcctagagggtttcctaccctagcaagtgagcttgcctatgtcagccctaaccttgctcttgtcattcagctgagccagaggaaaaaatttgagctattctggggtggtctacagagaaccatcttctttcccttcagtgttctcagaatattgactgttgatgaacaagccaatgatgtgagtgtggctgcagcaaggacccttcaaattttcagagatgacatgattgtatatctagaaaaccccattgtctcagcccaaaatctccttaagctgataagcaacttcagcaaaatctcaggatacaaaatcaatgtacaaaaatcacaagcattcttatacaccaacaacagacaaacagagagccaaatcatgagtgaactcccattcacaactgcttcaaagagaataaaatacctaggaatccaacttacaagggatgtgaaggacctcttcaaggagaactacaaatcactgctcaaggaaataaaagaggatacaaacaaatggaagaacattccatgctcatgggtaggaaaaatcaatatcgtgaaaatggccatactgcccaaggtaatttacagattcagtgccatccccatcaagctaccaatgactttcttcacagaattggaaaaaactactttaaagttcatatggaaccaaaaaagagcccacactgccaagtcaatcctaagtcaaaagaacaaagctggaggcatcacactacctgacttcaaactatactacaaggctacagtaaccaaaacagcatggtactggtaccaaaacagagatatagatcaatggaacagaacagagccctcagaaataacgctgcttatctacaactatctgatctttgacaaacctgagaaaaacaagcaatggggaaaggattccctatttaataaatggtgctgggaaaactggctagccatatgtaggaagctgaaactggatcccttccttataccttatacaaaaatcaattcaagatggattaaagacttaaatgttagacctaaaaccataaaaaccctagaagaaaacctaggcattaccattcaggacataggcatgggcaaggacttcttgtctaaaacaccaaaagcaatggcaacaaaagacaaaattgacaaatgggatctgattaaactaaagagcttctgcacagccaaagaaactaccatcagagtgaacaggcaacctacaaaatgggaaaaaattttcgcaacctactcatgtgaaaaagggctaatatccagaatctacaatgaactcaaataa

SEQ ID NO: 14622 - DNA, 1165 bp, Homo sapiens
  SIMILAR (20)..(1057): 641254mologous to Homo sapiens CGI-26 protein,accession number AF132960,Smith-Waterman Score=930.
  misc_feature (1)...(1165): n = a,t,c or g
ggcccgctccaacatcagaatggtaacagctttcaggagcctaccagccggcagctccggagctgcacgcgccagtgtccgcgcacaatcggggcaccgagctcgaccttagctggatctccaaaatacaagtgaatcacccggcagttctgaaggcgtgcggaacaaatccaggctcgcagaactcgtgaaaaaggactggcaggctgcttggctcctgaaagctgttacctttatagatcttactacactttcaggtgatgatacatctttcaacatttaaaggctctgttataaagccgggtacccaatccgggaagatctcttaaaagctttaaatatgcatgataaaggcattacttacagccgccgtttgtgttttatcccgcccgggtgttgtgatgctgtaaaaggcacttcaaggcctgcaggcttgttaatatccctgtgggcatcagtngggccgctggattttccagctgggacagactcattttgaagacacgattagaagagattcagattggctgtggaagatgggagcctacagaaaatcgacgtgggtaattaacagaagcttgggtgcctgacaggcccagtgggaaagccctgtatgatgagattcgtcagtttccgcaaggcctgtggggaggcttcatcttaaaactatattagccgacaggagaacttggaactcttactaatgtctataaagccagtatgatagcaatgatggcaggatcagatttttattaagacctctactggaaaagaaacagtaaatgccaccttcccggtagctatagtaatgctgcgggccattagagatttcttctggaaaactggaaacaagatagggtttataccagcaggaggcatccgcagtgcaaaggattcccttgcttggctctctcttgtaaaggaggagcttggagatgagtggctgaagccagaactctttcgaataggtgccagtactctgctctcggacattgagaggcagatttaccatcatgtgactggaagatatgcagcttatcatgatcttccaatgtcttaaatcagtcaccagttccagaaaagttctttacgacaatgtttaaaaattatttttctacgtaattgctaaaattatttacattaaaaaattgggcagtaggtaaaa

SEQ ID NO: 14623 - DNA, 1451 bp, Homo sapiens
  SIMILAR (1)..(303): 671254mologous to Homo sapiens putative p150,accession number U93563,Smith-Waterman Score=325.
atggccatactgcccaaggtaatttacagattcaatgccatcaccatcaagctaccaatgactttcttcacagaattggaaaaaaacaactttaaatttcatatggaaccaaaaagagcccacatagccaagacaatcctaagccaaaagaacaaagctggaggcatcacactacctgacttcaaactatactacaaggctacagcaaccaaaacagcatgggacatggatgaaactggaaaccatcattctcagcaaagcaacacaagaagagaagaccaaacaccacatgttctcactcataagtgggagatgagcaatgagaacacatggacacagggaggggaacatcacatgccagggcctgttgggggtaatatacagcaaattcccagctgtgctggctatgagaagagactccttctgtttgggaaaagtggagggacaagcaaaagggactttgtcttgcactttaggtaccagtgtgtccggaattggtgggtttttgggtctcactgacttcaagaatgaagccgcggaccctcacggagtgaagctgcagaccttcacggtgagtgttacagttcttaaaggcagcgtgtccggagtttgttccttctggtgttccgatgtgttcggagtatcttccttctggtgggttcgtggtctcgctggcttcaggagtgaagctgcagacattcccagtgagtgttacagctcttaatgcactgcgtctggagttgttcgttcctcccggtgggctcatggtctcgctggcttcaggagtgaagctgcagatcttcacggtgagtgttacagctcataaaagcagtgtggacccaaagacccttgggtggtcgatgggactgggcgccgtggagcagggggcggcgctcgttcggggaggctcgggctgcacagaagcccatggagggggtgggaggctcaggcatggcgggctgcaggtcccggagccctgccccgcgggaaggcagctaaggccccggcgagaaatcgagcgcagcgccggtgggctggcactgctgggggacccagtacacccttcacagccgctggcccgggtgctaagtcccttattgcccggggccagcagggccagccagctgcttccgagtgcggggcccgccaagcccacgcccacccggaactccagctggcccgcaggcgccgcacgcagccccggttcccgctcgcgtttctccctccacacctccctgcaagctgagggagtgggctccggccttggccagcccagaaaggggctcccacagtgcagcggtgggctgaagggctcctcaggtgctgccaaagtgggagcccaggcagaggaggcaccgagagcgagcgagggcggtgcggacttccagcacgctgtcacctctcaatgggaccatctagtttcaggaaaacaagctcagggctcccactga

SEQ ID NO: 14624 - DNA, 589 bp, Homo sapiens
  SIMILAR (3)..(587): 981254mologous to Homo sapiens zinedin,accession number AF212940,Smith-Waterman Score=1009.
cagacaccatcctcgacatgcggtccaagcgcgtccgttccctgctgggccgctcgctggagctcaacggggcagtggagccgagtgaaggggcccccagggctccaccaggccctgcagggctcagtggtggggagtcgctgctggtgaaacagatcgaggagcagataaagaggaacgcggcaggcaaagatggcaaagagcgcttgggcggctcagtgctggggcagatccccttcctgcagaactgcgaggacgaagacagcgacgaggacgatgagctggacagcgtgcagcacaagaagcagcgtgtgaagctcccatccaaggctctggtgcccgaaatggaagacgaggatgaggaagacgactctgaggatgctatcaatgagtttgatttcctgggctcacgagaggatggggaaggggctccagaccctcggcggtgcactgtggatgggagcccccatgagctggaaagccgtcgggtcaaactccaaggcattctggctgacctgcgggatgtggatgggctgcccccaaaagtgactggcccgcctcctggcacaccccagccccggccacatga

SEQ ID NO: 14625 - DNA, 1599 bp, Homo sapiens
  SIMILAR (931)..(1227): 651254mologous to Homo sapiens zinedin,accession number AF212940,Smith-Waterman Score=288.
atgcggctcacccgctgccaggctgccctggcggccgccatcaccctcaaccttctggtcctcttctatgtctcgtggctgcagcaccagcctaggaattcccgggcccgggggccccgtcgtgcctctgctgccggcccccgtgtatccctgcccccgcatcccctaacgtgcgtctggcgctgctccaggccggccatggaccggccacccgcagcctcgcgcccggagactacggtggccaccgagtttgtggccttagtacttgatggggcgcgggctgaggcacatgccttgctggagcgcatggtggaggcgctccgcgcagtaagcgcacgtctggtggccgccccggttgccacggccaaccctgccaggtgcctggccctgaacgtcagcttgcgagagtggaccgcccgctatggcgcagcccccgccgcgccccgctgcgacgccctggacggagatgctgtggtgctcctgcgcgcccgcgacctcttcaacctctcggcgcccctggcccggccggtgggcaccagcctctttctgcagaccgcccttcgcggctgggcggtgcagctgctggacttgaccttcgccgcggcgcgccagcccccgctggccacggcccacgcgcgctggaaggctgagcgcgagggacgcgctcggcggtcggcgctgctccgcgcgctgggcatccgcatagtgagctgggaaggcgggcggctggagtggttcgcctgcaacaagaagaaccaacgctgcatgggaaccgggattgctgtatattttccttccccgtatcatagtttaagttcctttggcttctcctcagacgtcttcatcatggacactatcgggggcggggaggtgagcctgggggacttggcagatctcaccgtcaccaacgacaacgacctcagctgcgatctcccatccaaggctctggtgcccgaaatggaagacgaggatgaggaagacgactctgaggatgctatcaatgagtttgatttcctgggctcaggagaggatggggaaggggctccagaccctcggcggtgcactgtggatgggagcccccatgagctggggtctctctaccggacggatatgtttcctgagaggagggtagccaaggagagcaggaggcccaggtcatggccgccggcccctcaccccttccctggaaaatccccatggagacgcaggcagtcctggctcttcctgaagtggggccgccagccctccagggcgggcgtccagctctggctggcctcaaggagggaacaggatgaggacccagtcggggagaggcagagtggatcaggtacgtcagattatgtcaccccgctgctcgaaagtgatacgactttggtcgcggtacccgtcatagggaggaagggcagaaacctacaaaaagccttcatggggaaattatttgatcatctgcttggaacccagagctataccacctgtgctggagaccggccagccaaatcttcagtctcggtggggacaaggagacagcgccatctggtgcttgagggtgtggccaatgaatgtggaggggagtgtcctaaggttggcagcctcttttga

SEQ ID NO: 14626 - DNA, 980 bp, Homo sapiens
  SIMILAR (729)..(202): 821254mologous to Homo sapiens Human secreted protein encoded by gene 20,accession number Y76143,Smith-Waterman Score=710.
tcactgcgccttgaggagcctctcccctatgcccttgatgggtggcccgcaggggacgcggccgcactcggtcacctgtggtcctggagcagccgcgcccggcgggcggcactgaggcctctggaggcgctgagtgggccggaagccgcgggagccgcgggacccgcagagagtgcccgcctgtgttggggcagcagcgccaggcagctgctgtgtgtggttgagttccttctcgtacctgggctgagtataggaccagattcgtacctcactccctagggcagcctcgaagcagtcatataccacagagcccacagactgaccaaactgcacaagggcagcaggcacttgcacctccagcaggacgcagcgggcagtagggtaggcctggaaggagagcacgacttgggcctggagagaggcattcctaggctcctccacccctaagtcagctgctcctccaaacttttcctcatcttcaggctcttcccagtgcccatgcacggccaagtggacagccacacgcagacagaggtcacagtcggtctccttctggcacctcagcaccagctctgttctcaaggtggttaggccacaagccgggggcccgaagcaggcacgatgtccccaggcaggcagagtatgtcactgtcccagaggcggcaggagaggcccggagagcaagtgggtagcgtcctgaggccccacaagcctctccagagaaaggatccactgggcttcggcccagtgccaaggacagcaagaaccagggcacaggcatctttcttaggtgccaggtggcacccaggcctgaggccctgtgctgcccccccccaaggggggcagacactccagtcagcccgtgtctgtgggtggcaggggctggaatccctcttcagcctccagagggggcggagggggctgtgctgggtagtttgtgcactctctgtcctgggagtcctgactctcctcctacttcc

SEQ ID NO: 14627 - DNA, 893 bp, Homo sapiens
  SIMILAR (805)..(518): 341254mologous to Mus musculus collagen type XIV,accession number AJ131395,Smith-Waterman Score=97.
atatgttgtgcaatcattgggtcaactaattgccatgaaggcagagtcttcgtatgaacaagttgcagctgaggggcctttggaacattcaaagggggatgtgttgcagggaatgggataaacaggtcagacctccagcagagaggtaagggattgaaacatgcagttgggagcaggaggaaatgccttctcagagcacggcaatggcagtcattttctggagatgtcgggtgccatttcatctggcttcctggaggagctgcatttctcaatcaaaaccctggacctgagcaggaaggctggaagggagataagcagacatcctttttctttggactggagtctgggagaagagagtgccctggagagctgcctgctgttttgtagtcacatggagtatgagcatgccttcccagggaccctcacctggatggaaactccagagaaatactcactcagaacctgaagctgctttattaagtagtgagtattccgtcattggaagtattaagcccaagctaaatggtcaactgtcagggaaggatgctgcgcgggccggcgacacagcaaattccgagggcacacctggctgtgcagctgtcccgggacgaggatttcccagtcctccggtcgccagccccccggggcacggccttgaccccgggactgcggggccccgcgcggcacaggagctgggggcgccccctggggttaagcgcgctaggccagccctcgccctccccgctgccaaccccaaccccctggcaccgggtgtggaggcagctctgcctctgaaggtggtcccgatgagcaaatgctcagagaaggcccacgacttgttccaggtcactcaagagttatcagaatccacagctctggtccatgcttattag

SEQ ID NO: 14628 - DNA, 499 bp, Homo sapiens
  SIMILAR (193)..(498): 981254mologous to Homo sapiens Human G-protein coupled receptor GRIR-1,accession number Y28279,Smith-Waterman Score=511.
  misc_feature (1)...(499): n = a,t,c or g
agcgcgnnnnnnttttgaacgcttgcacgaattcggcacgaggcggcccaggagaagcagttcctgccggcgctgctgagtttcttcatctacaacccgcgcttctggccgcgggaaggagaggttgttcggaatcctataattgaaaaacagtaaagatggaaaaccagttattgaatatcaagaggaggagttgttgaagtctcaggggatccagaactgcagccagtccttgctgggctgttcctgtccatgtgcctggtcacggtgctggggaacctgctcatcatcctggccatcagccctgactcccacctccacacccccatgtacttcttcctctccaacctgtccttgcctgacatcggtttcacctccaccacggtccccaagatgattgtggacatccagtctcacagcagagtcatctcctatgcaggctgcctgactcagatgtctctctttgccatttttggaggcatggaagagagacatgctc

SEQ ID NO: 14629 - DNA, 436 bp, Homo sapiens
  SIMILAR (110)..(796): 701254mologous to Homo sapiens HHR23A protein,accession number D21235,Smith-Waterman Score=721.
  misc_feature (1)...(436): n = a,t,c or g
gatagtaaatcccaagtaaggtacctgccgtcagcagatttggctttcttcttgacacctaatacccacagtcctccaggtacctccgtcggcagatttgagctttctccttggacacctaatacccacagtcctccaggctccagtagattgcaaatgacctgcttactttctgttcccgggctgcgttctgacacctgtcggatagtaaatcccaagtaaggtaccnaccgtcggcagatttgagctttcttcttggacacctatacccacagtcctccagtgttttagacgcccagctgcacaacttgattgccttacaaatgacctgcttccaggatgcggaaattcctaatttcttctgtgacccttctcaactcccccatcttgcatgttgtgacaccttcaccaataacataatcatgtatttcaaaaa

SEQ ID NO: 14630 - DNA, 393 bp, Homo sapiens
  SIMILAR (119)..(66): 611254mologous to Homo sapiens hepatocellular carcinoma associated protein TD26,accession number AF271350,Smith-Waterman Score=61.
tcggcagatttgagctttcttcttggacacctaatacccacagtcctccaggctctggtagattgcaaatgacctgcttactttctgttcccgggctgcgttctgacacctgttggacagtaaatcccaagtaaggctgagcttcggcagatttgagctttcttcttggacacctatacccacagtcctccaggagggtcctaagttcggacacctgtcggagagtaaatcccaatgttttagacgcccagttgcacaacttgattgccttacaaatgacctgcttccaggatgcggaaattcctaatttcttctgtgacccttctcaactcccccatcttgcatgttgtgacaccttcaccaataacataatcatgtatttccctgcaaaaa

SEQ ID NO: 14631 - DNA, 490 bp, Homo sapiens
  SIMILAR (52)..(462): 811254mologous to Homo sapiens putative taste receptor HTR2,accession number AF073924,Smith-Waterman Score=584.
gatttgagctttcttcttggacactataacccacagtcctccaggagggtcctaagtgttttagacgcccagctgcacaacttgattgccttacaaatgacctgcttccaggatgcggaaattcctaatttcttctgtgacccttctcaactcccccatcttgcatgttgtgacaccttcaccaataacataatcatgtatttccctgctgtcatatttggttttcttcccatctctgggacccttttctcttactataaaattgtttcctccattctgagtgtttcatcatcacgtgggcagtataaggccttctccacctgtgggtctcacctgtcagttgtttgctgattttacggaacgggcattggaggatacttcagttcagatgtgtcatcttccccgagaaaggctgcagtggcctcagtgatgtacacggtgatcaccccatgctgaaccccttcatctacagcctgagaaacaggcatat

SEQ ID NO: 14632 - DNA, 358 bp, Homo sapiens
  SIMILAR (206)..(355): 901254mologous to Homo sapiens putative taste receptor HTR2,accession number AF073924,Smith-Waterman Score=257.
  misc_feature (1)...(358): n = a,t,c or g
aggtannctgcgtcggcagatttgagctttctccttggacacctaatacccacagtcctccaggctccagtagattgcaaatgacctgcttactttctgttcccgggctgcgttctgacacctgtcggatagtaaatcccaagtaaggtaccagccgtcggcagatttgagctttcttcttggacacctatacccacagtcctccagtgttttagacgcccagctgcacaacttgattgccttacaaatgacctgcttccaggatgcggaaattcctaatttcttctgtgacccttctcaactcccccatcttgcatgttgtgacaccttcaccaataacataatcatgtatttcaaa

SEQ ID NO: 14633 - DNA, 742 bp, Homo sapiens
  SIMILAR (90)..(365): 771254mologous to Homo sapiens Human G-protein coupled receptor GRIR-1,accession number Y28279,Smith-Waterman Score=358.
ggggttcagcatgggggtgaccaccgtgtacatcactgaggccactgcacgctttctcggggaagatgacacatctgaaccgaggtaccctcagtcttttagactctcagctgcacaacttgattgccttacaaatgacctgcttcaaggatgtggaaattcctaatttcttctgggaaccttctgtgacaccttcacacaggaacatcaacatgtatttccctgctgccgtatttggttttcttcccatctcggggacccttttctcttactgtaaaattgtttcctccattctgagggtttcatcatcaggtgggaagtataaaccttcaccacctgtgggtctcacctgtcagttgtttgctgattttacggaacaggctttggagggtacctcagttcagatgtgtcatcttccccgagaaaggctgcagtggcctcagtgatgtacacggtgatcacctccatgctgaaccccttcatctacagcctgagaaacagggatattaaaggtgtcctgcggcagccgcacggcagcaccgtccaatttcagtatcttcttatctgttccattccttttgtagtgtgggttaaaaaaggcagcaaggtcaaataagaatgatatcacagggtgaacacacaatgtgatattaggagtaatacctccctaggatatagaatatactgtcacagagtatacacagatggggtacacccactgtgatatagaagcaatatctcc

SEQ ID NO: 14634 - DNA, 1263 bp, Homo sapiens
  SIMILAR (70)..(192): 901254mologous to Homo sapiens calbindin D28K,accession number S46006,Smith-Waterman Score=204.
gaattataagacaattgagtttgtcacaactgcaaaatattgctgagtgtggattgctctgaaatctgaaaacattacttgtgaattgcttatatccaaaatgcagacacagtgctgggtgttggtgtgcttgtttctgatttttcaaccctcttttctaggccaaaggtgtccaaactatacagacccacagaatctaacaacagatgtctcaatattcctcgtcctagaactctcagaggatccagaactacagccggtcctcgctgggctgttcctgtccatagtgactggtcatggtgatggggaacctgctcatcatctctggccgtcagccctgactcccacctccacacccacatgtacttcttcctcatccaacctgtccttgcctgacatcggtttcacctccagcatggtccccaagatgattgtggacatgcggtcgcatagcggagtcatctcttatgcggactgcctgactcagatgtctctttttgccatttttggaggcatggaagaaagacatgctcctgagtgtgatggccctatgaccggtttgtagccatctgtcgccctctgcactacccagtcatcgtgaatcctcacctctgtgtcttcttagtttcggtgtccttttccttagcctgcattggcgtgtacctgacttcagctgtggcaccacccctcaggaatggtgtggtggcgtcagtgacgtatgctgtggtcacccccatgctgaaccctttcatctacagcctgagaaacagggacattcaaagcgccctgtggaggctgcgcagcagaacagtcaaatctcatgatctgttccatcctttttcttgtgtggtaagtactgagtattgtgagaggaacaagcaaaaggtgtccaatctctacagacccacagaatctaacagatgtctctatattcctcctccgagaacctcagaggatccagaatggcagctggtccttgctgggttgttcctgtccatgtgcctggtaacggtgctggggaacctgctcatcatcctggccgtcagccctgactcccacctccacacccccatgtacttcttcctctccaacctgtccttgcctgacatcggtttcacctccaccacggtagccaagatgattgtggacatccaatctcacagcagagtcatctcctatgcaggctgcctgactcagatgtctccctttgccatttttggaggcatggaagagagacacgctcctgagtgtgatggcctctga

SEQ ID NO: 14635 - DNA, 1791 bp, Homo sapiens
  SIMILAR (127)..(11): 461254mologous to Human papillomavirus type 16 E5 protein,accession number AJ244866,Smith-Waterman Score=58.
ttttttttgtatttttagtagagacagtgcccccccatattggtcaggccggtcccgaactcccgacctcaggtgatccacccacttcggccccccaaagtgctgggattacaggcgtgagccaccgcgtttggccaaactttctgatgaaaactctaagtccccctaagctaaggacaggagttatagcttacatgaattttaaaacaagacccaccgatttgagtaagcaattactctcttgaaggagaaaagtcagaaaacataatgatgaaatcactaggacctaactcgcatgtggaactattttctgcttatgaactatcaactttaagttcatttccagatggcatggtctcagctgttatacagtgtttataaatgttctaaatcaagggaatttgtatcaatctcgtagaataaataaaatatttgagttcttaatttcctttaattaggataacctttttcggaaagtgaagagaatggttttattacatagttttcttcggaaaagataggctgtattttctagcagttacgaatttgttatgtatgatgatctggttcttggaacattcttgaatctagtgtctctaaggcaggtgtgtacagcaagaagtgaataacacagaaatcaatgatgaaagcattagaagacaattgagtctgtcagaactgcaaaatattgctgagtgtggattgctctgaaatctgaaaacattacttgtgaattgcttctattcaaaatgcagacacaatgccaggtgttggtttacttgtttcccatttttcaaccctcgtttctaggcaaaaggtgcccaatctctacagacccacagaatctaacagatgtctctatattcctcctcctagaagtctcaggggatccagaactgcagccaagtccttgctgggctgttccctgtccatgtgcctgggtcacggtgctggggaacctgctcatcatcctggccatcagccctgactcccacctccacacccccatgtacttcttcctctccaacctgtcccttgcctgacatcggtttcacctccaccacggtccccaaagatgattgtggacatcccagtctcacagcagagtcatctcctatgcaggctgcctgactcagatgtctctctttgccatttttggaggcatggaagagagacatgctcctgagtgtgatggcctatgactggtttgtagccatctgtcacccgctatatcattcagccatcatgaacctgtgttctgtgggcttcctagttctgctgtcttttttttttttttctcagtctttcagactcccagctgcacaacttgattgccttacaaatgacctgcttcaaggatgtggaaattcctaatttcttctgggaaccttctcaactctcccatcttgcatgttgtgacaccttcaccaataacataatcatgtatttccctactgccatatttggttttcttcccatctcggggacccttttctcttactataaaattgtttcctccattctgagggtttcatcatcaggtgggaagtataaagccttctccacctgtgggtctcacctgtcagttgtttgctgattttatggaagaggtgttggagggtacctcagttcagatgatgtgtcatcttcccccagaaagggtgcagtggcctcagtgatgtacacggtggtcacccccatgctgaaccccttcatctacagcctgagaaacagggatattaaaagtgtcttgcggcggccgacggagcactgtctaatctcaaaaaaaaa

SEQ ID NO: 14636 - DNA, 1974 bp, Homo sapiens
  SIMILAR (137)..(298): 901254mologous to Homo sapiens KIAA0187,accession number D80009,Smith-Waterman Score=254.
atgacccggaaggtcaccttgctgctgagaacttggaggggagggtgtggcaggctggccatggggatggaggccacccctcaggggagtctgcacccattgttccaggaacactggatccgagcagaggactttggtgtcctcagtcccatgcaccccaactcagtccagggtgtggacgacatgatccgcctgggggacctgaacgaggcaggcatggtgcacaacctcctgatccgctaccagcagcacaagatctatgtgagtctccccagccctgtgtccacaggggagcccctcacaggtgccaacctcctggacagggagaagaaaatgatgcacagggggcactgccctatcgccctcactgagggagtcagtggccctgataaccccgagggcagagccagagccaaggccaaggccaaggccagggccgagttacctctgccaggggcagagggcactgaccacctgcttccttcccagacatacacaggctccatcctggtggccgtcaacccgttccaggtgctgccgctctacaccctggagcaggtacagctctactacagccgccatatgggcgagctgcccccgcatgtctttgccatcgccaacaactgctacttcagcatgaagaggaacaagagggaccagtgctgcatcatcagcccccagaacagagtaggagctcagacagacactgtgctgaaagttttccagcacctgctcattagtttgatctgtaaaacaaccctgcaagcctgctgcatcccttcccacccctacctgtcctcagccccaggaccgcctcctctgaccactcaatgccggagctactctgacagcctgctcggcccacagctcttcggggacgtctgctacaactgcagccatgtgattgaaggcgatggtgaggccctgtgttccctcccccaccccacctgctctcctggggcctgggtgctgcagcttgtgtcgcccctcaacaaggcctggtgtgtgagctgcttctcctgctccacctgcaacagcaagctcaccctgaagaacaagtttgtggagttcgacatgaagcccgtgtgtaagaggtgctacgagaagttcccgctggagctgaagaagcggctgaagaagctgtcggagctgacctcccgcaaggcccagcccaaggccacagacctcaactctgctgaaggccctcttgcgcagctcggtgcagttggggcagaaccggcattacccatgaaccccacattccccaggtggagaatggcagccagcagcttgatgacgtcccagctctcggagtcggagaactggaggatcttcatggccgagcggatggaggcccagggcgggcagaggctgctgctctccacgatgcatgaggagtacgagtttgtgtcacccagcagtgtggccatcgctgagctggtggccctgttcctggagggcctgaaggagaggtccattttcgccatggccctgcaggacaggaaggccacagaagggggacctgttggtctcacaaagaagcaggggctgctggcctctgagaactggaccctcggccagaacgacaggacaggcaagacggggctggtgccatggcactgcctctacaccatccacacggtcactaagcactcggacagctgctgcacagctgtgcccactctgctggaggcctcttctgggtgcatcttcatgagttacaagaagcacattactttgaccccaaagtctgcagactcaaataaacggccctccaccttaggaagccagttcaaacagtctctggaccagctgatgaaaatcctgaccaactgccagccttacttcatccgctgcatcaaacctaatgagtacaagaagccgctgggtttctcagattctttcatgctcattaaactgatacgcattgacaaagtccagtatgatagtttcagctatatcttctggaactaa

SEQ ID NO: 14637 - DNA, 1456 bp, Homo sapiens
  SIMILAR (247)..(1563): 961254mologous to Homo sapiens unknown protein,accession number M22334,Smith-Waterman Score=2229.
atgaacatgaacatcaaaaaaattgtaaaacaagccacagttctgacttttacgactgcacttctggcaggaggagcgactcaagccttcgcgaaagaaaataaccaaaaagcatacaaagaaacgtacggcgtctctcatattacacgccatgatatgctgcagatccctaaacagcagcaaaacgaaaaataccaagtgcctcaattcgatcaatcaacgattaaaaatattgagtctgcaaaaggacttgatgtgtgggacagctggccgctgcaaaacgctgacggaacagtagctgaatacaacggctatcacgttgtgtttgctcttgcgggaagccgaaagacgctgatgacacatcaatctacatgtccaaagcaccgtgccagcagagtgggccccagtaacagcttacagaataaacaaacagtaaagaaaggagaccaaacttcggtgaggaggaagaggaacgatctcaaggtggaggaaaggcacaaaaaccaccatctcgctcgagagctgacgtcatcagctgctgctgcatctcccactgggcatgcggctgccacggcccaggctccccagcgccatgtggaagtaggtcgtgccgctgctccagctggagatcttggtgaagggatagttggtgagcaggtcctgggggcagagaggttggttgggccggacgcctccagagcacgggctctgtgtgtgttaggggacaggagagaggcaggacacaccgcagagatgactgcagccccacctgcacaggtccctggacctggtggccccacagccctccggaggcccagcagctaccttggtcttggggtggatgagcagaaccccatgtcggttgatggcgatgaggatgacgtccgggtgcagcaccaggagctccgggactgtctgatcaagcacaccatcctcatccgaggggaatttgtcaccaggtccctgaacattgcccaggctgctgaccggagggacgcctttgtcaagggcatctatggggcactcttcctgtggattgtcaagaagatcaatgccgccatcttcacaccaccagcccaggaccccaaaaatgtgcggagggccatcggctcctggacatatttggctttgaaaatttcgagaacaataggatcatcaggacactctgctggaggtacagagaagccaggtgctagacagagcggcgctcagcatccagaaagtccttcggggctacagatacaggattcccaagtgccaactgcatgctgtggacccagagaaaggtaatgatgaccacttgttggaaaacttgagggtaatacttgtaaaggtcatagtaagacccaacaacttgggcccaacacctgcctttggaaatgccaagacaatccgcaacgacaactcaagccgctttgggaagtacattgacatctactttaacccagcggggtga

SEQ ID NO: 14638 - DNA, 1032 bp, Homo sapiens
  SIMILAR (169)..(987): 521254mologous to Danio rerio myosin VIIA,accession number AJ404001,Smith-Waterman Score=762.
atgaccccactccacattctggtgactcctcctgagcgtcaggacaacactcaacccacgaggaattatttctgtctcaaagatgcaggaatcagctcaacgcctcaaaactccatcaccacggtcaatgcccttgaagccatcgacagtgatcaccccaataacagaagggatgagatttactgccagatctgcaagcagctctcggagaacttcaaaacaagcagcctggcccggggctggatcctgctcagcctctgcctcggctgcttcccaccctcagagaggttcatgaagtatctactgaacttcatcggccaagggccggcgacctacggccccttctgtgccgagcgcctgagacgcacctatgccaatggggtgcgtgcggagccccccacctggctggagctgcaggctgtcaagtccaagaagcacatccccatccaagtcatcttggccactggagagagcctaaccgtccccgtggactcagcctccacatctcgggaaatgtgcatgcacatcgctcacaagcagggcctcagcgaccacctgggcttctccctccaggtcgccgtgtacgacaagttctggtccctgggcagcgggcgcgaccacatgatggatgccatcgcccggtatggcccaggagaggggcgagacgagcgccagtcaccctggcgcatctacttccggaaggaattcttcaccccctggcacgactcccgggaggaccctgtcagcaccgagcttatttaccgccaagtcctccgaggagtctggtctggcgagtacagcttcgagaaggaggaagagctggttgagctgctggcccggcactgctacgtgcagctcggcgcctcagcagagagcaaggctgtccaggagctgctgcccagctgcatcccccacaagctgtacaggaccaagcccccagacaggtgggcgagcctcgtcactgccgcctgcgccaaggatggggtcaaactctgtggcaaagacacagctgctggtttcatggctgtgtga

SEQ ID NO: 14639 - DNA, 5094 bp, Homo sapiens
  SIMILAR (187)..(2682): 981254mologous to Homo sapiens putative p150,accession number U93572,Smith-Waterman Score=4352.
atgagtactacaagcattttccagcaactcaacttgctattgagtcacagccacaaacaaaagcagcagatacagctgcccaatggccgcagcagatacagctgcttgatggctgcttttaggatgcaatattttctgtctctccccatgaaatcactgatcctcgtgggctttgagcgcctgcaggctattgcccggagccagccgctggcgaggcagtaccaggccatgcggcagaggacagtccagctgcaggccctgtgcaggggatacctggtgcgccagcaagtccaggccaagaggagggcagtggtggtcattcaggcccatggccagggcatggctgcccggcgcaacttccagcaaaggaaggccaatgcgccgctggtcatcccggccgaggggcagaaaagccaaggcgctctccctgccaagaagcgcagatccatctacgacaccgtcactgacacggagatggtggagaaggtgttcggcttcctccctgccatgattgggggccaggagggccaggcctcgccgcactttgaggatctggaatcgaagacccagaagctgcttgaggttgacctggacacagtccccatggcggaggagcctgaggaggatgtggatggcctggccgagtacaccttccccaagtttgctgtgacttacttccagaaatcagccagccacacacacatccggcggcccctccgatacccgttgctttaccacgaagatgacactgactgcttggccgccctggtcatatggaacgtcatcctgaggttcatgggtgatctcccagagccagtgctgtatgccaggagcagccagcagggcagctcagtgatgcggcagatccatgacacgctgggcagggagcacggtgcccaggttccacagcacagtagatctgcacaggcaagtggggggcagcagcgggcagaggagggcgacacctaccagagatctggctgcaaggacaaggggaccaaggatatctcctccatgaagctgaagcggtcctcccggatcacaggccaggtggccagccagctgaacattggagaggaggcattggagcctgatggccttggtgcagaccggcccatgtccaacctggagaaggtgcacttcatcgtgggctacgccatcctgcggcccagcctcagctgtgggaatgacatcttctcaggcagtcttgagaatcaaaagaacaaagaattagcaatgcccgaaaccgaatcacttgatagaagatatcaaggctctaagccctcttctaaagagaagcccaaatcccccttgatcaagtgccagcccaagcctgcccaatttgttgccagggatgagatttactgccagatctgcaagcagctctcggagaacttcaaaacaagcagcctggcccggggctggatcctgctcagcctctgcctcggctgcttcccaccctcagagaggttcatgaagtatctactgaacttcatcggccaagggccggcgacctacggccccttctgtgccgagcgcctgagacgcacctatgccaatggggtgcgtgcggagccccccacctggctggagctgcaggctgtcaagtccaagaagcacatccccatccaagtcatcttggccactggagagagcctaaccgtccccgtggactcagcctccacatctcgggaaatgtgcatgcacatcgctcacaagcagggcctcagcgaccacctgggcttctccctccaggtcgccgtgtacgacaagttctggtccctgggcagcgggcgcgaccacatgatggatgccatcgcccggtgtgagcagatggcccaggagaggggcgagagccagcgccagtcaccctggcgcatctacttccggaaggaattcttcaccccctggcacgactcccgggaggaccctgtcagcaccgagcttatttaccgccaagtcctccgaggagtctggtctggcgagtacagcttcgagaaggaggaagagctggttgagctgctggcccggcactgctacgtgcagctcggcgcctcagcagagagcaaggctgtccaggagctgctgcccagctgcatcccccacaagctgtacaggaccaagcccccagacaggtgggcgagcctcgtcactgccgcctgcgccaaggccccatacactcagaagcaagtcacaccactggccgtgcgagagcaggtggtggacgccgcccgcctgcagtggccgctgctcttctcccggctcttcgaagtcatcacactctcaggcccccgcctgcccaagacgcagctgatcttggctgttaactggaaggggctttgcttcctggaccagcaggagaagatgctgctggaactctctttcccagaggtcatgggtctggccaccaacagggaggcccagggcgggcagaggctgctgctctccacgatgcatgaggagtacgagtttgtgtcacccagcagtgtggccatcgctgagctggtggccctgttcctggagggcctgaaggagaggtccattttcgccatggccctgcaggacaggaaggccacagatgacaccaccctcctggccttcaagaagggggacctgttggtcctcacaaagaagcaggggctgctggcctctgagaactggaccctcggccagaacgacaggacaggcaagacggggctggtgcccatggcctgcctctacaccatccccacggtcactaagccctcggcacagctgctggtaactggcacgctcccctgtcctcagcctgggtacccgaggcttgtggaactgctgactcaggatgtcggggttcaggctgacaaagccaaacatttcacaaaggaatatgccacgggatgcatcaacgccaaatgtccctctgggaatgcgactaactgcaagcagagtttagaaaaacacctcttggggccctattactcacaattacaattgcaggcctgctctgtcttcagagatttacctccgaacacagaactgtgctggttccttttggattacttctcttcagatgggggtgaccacgtgtggctggagcctccctccacccacaagaccggcgtggccatcgggggcatcatcaaagaggcaaagccaggcaaagtcttggttgaagatgacgagggcaaggaacactggatccgagcagaggactttggtgtcctcagtcccatgcaccccaactcagtccagggtgtggacgacatgatccgcctgggggacctgaacgaggcaggcatggtgcacaacctcctgatccgctaccagcagcacaagatctatacatacacaggctccatcctggtggccgtcaacccgttccaggtgctgccgctctacaccctggagcaggtacagctctactacagccgccatatgggcgagctgcccccgcatgtctttgccatcgccaacaactgctacttcagcatgaagaggaacaagagggaccagtgctgcatcatcagcgggcgcttggcttccgtcactgtctggtgcagccgtgcccattcttcaattcgaggcttggccacctcctctgagaagccctcttacatgatcccactcaaattacattttctcctctctgctcccatcatggcatcgcccgcttaccttcagcctttggaaatgccaagacaatccgcaacgacaactcaagccgctttgggaagtacattgacatctactttaacccccagcggggtgatcgagggcgcgcgcatcgagcaatttctcctggagaagtcccgggtctgccggcaggctcccgaggagcggaactaccatatcttctactgcatgctcatgggggtgagtgctgaggacaagcagctgctgagcctgggcacgccctccgagtaccactacctgaccatggggaactgcacttcctgtgaggggctcaacgacgccaaggactacgcccacatccgctcggccatgaagatcctccagttctccgactccgagagctgggacgtcatcaagctgctggctgccattctccacctggggaatgtggggttcatggcttcggtcttcgagaacctggacgcctcagacgtgatggagacgcccgcctttcccaccgtgatgaagttactggaggtgcagcaccaggagctccgggactgtctgatcaagcacaccatcctcatccgaggggaatttgtcaccaggtccctgaacattgcccaggctgctgaccggagggacgcctttgtcaagggcatctatgggcacctcttcctgtggattgtcaagaagatcaatgccgccatcttcacaccaccagcccaggaccccaaaaatgtgcggagggccatcggcctcctggacatatttggctttgaaaatttcgagaacaatagcttcgagcagctctgcatcaacttcgccaacgagcacctgcagcagttctttgtgcagcacgtgttcaccatggagcaagaggagtaccgctcggagaacatctcctgggactatatccactacaccgacaatcggcccaccctggacctgctggccctcaagcccatgagcatcatctccctcctggacgaagaaagccgcttcccgcaggggacagatctcaccatgctgcaaaagctgaacagcgtccatgccaacaacaaggccttcctacagcccaagaacatccacgatgccagatttggcattgcccattttgccggcgaggtgtactaccaagcagaaggcttcctggagaagaaccgagacgtgctgagcacagatatcctcaccctggtttactcctccaaaaacaagtttctgagggagatattcaacttggagttagcagagaccaagctgggccatgggaccatccgccagacaaaggcaggaaaccatctcttcaagaaaggtaatgatgaccacttgttggaaaacttgagggtaatacttgtaaaggtcatagtaagacccaacaacttgggcccaacacctgtagaggccagcttggaattgctgctcatgactacattgattgacttccaggagagccttcgaaacaccagtgctcactga

SEQ ID NO: 14640 - DNA, 370 bp, Homo sapiens
  SIMILAR (1)..(177): 1001254mologous to Homo sapiens Human secreted protein, SEQ ID NO: 6560,accession number G02479,Smith-Waterman Score=308.
ctggcccactccccactgggctccgtcactctgctggacttccgccctcggcagtttgtgctggtggatggggagctcaaagtgacggacctggatgacgcacgtgtggaggagacgccgtgtgcaggcagcaccgactgcatactcgagtttccggccaggaacttcaccctgccctgctcagcccagggctggtgcgagggcatgaacgagaagcggaacctctataatgcctacaggtttttcttcacatacctcctgcctcacagtgccccgccttcactgcgtcctctgctggacagcatcgtcaacgccacaggaagactaccgctgctggccatcctaccaccacgggagctgcctcctttcg

SEQ ID NO: 14641 - DNA, 455 bp, Homo sapiens
  SIMILAR (182)..(1861): 861254mologous to Homo sapiens putative p150,accession number U93568,Smith-Waterman Score=2387.
gtatgcagtcggtgctgcctgcacacggcgtctcctccacacgtgcgtcatccaggtccgtgactttgagctccccatccaccagcacaaactgccgagggcggaagtccagcagagtgacggagcccagtggggagtgggccaggtggtggaggaggcggcccaggctcaggcagattcggaatcgatcctcccaggaagtttgcagcagctggatcattctctacaggggcgcccagctccgtgatggtggtcagggtctctgggatgccctcgctgtcctggtagcagtacccatagagctgcagcacgttggggtgccgcagccgctccagcagcaccatctccttaagcagcttgtgggccgccagccgatagcagcccctccgtaccccgaactcgcgacgcagctgcccatatcgtgccgctaaagtccatcgccttgcgcgccctcg

SEQ ID NO: 14642 - DNA, 1837 bp, Homo sapiens
  SIMILAR (694)..(816): 1001254mologous to Homo sapiens Human secreted protein, SEQ ID NO: 6560,accession number G02479,Smith-Waterman Score=216.
atgaggctggaccagtggccttgctcagattctacagaaccttctaagccatggtgctggcaggacggcctcagctgcacgtgctgggcagctgtccagagtgacaggcagaatgcagtgtacaagggtgtggaaacagacaacaggtggcagctcagcaccagttggcggctgcagaggggagtggcagattatctagcatttggtaacagggcgttgctaccagcaggtggaccacagccatgggcagttccagaggggtcttctgaaatgatgagggtgcagaaagggaagttggaggtcatcgtggggctcctacttactgatgaagaaatagaatcaactctcaaaatgaaaagcccactctatcagaacctaaacagccctccaacagtcatctggcaggagtcagatctgtatagtgcagagttctgcagatgccctcccctcatcacgctgcacaaatccaagcagtaccttcacgccaacaccgttacccccgcgtccccaccctcgtacctgcagcacgttggggtgccgcagccgctccagcagcaccatctccttaagcagcttgtgggccgccagccgatagcagcccctccgtaccccgaactcgcgcacgcagctgcccagatcgtggccgctaaagtccaccgccttgagcccaccgccacccgggcaggccacccgtttgtgctggtggatggtgagctcaaagtgacggacctggatgacgcacgtgtggaggagacgccgtgtgcaggcagcaccgactgcatactcgagtttccggccaggaacttcaccctgccctgctcagcccagggctggtgcgagggcatgaacgagaagcggaacctctataatgcctacaggtttttcttcacatacctcctgcctcacagtgccccgccttcactgcgtcctctgctggacagcatcgtcaacgccacaggagagctcgcctggggggtggacgagaccctggcccagctggagaaggtgctgcacctgtaccggagcgggcaggtatctgcagaactccacggcaagcagcagtaccgagtaccagtgtatcccagacagcaccatcccccaaggaagactaccgctgctggccatcctaccaccacgggagcttgcctcctttcagtgttcaacctggctgaggctgtgggatgtctgtgagagccatgcccagtgtcgggcctttgtggtcaccaaccagaccacctggacagatcaaaaggcagaattaccttttgaattattggagctgctggaaaatgacactgttggcaggtattatccccagcagcacagcagcagaccagctgacctggactatttcttaggcagtagtcagtgtcccagggatgaaaggactttgaaaggtcatgtgtcttgtgacccaactagcagcatcagcatcactggggagaaactcaagcagaagcttgagtctactccactcttgctgacaccaaatctgcatttttacaggattcttggacatctcccttccaactcttggcgcttctgctatccagaaccacatcagcttcctgaacagaccaatgtccacctgcacctgggcctctgcatgtctctttcctctgaattctacctatccttcaaggctctgttcaagtacctgctccactgtggattctttccagatcatccccatgcccaactgaatgccattttccacttgtggagctttctgttggtgcctctggttttcagcaattactgcactgtactttgtaatgtagaattatgtcccctacaagaaggcaagctccttgcaggtcttcaaatgattcgatga

SEQ ID NO: 14643 - DNA, 1042 bp, Homo sapiens
  SIMILAR (161)..(748): 481254mologous to Homo sapiens putative b,b-carotene-9',10'- dioxygenase,accession number AJ290393,Smith-Waterman Score=355.
cgtgttcactgtttagtagtactcaaaactgccagtgtgagaggatttggaaatcactggatctgctcaatacaaaaatgttttttcgagtctttctccattttatcaggagtcattctgccactgcagtggatttccttcctgtgatggtgcaccggctcccagttttcaaaaggtacatgggaaatactcctcagaaaaaagccgtctttgggcaatgtcggggctctgccatgtgttgccaccgcttgcctgaccacagtggaaaaaagggctccacgggggcatcctctggctccagtcctgggggacatttgtcctaaagtgggctcaatgagctcctctacttccgaattggcacctggggaaatttcgagttttggggaaggaataagtacaatcattggttttgatggggatgggcgctgcttcaccagttcaaaatgggcaaaggggcccagggcctacaggaagcaagtttttacagaaaggatacttattaggcccaccatgccttaaaacccaattgggatctcagaatttgggaccactggctcttccgggaccctgcaagaatgtttttgaacgtttcatgtccaggtttgagctgcctggtaaagctgcagccatgactgacaatactaatgtcaactatgtgcggtacaagggtgattactacctctgcactgagaccaactttatgaataaagtggacattgaaactctggaaaaaacagaaaagatgtggaaaccaaggttcagaggaatatgcccacagttgcagggctgctcagtgacagaacaagggtttgaattcagtgatgacgctaaatcctgggctctacagcatcccaaaagacctgctcagcaggactgggccatgagcaggggaaaccaaggatgggctaatctaggactgaaaatcatcagaggagaggcagtgaccaccagggcaaaggaagtgagcgtggtgttgaaagtgcttgaagtgactgacggtaaagtctgggccagggagaagaaattaagagacagtagataa

SEQ ID NO: 14644 - DNA, 591 bp, Homo sapiens
  SIMILAR (211)..(495): 361254mologous to Homo sapiens salivary proline-rich protein precursor,accession number K03206,Smith-Waterman Score=104.
atgtaccctgagcacgacatcctgatgatggccaccccagagtccgccccccaaggaactgtgtctctggttgggacccccactcagctcttcctgtctggctgcagataccagggcctcaaggaaagctgcttccctgccctgctggaccggttcgcctcctcccaccagtgcaatgcctactgtgagctgctggggctgacacctctcaagggcccggaggcggcccacccccaagccaaagccaaaggctctaagagtccatctgctggcaggaaaggctcccagctgagtcctcagccccagaagaaaggcctccctagtcctcagggcacccggaagagtgctccaagttccaaggccacccctcaggcctcagagccagtcaccactcagttgttgggacagcctcccacccaagaggagggctccaaggcccagggcatgcggtagcctccgcagaggctgggggcctccacccagcagcagaccaaccaggaagcagcttgaactggatggagactttccaaatatggaactaactggagaaggtgcacgaaggagacaccacttggggacctctctgagcag

SEQ ID NO: 14645 - DNA, 372 bp, Homo sapiens
  SIMILAR (83)..(364): 441254mologous to Homo sapiens reverse transcriptase,accession number L27428,Smith-Waterman Score=199.
  misc_feature (1)...(372): n = a,t,c or g
agatggagtctcactctgtcacccaggctggagtgcagtggcgcgatctcagctcactgcaacctctgcctcctgggcagtgtgttggcaaggttgtggagaaactggaatccttttgccctgttggtgggaatgtgaaaaggtgcagccactttggaaacagtatgggaggctgagttgtgaggatcacttgaactcaggagtttgtggttcctcaaaattaaacacagaattaccatatgatccagtagtgcccttctgggttcctacccaaaagaatcgaaagcaggggtcccaaagagatagttgtacacttatattcatagcagccttattcacaagagggcaaaggcaacccaagtgttnatcaac

SEQ ID NO: 14646 - DNA, 444 bp, Homo sapiens
  SIMILAR (34)..(207): 741254mologous to Homo sapiens Human secreted protein, SEQ ID NO: 7878,accession number G03797,Smith-Waterman Score=201.
ttttttttttttttttacaccacattctttttatttttttatttttatttttttgagatggagtctcactctgtcacccaggctggagtgcagtggtacaatctcagctcactgcaacctccacctccccggttcaggcgattctcctgtctcagcctcccgagtagctaggactacaggtgcccaccaccacacccggccaattttttatgtttttagtagagacagggtttcactttgttagccaagatggtctcgatctcttgacctcatgatccacccacctcggcctcccaaagtgctgggcatgttcttacttctaagtgggagctaaacattgagtacacatgggtcataaaaatgggaacagcagacactggggaacacaagaatggagagggatgggagtaagggttgaaaaaaccacttatcgggcactatgct

SEQ ID NO: 14647 - DNA, 536 bp, Homo sapiens
attttctgtctactttttctttttctttctttctttttttttgagatagagtctcactctgtcgcccaggctggagtgcagtggtgcgatctcagctcactgcaacctccgcctcctgggttcaagcaatttctcctgcctcagcctcctaagtagctgggattatagacgcaagccaccacgcccggctaatttttgtttttcttttttattttttgagacggagtttcgctcttgttgcccaggctggagtgcaatggcatgatctcggctcactgcaacctctgcctcccgggttcaagagattctcctgcctcagcctctcgagtagctgggattacaggcacataccaccaatgcctggctaattttttatttttagtagagacagggtttcaccatgttggccaggctagtctcgaacccctaacctcaggtgatctgccatccttggcctcccaaagtgctaggattacagctgagccactgcccctggctgacgctgcctctttgaagtgcttgtcttccctgctact

SEQ ID NO: 14648 - DNA, 1666 bp, Homo sapiens
  SIMILAR (976)..(1200): 771254mologous to Escherichia coli 5,10-methylene- tetrahydrofolate dehydrogenase/5,10-methenyl-tetrahydrofolate cyclohydrolase,accession number D10588,Smith-Waterman Score=300.
gagatggagtctctcactctgtcacccaggctggagcgcagtggtgcgatctcagctcactgcaacctccagcctgggcaacaagaatgaaactcagtcagcggaaggaaggtcagcaggggccggactcttggccgagctttcagcgtggctgttcctgactcgctcactgtgttaaaccgattgtctccataatagatgccatcgaagcccccggtcccctcctccggggcctcctgggtgaagatccagggcggattggtggcgtagagggaggtgctgggggtcgtggtgtgcttcttcccgaagagtttgctgaaggtgccctgcaccgtctgcttctttttcatgctgccgcagcccgcgcgggcgccagggaaggaccttccctccctcgccctgccctgccccggactgaactcagcacggtttccccaggggactctaccaggccatgtcccccgccgtcctccccgcccgcgcaccgggcaacaggtgctgcgggcgccgccgcttgccgggaaatgcgagctacctggccagtccgggaaaggaggcgggtgagtttccagcctctcaaggcgattcgtgaccaggtcagtatgggtacatcggggacagctctagtgtccaacacgagggacatggatggccaaagcgagcacgccacggcatcctatagcccctcaaatatgtggggcgtgaggcttcggggaacatcaggaagtgcctgtaagagaaaagtagccaaagctccctaccctgctttgggcatggagatgctaaacagagaacagcaaaaacacaacagagaccatgagaggctgcagaagagccatgtcaattcaacaaagaaactcaagaaggaaaattccactgagatccgggagacaggcactcatggcaccccaccacaagctggtgaattagatagccttattatccccattttgcagatgaggcccctgaagctcaaagaggctcagccacttgcccaaggtcgcctgacctactgtctgtgtcccagtttttgtgagggcttcatccctggatgttccggggaccctggctgtcccctacccctgctgcccccagagtcctgtatgttgcagcagcagcattctaaacacagccgaggtgtggacccagggcaggactcacagaaaccctctgtacccagtcatgggccaaagacaccgtcatgcaagggggtgaaggctccacactcgtcccggccccgggcgtggaagcaggacctcgagcagtctctggcagcagcctatgtgccggtcgttgtggactctaaggggcagaatccggacaagctcaggttcaatttctacacctcccagtactccaactccctgaaccccttctacactttgcagaagcctacctgtggctacctgtaccgccgggacactgaccacacccgcaagcgctttgatgtgcctcctgccaacttggtcttgtggcgctcctaggcctggagccaaacggaagcccccgacccttcaccctcacccctgtgacctcaggtccccagaggggagagggctgctcactgcaggaggagtgacctatattcgggctaagacagctgtgccatgcccacctattgacaatgataaagggaggtctctcttctcagcaaaaaaaaaaaaaa

SEQ ID NO: 14649 - DNA, 1164 bp, Homo sapiens
  SIMILAR (2005)..(2514): 991254mologous to Escherichia coli chromosome arginine transport ATPase,accession number U65074,Smith-Waterman Score=865.
atgtggccaggaactgagcaggacccttggtcccccggccgcaagctgctgaattccgccaacgcctgcgtgagttgcaagcagatgccacccccgttgagcctccagatgacaacacagccctggctgacacctgggttccagcccgtgtgccaaggcggctctcgggtgagaacctcccggcctgacatcaccagcactgttaccatccctgccgctggcacaggtgaggacatccctgctgctggcacaggtgaagacatcccagccactggcacagactcgcaccgcaggcctgaggttggattacaggcacagggatgtgtctctggatcatttcgcagccgcgcagctgtgggtgctactcctcgacatgcactgcctggtccacgcctcagccgccggggcgccccacagatgggggaccagcagccagtggaactccaggccagtggccttggaggtcacgctgaagcggccccagcgctgcccgaagctcacgcgttcaacaaagcacagaaccggagatgcagtgggagccgggagcaggaagcgcggaggcagcgccaggtgctgccgctgcccgaggccccgtgccaggtggggcccatagcagccgactcgctgggccctcccaaaacgcacaccacgcgcgaccaggaccgagaggcccgcacggccctgctaggccacaaacactccactgtctccaggttggacaggtttaaccaagtggttctcaacgggagggaatttgtcatcccctcccccaacagcttgacagtgcctggctgtaaccagctcaggctccgatgccagagtcttgacaaaccaggccccactgctcctggcatccccctggaagcctccttgtgcgacccccggcccctcgtctgggtggtgaccatcacctctcagaagccaacctcaccgcgccgactgcaccggagacgcccacgaggacagccggcctctgagaacgcagctgagccgtcacaggtcgccatcagcaaaggcaagagtccaggcaagtgggatcgcccccgcctctcctgggagccctgcaccagcctctcggaccctcccaaaatcaagcggacacggttgccacctactgaccaaaggcagctgcaccccggtcacggggcttccggccggatctaa

SEQ ID NO: 14650 - DNA, 542 bp, Homo sapiens
  SIMILAR (256)..(462): 851254mologous to Homo sapiens ERp28,accession number X94910,Smith-Waterman Score=316.
gagcctcctggggtgtccacgtgagcgcgcgtgagtccgcccccccagtcacgtgaccgctgactcggggcgttctccactatcgcttacctacctccctctgcaggaacccggcgatatggctgccgctgtgccccgcgccgcatttctctccccgctgcttccccttctcctgggcttcctgctcctctccgctccgcatggcggcagcggcctgcacaccaagggcgcccttcccctggatacggtcactttctacaagattatggtgacaagctgaacatggagctgagtgagaaatacaagctggacaaagagagctacccagtcttctacctcttccgggatggggactttgagaacccagtcccatacactggggcagttaaggttggagccatccagcgctggctgaaggggcaaggggtcttacctaggtatgcctggttgcctgcctgtatacgacgccctgcccggggagttcaatcagggcctctggtgtggaggcccgccaggccctcttgaagcaggggcaagataac

SEQ ID NO: 14651 - DNA, 1242 bp, Homo sapiens
  SIMILAR (359)..(895): 691254mologous to Homo sapiens ERp28,accession number X94910,Smith-Waterman Score=513.
gcgcgcgtgagtccgcccccccagtcacgtgaccgctgactcggggcgttctccactatcgcttacctacctccctctgcaggaacccggcgatatggctgccgctgtgccccgcgccgcatttctctccccgctgcttccccttctcctgggcttcctgctcctctccgctccgcatggcggcagcggctctgcacaccaagggcgcccttcccctggatacggtcactttctacaaggtcattcccaaaagcaagttcgtcttggtgaagttcgacacccagtacccctacggtgagaagcaggatgagttcaagcgtcttgctgaaaactcggcttccagccgatgatctcttgggtggcggaggtggggatctcagattatggtgacaagctgaacatgggagctgagttgagaaatacaagctgggacaaagagagctacccagtcttcttacctcttccgggaaggggacttttgaggaacccagttcccattacactgggggcagttaaaggttgggagccatccagcgctggctgaaagggggcaaaggggtctacctaggtgatggcctggagttggtctgcactgtataactgacgccctggtccggggagttcatcagggccctctggtgtgaaggcccgccaggccctcttgaagcaggggcaagataacctctcaagtgtgaaggagactcagaagaagtgggccgagcaatacctgaagatcatggggaagatcttagaccaaggggaggacttcccagcatcagagatgacacggatcgccaggctgattgagaagaacaagatgagtgacgggaagaaggaggagctccagaagagcttaaacatcctgactgccttccagaagaaagggggccgagaaagaggagctgtaaaaaggctgtctgtgattttccagggtttggtgggggtagggaggggagagttaacctgctggctgtgagtcccttgtggaatataagggggtagtgggaaaagtggtactaacccacgattctgagccctgagtatgcctggacattgatgctaacatgaccatgcttgggatgtctctagctggtctggggatagctggagcacttactcaggtggctggtgaaatgacacctcagaaggaatgagtgctatagagaggagagaggagtgtactgcccaggtctttgacagatgtaattctcattcaattaaagtttcagtgttttggttaaa

SEQ ID NO: 14652 - DNA, 227 bp, Homo sapiens; identical to SEQ ID NO: 4494
  SIMILAR (1447)..(1971): 971254mologous to Escherichia coli genF peptide,accession number M27058,Smith-Waterman Score=870.

SEQ ID NO: 14653 - DNA, 424 bp, Homo sapiens
  SIMILAR (1)..(306): 821254mologous to Mus musculus Pro-Pol-dUTPase polyprotein,accession number Y12713,Smith-Waterman Score=419.
atggtggtaagggccaaatggaagccattagagctgcttctacctaggaagatagtaaatcaaaaacaatatcacatccctggagggattgtggagattattgccaccatcaaggacttgaaagatgcaggggtggtgattcccaccacacccctgttcaactctcctagttggcctgtgcagaagacagataaatcttggagaatgacagtggattattgtaagcttaaccaagtgttgactccaaatgcagctgctgtaccagatgtggttccattgcttgagcaaattaacacatctcctgggtatatcaactcttcagctttgtgtcacaatcttgttcagagagatcttgatcacttttccactccacaagatatcacactggtccattacattgatgacattgcgctgattggatcca

SEQ ID NO: 14654 - DNA, 207 bp, Homo sapiens
  SIMILAR (367)..(918): 941254mologous to Escherichia coli No definition line found,accession number U00039,Smith-Waterman Score=885.
acagatggatcttggagaatgacagtgggttatcataagcttaaccaagtggtgactccaattgcagctgctgtaccagatgtggtttcattgcttgagcaaattaacacgactcctgccataaagtgggttgtgcacagcagcattccatcatcaaatggaagtggtgtatatgtgatcaggcttgagcaggtcctgaaggcacaa

SEQ ID NO: 14655 - DNA, 352 bp, Homo sapiens
  SIMILAR (110)..(352): 771254mologous to Mus musculus Pro-Pol-dUTPase polyprotein,accession number Y12713,Smith-Waterman Score=330.
ggcaactgtgcactggggaaagggatatgatcggacattttggggactactagacactggctctgagctgacattgactccaggggacccaaaacatcattgtggtcccccagttaaagtaggggtttatgaaaatcagaagacagatagatcttggagaatgacagtggattatcataagcttaacaaggtggtgactcctcttgcagctactgtaccagatgtggtttcattgcttgagcaaattaacacatctcctcgtacctggtgtgcagccattgacttggcaaatgcctttttctccattcctgtccacaaggcccaccagaagcaatttgccttcagctggcaa

SEQ ID NO: 14656 - DNA, 441 bp, Homo sapiens
  SIMILAR (1)..(213): 851254mologous to Mus musculus Pro-Pol-dUTPase polyprotein,accession number Y12713,Smith-Waterman Score=322.
aagacagatagatcttggagaatgacagtggattatcataagcttaacaaggtggtgactcctcttgcagctactgtaccagatgtggtttcattgcttgagcaaattaacacatctcctcgtacctggtgtgcagccattgacttggcaaatgcctttttctccattcctgtccacaaggcccaccagaagcaatttgccttcagctggcaagagaaggctctgcaacaggtccaggctgctgtgcaagctgctctgccacttgggccctatgacccagcagatccaatggtacttgaggtgtcactggcagatagggatgctgtttggagcctttggcaggcctccatagccataaagtgggtcatgcacagcagcattccatcatcaaatggaagtggtatatacgtgattgggctcgagcagatcctgaaggcacaa

SEQ ID NO: 14657 - DNA, 461 bp, Homo sapiens
  SIMILAR (778)..(1368): 941254mologous to Escherichia coli similar to phosphotransferase system enzyme II,accession number U00006,Smith- Waterman Score=927.
atgaccgtggattatcgtaagtttaaccaagtggtgactccaatggcagctctgtaccagatgcggtttcattgcttgagcaaattaacacatttcctggtacctggtatgcagccattgacttggcaaatgcctttttctccattcctgtccatgaggcccaccagaagcaatttgccttcactacctcaggggtatatcaactttccagctttgtgtcataatcttattcggagagaacttgatttctttttgcttctacaagatatcacactggtccattacattgatgacattctgctgattggatccagtgagcaagaagtagtaaacacactggacttattgattcataagagaagtaaggaagcagagcacactgctgcttccaggattagagtgtcatgcttaccagagcagaaaagtcatgaacagacactgccgtgggaacaagtgcccag

SEQ ID NO: 14658 - DNA, 928 bp, Homo sapiens
ctcctgatgactgacagattcacagcagaacagaaaggactgggaagggatggaggtgggacatctggcactgaccttcaggggctgaccctgtgggggaacatctgccctgaagagttggagccttcatgtgatgacacagagctgaagtgtgatattcgggaggggatagagagtgcttggaggttttctgattttgaagaatcccagtcagtcaggttctggcgtaaagtgactgctggggaggggtatatcaacaatccagctttgtgtcataatctgattcaaagaaaccttgatcactttccgcttctgcaagatatcacactggtccattaccttaatgacattgtgctgattggatccgccataaagtgggtcatgcacagcagcattccatcatcaaatggaagtggcatgtacatgatcgggctcaagcagatcccgaaggcacaagctgacctggctatggccacttctgagtgcccaatttgccagcagcagagaccaacactgagctctcaatatgacacctttccttggagtggtcagccagctacctggtggcaggttgattatattggacctcttccatcatgggaagggcagaggtttgtcctcactggaatagacacttactttagatatgggtttgcctatcctgcatgcaatgcttctgtgaagactaccatccatggactcacagaatgccttgtccaccatcatggtgttccacacagcattgcctctgaccaaggcactcactttatggctaaagaagtgtggcagggggctcatgctcatggaattcactggtcttaccatgttccccatcatcctgaagcagctgggttgacagaatggtggaatggccttttgaagtcacaattacaacaccaactaggtggcaatactttgcagggctggg

SEQ ID NO: 14659 - DNA, 1077 bp, Homo sapiens
  SIMILAR (1)..(357): 941254mologous to Homo sapiens p40,accession number U93566,Smith-Waterman Score=581.
  misc_feature (1)...(1077): n = a,t,c or g
atggggaaaaaacagaacagaaaaactggaaactctaaaaagcagagcgcctctcctcctccaaaggaacacacttcctcaccagcaacggaacaaagctggatggagaatgactttgatgagctgagagaagaaggcttcagacgatcaaattactctgagctatgggaggacattcaaaccaaaggcaaagaagttgaaaactttgaaaaaaatttagaagaatgtataactagaataaccaatacagagaagtgcttaaaggagctgatggagctganaaccaaggctcgagaactacgtgaagaatacagaagcctcaggagccgatgcgatcaactggaagaaagaaaatcccctggagggattgcagagattagtgccaccatcaaggacttgaaagatgcaggagtggtgattcccaccacatccctattcaactctcccatttggccagtgcagaagacagacagatcttggagaaagacagtggattattgtaagcttaaccaagtggtggctccaattgtcgctgctgtaccagatgtggtttcattgcttgagcaaattaacacatctcctggtacctggtatgcagccattgacttgacaaatgcctttttctccattcctgtccataaggcccatcagaagcaatttgccttcagctggcaaggccagcaatatacttttactgtcctacctcagaggaagaagtctgctgcaggggcagagccctcatggagaacctctactagagcaatgcagaggggaaatgtggggttggaacccccatacagagtccccactggggcatcgtctagtaaagctgtgagaagagggccaccatccttcagaccccagaatggtagatctactgacaggctgcaccattcacctggaaaagctgcaagcactcaaagccaatcggtgaaaataacttcaagggctgaactcttcagagccacagtggcagagctactaaaggctgtgggagcccgcccctggcatcagcatgatctggatgtgagacatggtgtcaacaaagattttgcagctttaagatttaatgactga

SEQ ID NO: 14660 - DNA, 1972 bp, Homo sapiens
  SIMILAR (624)..(1208): 801254mologous to Mus musculus Pro-Pol-dUTPase polyprotein,accession number Y12713,Smith-Waterman Score=822.
tccaagtcccaaaactgaagaaccctgactaatacagattttggtattgggagtggttctagaggaacagaatattaaggatggagttctttcattggtttggggtttctggagttggctgcttaatatgattagaacccaaaatgctaaggactctacttctaatagtatggagaacactgatagtccttggtgtgaactgtttagagagttatgcaaaataaatgcatttgacactcctgatttatcgctcatgagaggcaaggaatttagtgactctgtacataatacctttgaccatatgtggagaagcaaggaacataatgaagttggttgtttgctcctaagttcagtggacaaagtgatggaagaaaatgatgaactcagggattttaactcccatcttcagaaacagatactgaccctcaaatctgctaatatcaccttgagtgagagtcttatctcctgtagagaaagagctgaaattgtggaaaaacacacacaagctcttatcatatccaacagtgggagctgcagtcactcaactacaaaatttaactgcaatgggagtaattggatcccatggtgccaggggccaagtagtggcactcaaccgtcaaaggcaaggagacctccaaccttttaccagggtaactgtgcactggggaaagggatatgatcggacattttggggactactagacactggctctgagctgacattgactccaggggacccaaaacatcattgtggtcccccagttaaagtaggggcttatggaggtcaggtaattaatggagttttagctcaggtccaaattacagtgggtccccagactcatcctgtggttatttccccagtgccagaatgcataattggcatagacatacttagcagctggcagaacccccacattggctccctgactggtattatggtgggaaaggccaaatggaaacaattagagctgcctctacctagaaaaatagtaaatcaaaaaccatattgtatccctggagggactgtggagattagtgccaccatcaaggacttgaaagatgcaggggtggtgattttcaccacatccctgttcaactctcccatttggcctgtgcagaagacagatggatcttggagaatgacagtgggttatcgtaggcttaaccaagtggtgacgactccaactgcagctgctgcaccagatgtggggtttcattgcttgagcaaattaacacatctcctggtacctggtatgcagccattgacttggcaaatgcctttttctccattcctgtccataagccccaccagaagcaatttgccttcagctggcaaggccagcaatatgcgtttactgtcctgcctcaggggtatatcaacaatccagctttgtgtcataatctgattcaaagaaaccttgatcactttccgcttctgcaagatatcacactggtccattaccttaatgacattgtgctgattggatccgccataaagtgggtcatgcacagcagcattccatcatcaaatggaagtggcatgtacatgatcgggctcaagcagatcccgaaggcacaagctgacctggctatggccacttctgagtgcccaatttgccagcagcagagaccaacactgagctctcaatatgacaccattccttgggcgatcagccagctacctggtgacaggttgattattggacctcttccattatggaaagggcagaagtttgtcttcactggaatagacacttactccggatatgggtttgcctatcctgcatgcaatgcttctgccaagactaccatcatggagtcacagaataccttgtccacccttatggtattccacacagcattgcctctaaccaaggcactcacttcatggctaaagaagtgcagcagtgggctcatgctcatggaattcactggtcttaccatgttctccatcctgaagcagctggattga

SEQ ID NO: 14661 - DNA, 2592 bp, Homo sapiens
  SIMILAR (1267)..(2655): 951254mologous to Homo sapiens ORF2 contains a reverse transcriptase domain.; ORF2,accession number M80341,Smith-Waterman Score=2316.
atgggcccaccctacaagcctcctaccacctggcccccgcagacactctcctaccactccaccactccggtcaagctgcagtctctgtctctgccaccaactgcagcaaggggagccacagaaccatgccatctgcaggctccagcctccagcgtgcaacagatgactcctccagctcctggcttgaagcatctgggtggtaaaagccagatgtgcctagaacaggatggaaggagtggtagtgttagaggttcaccttgtcatgctggtcactgggtggcaggagctggtttcggcaaaggcacaactaggacctgggggcatgtaaacctgatagtgcccccaaactgccccactgcctccagcagtgcagccagggatagtgcccccaaccagcccttgctgggggtagtgacagcccagatagtgcccccaacctgcccccctgccatgacagtgcaggagctgatagcacccctaaccctccccccagctgctggatgcagaaggggcgtcaggccattccagactcgtgtgtggctgcttgcgcagctgctccgtgccaggcttggaggaccaggagaaggggtagtcacttgccacagctggaggctggagcgtgtggcaccacggctcgcctcgctgtggtgggcgctggcggcagagacggcagctcggctggactgggctgcgaagaggccttctgcctggggcagtatcaaggctgcagagttttcctccaaagccacacctcgactggaaggggcgagttcgaggactctgtgggtgagctacattcaggcaaaggagaccactacagggaagaatggtccagttgagccttcccacctctgggaggcttactgccgggctactgccccacatcctgctgtgcacagccccagtgctgaagtcacctatacatgtggtattgtgaatttgttgcttcaagggctggtgcccaagtcccacttggagactcatactggatgccatgtagtggttgaactcatcatatgcagtgtagtcttaccattgatcagcaggctgtcagatcctgactggatccaccttgtcctcatggttatcttttccaaggccagagatccaacaccctgcccagccagtggccctgaacagccctcagtgcccacgtctctgccacttattgctgaggtacagcagcttccagaagggagggctccttctccagtagcagccccagggttcctaagtaaacagattcaggatgccctgtgtgccctagagggttcccaggctctggaacccaaaggtggtgagggatctgaaggagtagaggctgagggtccagggacagaaacagagacagtcctgcctgtctccacactgaacttctgcccagagatacagattgacatagcagacaaggagatagaacaaggagaagttaccacctctgttacagctttgctggaggggctggaaaagacctgctcctcacggccctcatgcttagagaaggatctcaccaatgatgtgacctaccttgatcctaccatcttcagctttgaacccctaagcagtccagatggcccagttgtcatccagaaccttcatatcactggcaccattacagcccaagagctcagtggcaccggattgcaaccatgcacacgctatactgtgaagtgtgagacatcccttgatggtgaaaacagcagcctgcagcagctggcctaccacactgtgaatcaccgctattgggagttcttgaatctgcaggccatcaggagaagaaaccagatctatgaaagttcattaaaaataatagagaagatggtggtgagtgccattgtggacaacttgaagacagcatttccttgctctgaatcccagggcccaacagaggagctgagtgaggccgagactgaaagcaagtcccaaacagaaggcaagaaggctaggaagtccaggctgaggttctcatccagtaaaatttcgccagcattaagtgtgactgaagcacaagacacgattctttattgtctccaggaaggcaatgtggagtccaagaccctatccatgtctgggatggaatcttttattgaaaaacagacaaagttactggaggtgcagccaacagaagccccagaaaaagatcctgaacaacttcccaaaggacatgtggacagttgcttgtcagatgcagctgtgccagcccaagatcccagcaacagcgattcaggaacagagacagagttagctgacacagccctgaatctgcttctcttgctactaacagaacagtggaaatggctgtgtattgaaaacatgcagaagtttcttcgtcttatctttggtaccctagttcaaaggtggctagaggtgcaggtagctaatttaacaagtccacagtgctgggtgcagtacctctggcttcttcaggagtccatctggcctggtggagttttgcctaagtttccacggcctgtaaggacccaggagcagaaactggctgctgagaaacaggctttgcagagcctaatgggagtcttcccagatctcatagtagaaattcttggggtgaacaaatgccagctgaatgtttag

SEQ ID NO: 14662 - DNA, 3585 bp, Homo sapiens
  SIMILAR (2971)..(3324): 251254mologous to Homo sapiens MSTP043,accession number AF113223,Smith-Waterman Score=123.
cggccggccggcggtcatccttcacacaggcccggctgcggagcgcagtcgcccaggtttacggcggcagagggccgaggctcccggagaggaccgcgatgagtccacttcaggtcggggctgagtgtgggcgcgcggttcccggcggcgtgtgacccagtcttcgccggccgctgcccgctgcgtgtgtaagtgtccgtgggccccagggccttgcagcgcccgccccgaggccccgaagaggccttccgcctggggcagtgtgaaggccacagagttttcctccaaagccacacctcagctggaaggggcgagttggagggctctgttagtggtagccatggggagacgcggagctgcagctgtcgctttgcagtgcctgtaggactttgagggcctggagccccggttccctgaacagcacccagatcgccccatatctgagacacagttcatgccccccttccctaactctgaagtaaaatcttgagggctgtcatctggggaagccaccttgtccgttcagccatgaagacagaaacagtgccaccgttccaggaaactccagctggatcgagctgtcacctcaataacctgttgagtagccggaagctgatggctgtgggggtcttgcttggctggctcctggtcatacaccttctggtcaacgtgtggctgctgtgccttctgtcggcattgctagtggtgctgggaggatggctgggctccagcctcgctggagtggcttcaggtcgactgcatctggaacgcttcatcccgttggccacctgtcctccatgccctgaggcagaaaggcagctggaacgggagatcaaccgcaccatccagatgattattcgagattttgtgttatcttggtaccgttccgtgagccaggagccagcctttgaggaagaaatggaggcagccatgaaagggttggtccaggagcttcggagaaggatgagcgtgatggacagtcatgctgttgcccagagtgttctgactctctgcggttgtcacctgcagagctacattcaggcaaaggaggccactgcagggaagaatggtccagttgagccttcccacctctgggaggcttactgccgggcgactgccccacatcctgctgtgcacagccccagtgctgaagtcacctatacgcgtggcgttgtgaatttgttgcttcaagggctggtgcccaagccccacttggagactcgtaccggacgccatgtagtggtcgaactcatcacatgcaatgtaatcttaccactgatcagcaggctgtcagatcctgactggatccaccttgtactcgtgggtatcttttccaaggccagagatccagcaccctgcccagccagtgcccccgaacagccctcagtgcccacatctctgccactgattgctgaggtagagcagcttccagaagggagagcttctccagtagcagccccagtattcctaagttacagtgagccagagggttctgcaggcccctctccagaggttgaagaaggccacgaagctgtagagggagatttgggtgggatgtgtgaagaaagaaaagtaggaaacaactcatctcatttcctacagccaaatcttcgaggtcccctgttcttatgtgaagactcagagctggagtctccgctgtctgaactgggcaaagaaaccatcatgctcatgactccaggcagctttctctctgacaggattcaggatgccctgtgtgccctagagagttcccaggctctggaacccaaagatggtgaggcatctgaaggagcagaggctgaggagggtccagggacagaaacagagacaggcctgccggtctccacactgaattcctgcccagagatccatattgacacagcagacaaggagatagaacaaggagatgttaccgcctctgttacagctttgctggaggggccagaaaagacctgcccctcacggccgtcatgcttagagaaggatctcaccaatgatgtgagctcccttgatcctactctgccaccagttctgctttcctcctctccacctggtcctctcagctcagccaccttcagctttgagcccctaagcagtcccgatggtccagttatcatccagaaccttcgtatcactggcaccattacagcccgagagcacagtggcactggattccacccatacacactctatactgtgaagtacgagacagcccttgacggtgaaaacagcagcggcctgcagcagctggcctaccacactgtgaatcgtcgctatcgggagttcttgaatctgcagacccgtctggaggagaaaccagatctacgaaagttcatcaaaaatgtgaagggtcctaaaaagctctttccagatcttccatttggaaacatggacagtgacagagtagaagcccgtaagagcctcctagaatcattcctaaagcaactctgtgccattccagagatcgctaacagtgaggaggtgcaggagttccttgctctgaacacagatgctcgtattgcctttgtcaagaaaccatttatggtctctagaatagacaagatggtggtgagtgccattgtggacaccttgaagacagcgtttcctcgctctgaaccccagagccccacagaggagctgagtgaggccgagaccgaaagcaagccccagacagaaggcaagaaggctagcaagtccaggctgaggttctcatccagtaaaatttctccagcactaagtgtgactgaagcacaagacaagattctttattgtctccaggaaggcagtgtggagtctgagactctatccatgtctgcgatggaatcttttattgaaaaacagacaaagttactggaaatgcagccaacaaaagccccagaaaaagatcctgaacaacctcccaaaggacgtgtggacagttgcgtgtcagatgcagccgtgccagcccaagaccccagcaacagcgatccaggaacagagacagagttagctgacacagccctggatctgctcctcttgctactaacagaacagtggaaatggctatgtaccgaaaacatgcaaaagtttcttcgtcttatctttgggaccctagttcaaaggtggctagaggtgcaggtagctaatttaacaagtccacagcgctgggtgcagtacctccggcttcttcaggagtccatctggcctggtggagttttgcctaagtttccacggcccgtaaggacccaagagcagaaactggctgctgagaaacaggctttgcagagcctgatgggagtcctcccagatctcgtagtagaaattcttgggggtgaaccaaatgccgcctgagctggggtctagtcctggagtcactacaacaacccctcatcaacaggcatttgatttactgccttggggacatcatcctggaattcttggatctcagtgcctctgttgaggaagtctgctgctaccacctctgcctcagataccccaggcaactctaagaggatgggtgtctcctcttaagctggttattcacgccttcttcccaggtcagggaagtagagttactcggccaccagagaccagtcaggaagcccg

SEQ ID NO: 14663 - DNA, 504 bp, Homo sapiens
  SIMILAR (28)..(384): 261254mologous to Kaposi's sarcoma-associated herpesvirus Orf73,accession number AF192756,Smith-Waterman Score=124.
ctacgacagcggagcccctggggaagccaagatgccgtcgaagggaaaggacaaaaagaaaggcaagagcaaaggcaaagacacgaaattgaaaaactgaaacagcaattaaatgaaacaaaggaaaaagcccaagaggagaaggataaattggaacaaaagtataccaggcaaattaatgaactagagggacagttccatcaaaaagccaaagaaattggcatgattcacacagagctgaaagcagtaagacaattccagaagagaaaaatccaagtggagagagagttagatgatctgaaagagaatttaagaaacacagagcggatacatcaggagactcttagaagactggaaagcagattttttgaagaaaaggtacagattattagggttaatttaaaatgttttgtttactagaacataagtgtatttatatgcattctgaaacatcagccttccatttggtatcttaatagaagattagaagattgttaccaaatt

SEQ ID NO: 14664 - DNA, 584 bp, Homo sapiens
  SIMILAR (649)..(1503): 321254mologous to Homo sapiens T-complex protein 1 theta subunit,accession number AL163249,Smith-Waterman Score=373.
ggggggggaggggtcggggcggctgtcgcgtgacgggagagggggcaggaggggggggtagcggggcgtgtggaaatggacgtaagcgtcgtggagaggggggcgtatgcggaccagatatggggtcggccaaagggtggagagtcccggggtgagaagaggaaggggcggtgggtgcaaagagtgcgggcgctgcgcgcgagggtgacacccgctgggctaggagagtgtaaatggggccgcggccggggagattaggtgcgtcgcgtgaagccgcgtgcgttgcgggaacggtggggagatggcagtaccgtcagcgactctacgcccatgaaaccgggtttagaataacaggcttgtcatattactttcaattagcccattcaagatgcccacaagaaccatcgtgttgggctcatgtttattacttaagcaagagagctcttacccaaattcctttgtttccccactgtcagaaacaacatagtctggaactggaggcctagaactctggttgtatttcctgtagtgggtaaaagtcaacaaagataatgaatgaggcagtgtctcctcatgccttcata

SEQ ID NO: 14665 - DNA, 1604 bp, Homo sapiens
  SIMILAR (221)..(511): 521254mologous to Bos taurus LP2,accession number U55188,Smith-Waterman Score=151.
atggcctctaagaggtgtattcgggatttcaggagtcggggaggcaagttgaagagcttccaactttatgcaactttcaggaaagaaggctgcggaccggtattagcaaatggaaatccggggggcggtcgtgggcaggaagtatcggccacacaggacctacggcgcgggtggggcattgccagctcggcgtcccggttcccttggagacagagctggccagggcggccgcggctgggcaactacgacagcggagcccctggggaagccaagatgccgtcgaagggaaaggacaaaaagaaaggcaagagcaaaggcaaagacacgaagaagttaataaaaacagatgaatctgtggtggacagagccaaggccaatgcctccctttgggaggccaggttggaagtcacagaactctctaggattaagtatcgtgatacttcacggatactggcaaaaagtaatgaggacttaaagaaaaagcaatgtaaaatggagaaagacataatgtcagtattaagttacctgaagaagcaggatcaggagaaagataatatgattgaaaaactgaaacagcaattaaatgaaacaaaggaaaaagcccaagaggagaaggataaattggaacaaaagtataccaggcaaattaatgaactagagggacagttccatcaaaaagccaaagaaattggcatgattcacacagagctgaaagcagtaagacaattccagaagagaaaaatccaagtggagagagagttagatgatgagatcaatgatctgttggttaaggaaaagattatgcaacttgtccagcagagatcacaaatccaaacccttcagaagaaggtagtaaacttggagactgctctgagttacatgaccaaagagtttgagagtgaagttttaaaactgcagcaacacgcaatgatagagaaccaagcaggtcaggtagaaattgacaagctgcagcaccttcttcagatgaaggacagggaaatgaatcgtgtgaagaagctggccaagaacatactggatgagagaacagaagtggaaagattctttttagatgctctgcaccaagtgaagcaacagatcctaattagcaggaagcattataagcagatagcacaagctgctttcaatttaaaaatgagagcagcatgtacaggaagaacagaatatcccaaaatcagaacatttgatggcagagagcacagcaccaatagtgtgaatcaggatcttctggaggccgaaaaatggacacatattgaaggaaatgtggatattggagatttgacctgggagcagaaggaaaaagtattgcgattgctctttgcaaaaatgaatggctgtccttctaggaaatacaacccagagttctaggccctccagttccaggactatgttgtttctggacagtggggaaacaaaggaatttggggatgaaagtaagcttcaagataaaatcttcatcacccagcaaattgcaatatcagacgtcttctggtgaagtggtgctacccactattccaaaagaacctcaggagtctgacacagtgggaagtcagagtcattacaacctagaggacaaaggcttataa

SEQ ID NO: 14666 - DNA, 473 bp, Homo sapiens
  SIMILAR (152)..(472): 951254mologous to Homo sapiens DNA-binding protein,accession number AF038951,Smith-Waterman Score=559.
tttcgttgtctctcgctgacgccagagatccagctatcgtcttcactgctctgtgccgtcagctcctagaggcccagcctctgtggccctgtgacctgcaggtattaggagggtcacagctaggacgccgggaccccctggaagcctagaaatgggaccattgcaatttagagatgtggccatagaattctctctggaggagtggcattgcctggacgctgcacagcggaatctatatagggatgtgatgttagagaactacagaaacctgatcttccttggtattgttgtctctaaaccaaacctgatcacctgtctggagcaaggaaaaaaacctttaactatgaagaggcatgagatgattgccaaacccccagttatgagttctcattttgcccaagacctttggccagagaacatacaaaattctttccaaatagggatgctgagaagatatgaagaatgcagacatg

SEQ ID NO: 14667 - DNA, 513 bp, Homo sapiens
  SIMILAR (243)..(437): 891254mologous to Homo sapiens Krueppel-related DNA-binding protein,accession number M61873,Smith-Waterman Score=307.
  misc_feature (1)...(513): n = a,t,c or g
aggcccgtcaattcccaatcaagcctccccacctgttggggagggcggatcggtcgggcctccttncctataaccccaacctggcgaaagggggggatgtcctccaaggncgattaagttgggtaaccgccagggtttttcccagtcaccgnacgttgtaaaaccgncggccagtgaattgtaaataccgactcactatagggcgaattgggcccgacgtcgcatgctcctctagactcgaggaattctctctggaggagtggcattgcctggacactgcacagcggaatttatataggaatgtgatgttagagaactacagtaacctggtcttccttggtattactgtttctaagccagacctgatcacctgtctggagcaaggaagaaaacctttgaccatgaagagaaatgagatgatagccaaaccctcagggagcttcctttaagtttcacagggagaagcaaaggcccttctttgtgacttataaaagactgcacagtgtggctgct

SEQ ID NO: 14668 - DNA, 2002 bp, Homo sapiens
  SIMILAR (640)..(1731): 931254mologous to Homo sapiens unknown protein,accession number M22334,Smith-Waterman Score=1830.
atggcttttgaacaagctaaacaagtggtgaagctggccctggatctatggcctataggggatgggccagtagaactgcaagtaactgtcctagatcaacatgctaattggagccttaggcaggaacaacatgggaagagggggccattgcaatttacagatgtggccatagaattctctctggaggagtggcattgcctggacactgcacagcggaatttatataggaatgtgatgttagagaactacagacacctggtcttccttggtattgttctctccaagccagaactgatcacctgtctggagcaaggaaaaaaacctctgaccgtgaagagacatgagatgattgccaaacccccaggccagaaaaactgggaaaaacaggctcttccacttactggatgtttgacaaaatatccttcttgggccaaaaacattgacatcattgttacgtgttctcattttgcccgagatctttggccagagcagagcataaaagattctttccaaaaagtgacactgagaagatatgaaaactatggacatgacaatttacagtttaaaaagggctgtgaaagtgtagatgagtgtaaggtgcacaaaagaggttataatggacttaaccaatatttgacaactactcaaagcaaaatatttcagtgtgataaatatgtgaaagtcattcataaattttcaaattcaaacagacataagataagacatactggaaaaaaacctttcaaatgtatagaatgtggcaaagcttttaaccagtcttcaacccttactacacataagaaaattcatactggggagaaacccttcaaatgtgaagaatgtggcaaagccttcaactggtcctcacaccttactacacataagagaattcatactggagagaaacggtacaaatgtgaagactgtggcaaagcctttagccggttttcataccttactgcacataagataattcatagtggagagaaaccctacaaatgtgaagaatgtggcaaggcctttaagcgctcctctaaccttactacacataagataattcatactggagagaaaccctacaaatgtgaagaatgtggcaaggcctttaagcgctcctctatccttactgcgcataagataattcatagcggagagaaaccctacaaatgtgaagaatgtggcaaagcctttaagcacccctctgtccttactacacataaaagaattcatactggagagaaaccctacaaatgtgaagaatgtggcagagcctttaagtacttctcatcccttactacacacaagataattcatagtggagagaaaccctacaaatgtgaagaatgtggcaaagccttcaactggtcctcacaccttactacacataagagaattcatactggagagaaaccctacaaatgtgaagaatgtgggcaaaggctttaagtactcctcttcccttactacacataagataatccatactggacagcaacccttcaagtgtgaagaatgtggcaaggcctttaagtgcttctctatccttactacacataagagaattcatactggagagaaaccctacaaatgtgaagaatgtggcaaagccttcaactcgtcctcacaccttactgcacataagagaattcatactggagagaaaccctacaaatgtgaacgatgtggcaaggcttttaagcgctcctttatccttactagacataagagaattcatactggagagaaaccctacaaatgtgaagaatgtggcaaaggctttaagtgcccctctacccttactacacataagacattagataattcatgcgggaaagaaacccaacaaataagaaaatgcagcaaagcctttaaggacacctctgcccttactagacataagataattcgtactggagagaaaccctgtgagtttgatgaatgtcggaaagcctttaaccagctatcaacttttactaaatatgagaatttatatggaacataa

SEQ ID NO: 14669 - DNA, 1131 bp, Homo sapiens
  SIMILAR (712)..(2907): 941254mologous to Homo sapiens putative p150,accession number U93563,Smith-Waterman Score=3584.
tatcggaaccgctccggaattctcgggtcgacgattccgtggagctgtactggacactgggcctacacctgtgaaaaggacttacagggcccaactcctggagcttacagtttgaccacaggagagctgctgcttggcagttttcccctccttgctgtgttcacatcctctcttgactcacaccactctgatgaaagtgctcctggcaaggtccatggtaactcccatgatcctgactctagtggtcacttcttcatcttcctcacaggagctcttcagtttggcaccgctgatcatacccttttccttgacgctgtttcttcacttggcttccaggtatttatggggaaccttggtagtgaaatacttcggcatctaacaatattgccttcaggaagttgtttccaagccatcgctaaagctcctgtggtccagtttcccatagaatccccctgctgctcagagtgcctgagaggaatacaccagacctcagggcaggctggggagggtgaaccggagacttatcctggtacggagccagaaggagccttcatgaatgtcttgtcaaactcttcatttggctgcagaaattccagggagaaaaaggtcctggtttttggccaaaaaggcaaaaaacaacagaaatcagctatgactgtaatcctggacttgtctgtggcacaaagagttaatgggacagtggtcaggtggacagacagactggttctccaagttgtttgggtgtcagcgtccatctgtctgtccgtgcaggtcttatgtggaaggttcactcaagatgatggcttttttcttgtagctgaaattgatggattaactgactcagttatcctggttgccttcctcgtacaagaggagggagagcagtggctgcctgcttccctgacgctgctgagtcccacgggaggggagctgggcaccctgaagcccctcgttaccaattcgggggccgcggagcagagtgtgacgacagccagtgagtcgtcagtcgacggcaatggggaccctggtgaaacagtgggccttgagttcttgacccttttaattttgtttgcgtcatcatggcggctgtgggttctaggcttttctccataccgcagctttgcgctatag

SEQ ID NO: 14670 - DNA, 349 bp, Homo sapiens
  SIMILAR (248)..(286): 761254mologous to Homo sapiens Human gene 91-encoded protein fragment, SEQ ID NO:490,accession number Y86573,Smith-Waterman Score=49.
  misc_feature (1)...(349): n = a,t,c or g
tgctctcttcagagctggcaggcaggaatgtttaagtctgctgaagctgtgcccacagccacccctttcccccacgtgctttgtcccagggagatgagggttttatctgcacttttttcaaagatgcgctgcccagagaggaggaatctagagaggcagtctggctacagaggctttgctgagctgtggagggctctgctcagctggaacttccccatggctttgtttacgctgtgaggggaaaaccacctattcaagctttggtaatggttggcgcccctccccccaccaagcttgatcatccnnnnnnnnnnnnnnnnnnnnnnnnnnnnngggagaactcgtgccg

SEQ ID NO: 14671 - DNA, 175 bp, Homo sapiens
  SIMILAR (26)..(61): 661254mologous to Equine herpesvirus 1 myristylated virion protein,accession number M86664,Smith-Waterman Score=43.
acattcaagtctgctgaagctgtgcccacagccaccccttcccccaggtgttttttcccagggagatgggagttttatctataagcccctgactggggctgctgcctttctttcagagatgccctgcacagagaggaggaatctagagaggcagtctatgtaccgtggctttgca

SEQ ID NO: 14672 - DNA, 2667 bp, Homo sapiens
  SIMILAR (1225)..(2475): 951254mologous to Homo sapiens putative p150,accession number U93563,Smith-Waterman Score=2086.
atgaggaacagtttggaactttctagagacttgttaaattgttgtgaccaaaatgttggtagtgatgtggacaatgaagttcagactgaggaggtctcagatgaaaatgagaaatttattgggaactggaataaaggtcactcttgctatgctttagcaaagagactggtggcattgtgcccctgctctagggatctgtggaactttgaacttgagagagatgatttagggcccagaggcctaggagggaagaatgatttcctgagccaagcccagggccctgctgccctgcagagccttggggcactgctccctgcatcccagacacttcagctccagcagtggctcaaaggggcccaggtacttggactgcagcttcagagggtgcaagctttggtggctccacatgatgttaagcctgcaggcagcccatggctacagaagaagctgctcccagtcacctctggcttggtttggatgggtgaggttgtcccgtttctgcagctccagtcgtggcttaaaggggccaatgtacagctcaggccattgtttcagaaggtgcaagacccaagccttggtggcttccacatgttgggcctttgggtgtgcagaagacaagagttgaactttgggagcctctgcctagatttcaaaggatgtatggaaacacctggatgtccaggcagaagtctgctgcagggacagagccctcgtggagaacctttaccagggcaatgcagaggcagaaatgtgggtttggagcccccacacagagaccccactggggcactgcctagcatagctgtgagaagaaggccaccatcctccagaccacagaatgttaggtacactggcagcttgcactctgtgcttggaaaagtcacaggcattcaacaccagcccatgaaagcagccataggggatttaccctgcagagccacagaggcagagctgcctcaggccatgggagcctaccccttgcatcagtgtgtcctggatgtagaccccaaaacaagactgcatgatacaggagaggataaaggacagagccccgtgacacaccggcagaggccccttacttactgtttggttgataaaaatccagccaatgggctgatcatcaagtccacatcaaccaacctgtctaaaagtagcaaggcatctctgaaagaaaaagcagcagccccagtcaggggtttagagataaaactcccatctccctgggacagagcacctgagggaaggggtgactgtgggcacagcttcagcagacttaaatgttcctgcctgccagctctgaagagagcagctaatcttccagcacagcacttgaactctgctaagggacagactgtctcctcaagtgggtccctgacccccatgtctcctgactgggagacacctcccagcaggggtcaaaagacgccttataaaggagagctctggctggcatctggtgagtgcccgtctgggacaaaacttttagaggaaggaacaggcagcaatctttgctgttctgtagcctctgctggtgatacacagacaaacagggtctggagaggacctccaacaaactccagcagacctgcagcagagggacctgttagaaagaaaactaacaaacagaaacgaatagcatcagcatcaacaaaaacgacatccactcaaaaaccccacccaaatgtcaccatcatcaaagaccaaagatatataaatccacgaagtacaatcaaattagaactcggaattaagaaactcactgaaaactgcacaactacatggaaactgaacaacctgctcctgaatgactgctgggaaaagcaggaaagatctaaaactgacaccctaacatcacaattaaaagaactagagaagccagagaaaacaaattcaaaagctagcagaagacaagaaataactaagatcagagcagaactgaaggagatagggacacgaaaaacccttcaaaaaatcaataaatgcggaagctggttttttgaaaagattaacaaaatagatagatcactagctagactaataaagaagaaaagagagaagaatcaaatagacacaataaaaaatgatgaagcagatatcaccactgatcccatggaaatacaaactaccaacagagaatactataaacacctttatgcaaataaactagaaaatctagaagaaatggataaattcctggacacatacaccctcccaagactaaaccaggaagaagttgaatccctgaatagaccaataacaagttctgaaattgaggcagtaattaatagcctaccaaccaaaaaagaagcccaggatcagacagattcacagccgaattctaccagaggtacaaagaggagcttggtaccattccttttgaaactattccaaacaatagaaaaagaaggactcctccctaactcattttatgaggacagcatcatcctgataccaaaacctggcagagacacaacaaaaaaagaaaatttcaggccaatatccctgatgaacatagatgcgaaaatcctcaataaaatactggcaaaccgaatccagcagcacatcaaaaagcttatccaccataatcaaatcgacttcatccctgggatgcaagggctggttcaacatacacaaatcaataaacgtaatccgtcacttaaacagaaa

SEQ ID NO: 14673 - DNA, 1771 bp, Homo sapiens
  SIMILAR (712)..(951): 461254mologous to Homo sapiens EBI 2: EBV induced G-protein coupled receptor,accession number L08177,Smith-Waterman Score=209.
  misc_feature (1)...(1771): n = a,t,c or g
tcagtcaaatttccaggaacaaaagtccttttcatccttttcttgcccctgctgctgtctctgtcgcctcccttgtgcaaactgagagaacatcagctgccggtccagcagctccattctctgctgtctctggatgtccagcgtggctcccatcccaattctggcttcgctggtgggttctctggaagtcaggtttcctgttacggaaagcaggctctggatgttacatttggggaatgttagtgtcttcacacacggagctgagagtgtctgggtccccagggggcgtttcttgctttcccttgctcgctgccccagtgcggggagaatggtggctgcttttgaatttcctgactctggtggcttcactgtcacatctatggggtgtaaagggaggaagagtgtcgagttttgtgccatgaacagattccgtttctgcagaggacagcgtgcaggggacacccttcgaggctttggagccacctaggaagcaggctggctgctgcacaggcctctgctggcctccttgcacatgtccttggtgggtgaggcagccacgtgagatggcttccggcactttgctggcgtgagtaagcccttccctggcaatgccagctcttgccgtcctcacctcctgnggccccagtggcccgcatgacggctctctgttctacacagccctcctggtcttcagtgccctgggaaacatccttgccctttgccttacctgtcagagagaggaggaagatcaactgcacaggcatctacctggtgcacctggctgtgtctgacctgctgttcaccgtggccttaccgggaagggtggtgtgttatgtgctgggctccagctggcctttcggcaaggggctctgcaggctgacggcgtttgtgctctacaccgacacctacgggggggtctacctcatggcctgtgtgagcgtggaccattacccaacttgtggtctgtgcccactggggcccgtgcctccgcacggctggccgcgccaggctggtctgcgtggccatctggaccttggtgctgctgcagacgatgcccttgctcttgatgcccatgaccaagccgctggtgggcaagctggcctgcatggagtacagcagcatggagtcagtcctcgggctgcccctcatggtcctggtggcctttgccattggcttctgtgggccagtggggatcatcctgtcctgctatatgaagatcacctggaagctgtgcagcacagctgggagaacccagtgaccagcgggaaaggacaccaccggcggggcaagcccgggaggacccagtgaccaaccagaaaagacgccacccgcgggggcagcccaggaggacccagtgaccccgcgggaaaggacaccaccagcaggacagcccgagaggacccagtgaccagcgggaaaggatgccaccggcgggacagcccgggaggacccagtgaccagcaggaaaggacgccactggcgaggctgcctgcttacgctgctgatgctggtggccgtggtggtctgcttcagcccctaccacctcaacatcaagcagttcatggcgagagggatgctccacctgccatcctgtgccgagcggagggctttcttactgtcccttcaggccaccgtggccctcatgaacatgaactgtggcattaccccatcatttacttctttgcatccacccattacaggaaatggctcctgggcattttaaagctcaaagggtcttcctcctcctcctcctcctcctccaccttgtatt

SEQ ID NO: 14674 - DNA, 468 bp, Homo sapiens
  SIMILAR (1039)..(2793): 951254mologous to Homo sapiens putative p150,accession number U93574,Smith-Waterman Score=2924.
atggtcctagttcagtggcttactgctataacctcagcattttgggagactcagaataaaggttctcttcagtttgaagacaaatgggattttatgcgcccgattgttttgaagcttttacgccaggaatctgttacaaaacagcagtggtttgatctgttttctttgggagcaaccctccaggactccagtggacctctccttacagggaaacttaagaagaagaggaaggttagtggaacaaaatacaagaagcttcttcggcaactagtctcaaggccacaactgacactcatcatcttctcctctacaatccattctggattcccctcaccctcatctagcatctctgctggttacaacgatttgcctgatcatgtgacacagaccctcatccctgatatcgaaagcaccttaaaccccaggaccagtgactgtgttagcttacacggcacaaagactctgtag

SEQ ID NO: 14675 - DNA, 3890 bp, Homo sapiens
  SIMILAR (376)..(2718): 991254mologous to Homo sapiens cullin 5,accession number AF327710,Smith-Waterman Score=3976.
atttcgtgccgcggcgggtgcaaccacaaaggctaatccgaaggagtcggggaggctcgtggagtcgatgcttcctcttccaagtcaggtcggctcccgttaccttctcagcattcgccgttccggtcttcctgagcgcgtgcatgaggtctttcgcgtggggaagctccggtgaccatgtaggggacaagagtgaggaagctcctggtgcttgggacgaggtcagcgctgtcggcgcgctgctccagcgcccaccacaccctggtgcgggccgacgggccctgggccctggtgggagctccggcctccggtcaaggcctgaccgggagcgccacgaattctcgcgtcgtctcgcgagagtccaagttaaagaacatggcgacgtctaatctgttaaagaataaaggttctcttcagtttgaagacaaatgggattttatgcgcccgattggtttgaagcttttacgccaggaatctgttacaaaacagcagtggtttgatctgttttcggatgtgcatgcagtctgtctttgggatgataaaggcccagcaaaaattcatcaggctttaaaggaagattttattcttgagtttattaagcaagcacaggcacgagtactgagccatcaagatgatacggctttgctaaaagcatatattgttgaatggcgaaagttctttacacaatgtgatattttaccaaaacctttttgtcaactagagattactttaatgggtaaacagggcagcaataaaaaatcaaatgtggaagacagtattgttcgaaagcttatgcttgatacatggaatgagtcaatcttttcaaacataaaaaacagactccaagatagtgcaatgaagctggtacatgctgagagattgggagaagcttttgattctcagctggttattggagtaagagaatcctatgttaacctttgttctaatcctgaggataaacttcaaatttatagggacaattttgagaaggcatacttggattcaacagagagattttatagaacacaagcaccctcgtatttacaacaaaatggtgtacagaattatatgaaatatgcagatgctaaattaaaagaagaagaaaaacgagcactacgttatttagaaacaagacgagaatgtaactccgttgaagcactcatggaatgctgtgtaaatgccctggtgacatcatttaaagagactatcttagctgagtgccaaggcatgatcaagagaaatgaaactgaaaaattacatttaatgttttcattgatggacaaagttcctaatggtatagagccaatgttgaaagacttggaggaacatatcattagtgctggcctggcagatatggtagcagctgctgaaactattactactgactctgagaaatacgttgagcagttacttacactatttaatagatttagtaaactcgtcaaagaagcttttcaagatgatccacgatttcttactgcaagagataaggcgtataaagcagttgttaatgatgctaccatatttaaacttgaattacctttgaagcagaagggggtgggattaaaaactcagcctgaatcaaaatgccctgagctgcttgccaattactgtgacatgttgctaagaaaaacaccattaagcaaaaaactaacctctgaagagattgaagcaaagcttaaagaagtgctcttggtacttaagtatgtacagaacaaagatgtttttatgaggtatcataaagctcatttgacacgacgtcttatattagacatctctgccgatagtgaaattgaagaaaacatggtagagtggctaagagaagttggtatgccagcggattatgtaaacaagcttgctagaatgtttcaggacataaaagtatctgaagatttgaaccaagcttttaaggaaatgcacaaaaataataaattggcattaccagctgattcagttaatataaaaattctgaatgctggcgcctggtcaagaagttctgagaaagtctttgtctcacttcctactgaactggaggacttgataccggaagtagaagaattctacaaaaaaaatcatagtggtagaaaattacattggcatcatctcatgtcaaatggaattataacatttaagaatgaagttggtcaatatgatttggaggtaaccacgtttcagctcgctgtattgtttgcatggaaccaaagacccagagagaaaatcagctttgaaaatcttaagcttgcaactgaactccctgatgctgaacttaggaggactttatggtctttagtagctttcccaaaactcaaacggcaagttttgttgtatgaacctcaagtcaactcacccaaagactttacagaaggtaccctcttctcagtgaaccaggagttcagtttaataaaaaatgcaaaggttcagaaaaggggtaaaatcaacttgattggacgtttgcagctcactacagaaaggatgagagaagaagagaatgaaggaatagttcaactacgaatactaagaacccaggaagctatcatacaaataatgaaaatgagaaagaaaattagtaatgctcagctgcagactgaattagtagaaattttgaaaaacatgttcttgccacaaaagaaaatgataaaagagcaaatagagtggctaatagagcacaaatacatcagaagagatgaatctgatatcaacactttcatatatatggcataattttgaatatcatggacaatatttagaacccaaattttggagtgcttgggcagaaagttgtaaagtttgtgctgagagaaaggtttatttggactttgattacataaatattaccatctctgccttaccttacaaaaacaactatattttgccaatcacattagttagcatgatggcattcccttcatgttgcacactctttgacagcatgctgttttgtggagaaacttgcattcatgaagagcccattatcaacttttaaaagtgaatttgatttgtacccaccaggagaaatacagttgggaagggtgagggtggggttcttgttgcttttttctctttttttcctctcttaaaaaatgtacttgcacaaggaaggatcttcagatattcatgcactgaaaaatgctgttatcttttgtttttaaaaaatgcaattaaaactagaaatagcactcttggtttcttttgatgaaaagagtgagctggtcaatgcaacattgggaaacggcagatgtagataattcagcattggcgtatttgcttgtcccaatacaagaatgccaaaggaggaaacaggaaaaattgccgtccattttaaaaatttaggtttgttgttttaaaccataattgttctcagaacttttttggaacttcctaattttgggtcatttaatttaagaatgagagtcatgatgttttgatttatgaaggtgaatttaatgcaaaagtgggtaacactacattcatagcaaagttttttattaaattttataaatttttaatagccaattatgtcctaattgtattttggggaatgaacagcagcaaatactgtaaatgtacagttttcttttttttttttttggttatgtatacaaaagttttaactactttttggtgtttatgaaaatcatttagttgacaaggtgcctatgccattgttaaattttctttaagtaatttaacaacagatttgctaatttaaaaaaaaaatgaaaaaaaaaaccttaccaccattttgtaaaggtctgaaaccacattgggcaccctttatccaggtccctcccccccaacgtacacttaaaattggtgccgagcagggatataacctgcagttaagtgaaaagaaaaatccagcctccccctccaaaaaaaaaaaaaaaaaa

SEQ ID NO: 14676 - DNA, 359 bp, Homo sapiens
  SIMILAR (55)..(243): 681254mologous to Mus musculus fatso protein,accession number AJ237917,Smith-Waterman Score=227.
  misc_feature (1)...(359): n = a,t,c or g
aaaacaaaaccaaaccaaaccttaatgacttaggaaggtggctttagtggccgcatgaagcacaccctgattgccgaggaacaagagtgcaaagctaagaaactgaggcattttgaagagtttgaagacacttggcttccttatctgacccccaaagatgaattccatcagccgtggcagctgaaatatcctaaattaattctccaagaagccagcagtgtatctggggagctccataaagaggctcaannnnnnnnnnnnnnnnnnnnnnnnnnnnnnnnnnnnnnnnnnnnnnnnnnnnnnnnnnnnnnnnnnnnnnnnnnnnnnnnnnnnnnnnnnnnnnnnnnnnnnntcgtgcc

SEQ ID NO: 14677 - DNA, 452 bp, Homo sapiens
  SIMILAR (2239)..(3768): 941254mologous to Homo sapiens putative p150,accession number U93572,Smith-Waterman Score=2521.
cctgcagatagaaataatctaggctttggaagaacttgctgccaaagagaaagctaatgaggatgctgtgccagtgtgtttggctgcagatttccccagtgctggcatggggtcatcctgtgatggacaagaagatgaactggacataaagagtagagcagcatacaacgtaactttgctgaattcatggatcctccgaaaatcccacacctgaaagagaaaccttattttggcatgcggaaaatggcagtgcgctggcatcatgctgaaaatctggtggacaggccccaaagaggaaagtgaggacgactctcatcttgaaggcagagatcttgatacttggcatgttggtgttaagatctcatgggatgtaaagacacctggtttggcaacaccccaaggagactgctatttcatgcttggtaatctttggagaaccaaaattatattgg

SEQ ID NO: 14678 - DNA, 1704 bp, Homo sapiens
  SIMILAR (597)..(887): 841254mologous to Mus musculus fatso protein,accession number AJ237917,Smith-Waterman Score=416.
atgccctttaagtgtaaaaagcagcatactttcaataaaaccagtccaaaggaaggagccatcattttcacccacggctgtctgtgcacgtctccttttaactctgagctcagtgaacacttggggaatttgaaattgtcctcatgggaacatctacaccatagaagtcagcaaacactctcggtcagactccacgtccccactccacagccagttgagcacgaatttatccaactgatttatattcacacaggtgcaaaattacaggcgagcaaggttattattgcaacaaaagatgggaagcgacgtaaaagtcccttgtggcagctgaaatatcctaaactaattctccgagaagccagcagtgtatctgaggagctccataaagaggttcaagaagcctttctcacactgcacaagcatggctgcttatttcgggacctggttaggatccaaggcaaagatctgctcactccggtatctcgcatcctcattggtaatccaggctgcacctacaagtacctgaacacccagctttttacgggccccttgcccagtgaaagggtctaatataaaacacaccgaggcttaaataagccgctgtttgtgagaccttcctcaagctcaatgactacctgcagatagaaaccatccaggctttggaagaacttgctgccaaagagaaggctaatgaggatgctgtgccattgtgtatgtctgcagatttccccagggttgggatgggttcatcctacaacggacaagatgaagtggacattaagagcagagcagcatacaacgtaactttgctgaatttcatggatcctcagaaaatgccatacctgaaagaggaaccttattttggcatggggaaaatggcagtgagcctggcatcatgatgaaaatctggtggacaggattcagctccaactctgggatcccgtggatggaacaacagcctcttcagctgtgccaaagcaaggaagggacaagaggagagaagtccccaacaccctctcccagccaaacagccaagaaggcctcatctcagccttccacagccgctgcgtgcatgctgtattttataaactcacgtcagcacccaagacaacatccctaccagacgtcccttctgacctcctggcagagggcttggcggcatctagagcaggtcaagccttatggaggtgtgataagaaatcccttcttaccttggttcgtaagataaacttgcagggcaagagggatggaggaagatcagccacgaaccagcaatcccagcctcacttggataacaccggccttgaaagacagctcgagcagaaggtgggacgatgccgatcaccttggagaggtctcggccatcttgaaggaaatgctcagaaggggcacctgcttcacggtgttaacaagaatgggcagcacctgcttcggcgccacggggtcagcatccgcgcgggccgcgccccgcacctggcagctgctgacacagcaccgggacgcatttcctgcctgggtcactcagaggcgctcaagcctaggatccaagctggagggctgggtgcggagagtatttggcaggtgttgtgggaaggcgggagtaacagcagcgttttttgtcggcatgatgaagagccggctgccgagcttcctcttcctggcaagcaggcgagtggtggccacatgaaaagaatgaggagctga

SEQ ID NO: 14679 - DNA, 1462 bp, Homo sapiens
  SIMILAR (1)..(2982): 851254mologous to Homo sapiens putative p150,accession number U93564,Smith-Waterman Score=4259.
atggtaccctccaaaatgacaaccaccatcaaagtagtgacacagtcactacctaagttaccctccaaaatgacagccaccatcaacatagtgacgtggtcactacctaagaatgagcggggagtgttcaaaaaacccaagccccacctcagaccacccaacccaaaccagatgcagcagtccttcgggccggccagaacccccgagcccaggatctcggactgggagcggattcccacctggggattccggttgtcaccagggtggatgcagtgccgcatgttggagacggtgatccactttactgagtcccccagtgtgaatgctgacttcatctcgaaacacctcacagacacatccagaaacaagtgtggccaggaaagaccaagaccccttcttcatcacagcttcagaaacaactggcaaagttgctttattctccttaatttcaacagctttgctattttcgtggaaggagttcattccttccagtgggttctcgctcccaacgacttcaagaatgaaatcacagaccttctcagagtgaagccacagaccctcacagtgagtattacagctcttaaaggtggcacatacacagttgttttttgctcctggtggattcgtggactcgctgacttcaacaacgatcctgcacctcctcacggtgtttttcacagggccagtggatttcataatgtgagtgctgtccagcaccaaaggaaatggccaacacgcatggagcagcctgcagcgtccagcaccaaggagggtggccagcaggcatggcgcagcctgcctgtcccaggaaagcaggagtcacaggacacaactggacccagggaaaggccctggaacaaatgcaggcaaatgtgaggatgctcaggctcagctctgcaaggagagaacgagctttcgggtcaccatggaggagtgggcctcactggtcaagccttccccactctcagcctcagtttccccgcagagtgggaaggccaaagagactgtcagcaaagggcctgtgcaggagccacagtcgtggtcaatacatagttgccagctcttgagagatgacaacctgctaacagtcctcgcttgctctgggcgtctgctcggcctcctggccacgctggaggagcccttcagcccacagctgcgctttgggggcccctctctggggctggcggaggcccgagtgggctccctctgctggcggggagaagcccatgaaggtttctgccagacccccaaaagcacacaggaccctcacgtgtggggtggggtgtacatggagcaggcagcattactgcaggatgtggacaggattctttttcagtttcagggaaacgtggagagaaggattcggtcattttcaggagaagatgcagaactgaagccgcgagaatggccgtatgcagtcatgatggagctggactttggacttaggagaaaaagccattga

SEQ ID NO: 14680 - DNA, 566 bp, Homo sapiens
  SIMILAR (205)..(564): 671254mologous to Homo sapiens OS-4 protein,accession number AF000152,Smith-Waterman Score=414.
  misc_feature (1)...(566): n = a,t,c or g
ggtatgtgaacagctgtggaggtcagaatctcgggaantgaatcaggccccagcccatgccccccagcccagccctcaggattgttagatggaacaaggctccatcatcacccaggcatggagggaagatgccctggtccttaccaagcaaggcctggtttccaaagtcctctccgaagaggcctcatgtttgccacatcttaaaagtcccctttctgctgttcttgcactcagcatgttggacagtcaagttccccccgctgagcaaatccacacataaggagggagtcaacacccattgctatgtcggatcagctccagcgtctccaatatcagttttatcagatcccaggaacctgcctgctcccagaggtgacagagaaaaatcaaggaaggatctgtatggtcactgacctggatgaaacccttgtgcatagctcctttaagccaatcagcaatgctgactgcctagtgcctgtagagcttgaggggaccatgcaccagatccatgtgctcatgaggccttatatggatgagttcctgacatgaatggaggaaatgtttaa

SEQ ID NO: 14681 - DNA, 305 bp, Homo sapiens
  SIMILAR (303)..(136): 351254mologous to Mus musculus serine 2 ultra high sulfur protein,accession number M37760,Smith-Waterman Score=75.
ctgtctgggctggagatgttccaggctggagcgggggctccaagctctccaggctattgaggcagctgctgggcaatttcgtggtctggacctcctgacaagcacagcaacaggggggcctcctgtggacttgagacttgggcaggggctgctgcaacagacacagcagggccccatccagctgctggaagatgctgagcatgagcagggtctggcggagatcaggggacaggctccactgctcctcttccagcaactccctgaccactccaaagtcttgtttgagctgcagcgctccctgcagg

SEQ ID NO: 14682 - DNA, 2653 bp, Homo sapiens
  SIMILAR (1)..(2973): 951254mologous to Homo sapiens putative p150,accession number U93563,Smith-Waterman Score=4940.
tttttttttttttttttttggtagcagggttttaaaccttaattttgcgctccgtgacccttcagatagtgatttgaatgattaagtgaaactcttcttaggttaaagtgtcctagtaccacgctaaaatcatcttgttggtctcgttggcgctgtcaccgaccagttatcagcgcccggcttgtccccgcttgcccgccgcgtgccctggcccggatgtgggaggcgaaggcggtgaggcatttccagagcggtgagatgagcgccgcgcataattcaggcgatgccccgtctccgaacagcacgtccgacgcaggggctcggagccgtcatggcctcacgtccgcaatcactgagcagttgagattagtggagcggaccttctcactgctcaccgtctgcaggaaggtcctccgccccggaagaactcgtgcaggcggaagtgtcgcattgcgtgaggccgtgaatggctgcgcttctgcgggatagacttccggccgccggctgcttagcaggcctgcgaaccgcagctctgggcttcctgtctgggctggagatgttccaggctggagcgggggctccaagctctccaggctattgaggcagctgctgggcaatttcgtggtctggacctcctgacaagcacagcaacaggggggcctcctgtggacttgagacttgggcaggggctgctgcaacagacacagcagggtcctcatccagaagatgaacgaggctatgcatgaacagggtttgagtgggcacagggacaggtcacagcagctcttcttccagaaaatacatgaccactccaaagtcctgtctgagctgcagcgctccctgcaggctgagccgaatcccatgggtaagaatgtggtcaagccaggcacccacgatggccgtcagagcctgaccaagggcaggggcctgggcttgaggtggcaacccttgcaatccttgcaacacaggctccagtaggttgcggaccactaaaccagcatactcactaggagcactgggaggttcaggacagagacgaagccgccagtaccgaccccgtggcatgtagagcttgaaaccttgcatggcttgtttatgacattcttgagaaaagacacttagtgactcttcaggcaggagctggatctgtgcagtcagcttctggatctccaggcccagctgctgctccacttccagagctaagctttcctctgaggccaggctatacaaagcttctgcctcatgcaacagaggaggtaagtccttttggatcaggagcaggaaggaagctgggtcccatgctgccaagtactgctgagctctgcccaggaaccagagcaaggtggtctgaagggtacagagacctagggcgacaggcgcaggatctgcaggctggcagaaaatccgtcgtaacctgggctctcgaagggcatccaagagaggaggaaagagctgctgcaaaagttcagcagtgccagaggatgtgggaaggctgctctgacccccaagagctgatcccaaggcctggcagaaaccctgacccagtgcctgactcagctgttgcgctgttgccctggggtccctccagggtcccagatttaggtccagactctgagcacaggctgcccacagcagggtccagtattggctccacaaggccccagcccctccgagccctagtccacagctggctgaacccgccacgcccccgaccaggcccagcagccctggtagcagatccccctcctcttggcaccgcctgcggagctggtccctcaacgccgatccttggagcgcctcgtccagccgacttgccacctggcaaccccgctcccccgtcaagaggcggagcacacgggacgtggggaaaggacgtgcggcccctgggacgtggctcaaggcttttctctgtagtgtgtggtaggcgggaagtgcaaagagcagctcggcgagttgggacgacaggcccgggctggcgggctcccggccgagagcgcgaagctgcatctcgatgacagcctccaggcactgggcggctagtccgatggggcgcgctagcagcagcggctcgagagtctccccagggccgattcgcagaaccgccccttgggaagggtgcagctgcaggtcgcggcaccactggggcaaggggctagggccgccggatggcgagccaggactcagggtcttcatgagtcgcacagccgactgtaggtggtaggcgcagtctcgggcctggaggagctgctcccgctcgcgatgcagccgcagcaacaccgcccggagacgctgcagcgcgggagggatcgggccgccacctgcgggcccccgcctccaggccgcagcatcagcctcgtagtcctcgctcacatccgccggcgtcggccaccacggcgtccctccagaagttccgctcggccagcagtgaacctcccagcgaagaccgcccgttcgacttctctcccactgctcctccccagtgcccccgggttgcgccctcagcgggggcacgataacgagtggaggcaggctacctgagcgagacgcctgggccatggggcggcgggtccagaacgaacctaacgattcccacttccctgcacggaccaacgcccgccgcagctcggacttcgccccatcgcaagagccgttt

SEQ ID NO: 14683 - DNA, 6223 bp, Homo sapiens
  SIMILAR (243)..(545): 1001254mologous to Homo sapiens clone 22,accession number AF009427,Smith-Waterman Score=516.
aaaaatatacttgctttatttaccaattttctaaaaggcaaacaggtcataaaaagacacaagcagtcaaacaaatctattgcactgggtaaagaaagtttggtttgcacacaaacaaaccacttgtccagcaaggctcaacaaatcatcacagaaactctgagagcttatttacatatctcttcgggaatatattaaaaagaaggctcagtttaaaatagagaaaaactgtttaacacctgtgtaagcacacacactaaagaaaacatgacttgatgcttggcatcacgtaaacaaattcacaagatgatcctattaagtcaactgcttggcacgcgctgaagctacagttaacaatcagtgagcacatattaaatgataaaataatgctgatggtaaacattcataacagcagagtaagattttggcagttttgtgtttcggtaacataactgtaaccttagatgaacacctatcccttcatgatctgactttagaggcaaggagtttgtaacatctaatggccataagaatgcagactgctaccttatcataggcataggcagctgatgttactttgtaaattaacgaaaaattaaagtgttcttgtgtttatgaagaataggtttaatagtcaggcataagatggttttacgatgaaaacctagtggattacaaagagatttcacctccatcaaaaaacagaaaaccctggtcccagttgggcgtggtggctcacgcctgtaatcccagcactttgggaggccgaggtgggtggatcgcttgaggtcaggcgttcgagaccagcctggccaacatgataaaaccccgtctctactggaaatgcaaaaaaatagctgggcgtgctggcgggtgcctgtaatcccagctactcaggaggctgagacaggagaatcctttgaacccgggaggcggaggttgcagtgagttgagatcgggcctttgcacttcagtctgggcaacagggcgagactccatctaaaaaaaaaaaaaaaaaaaaaaaaaaagaaaaccctggtcccttttaagcctcatagtcttggtccaattttaagtcaactgttcttcagtgataactttgaatttccaccagggaccaatattaaattttctgaaccatctttggaatatacaatgcaacatgaggttttgtaaaaagccgggcagactggcctcacttttccccaagtgtccaaatgacctaaaagtgctggggacactggcagaggcctgaagctgctccgagagaggtcgggctcatgaaaagaatgagggctgtgcacccaacccagggtgcagtgggagaggtgagctcactgcacccctgaaaatacagatgcagtcgcaagctgtcagactgagtggcagtggctgctctcggccaggagatgtgatgtgggcttggctgggtggaagcagatgtctgggtggttccaacggaagaaaaccaaacaggactgggtctcacatgtgttggtcacagcctggtttgcaaagggaagtcaccataaagagatgactgatgacatattttaatctccatattggccatcatggtctgaaaaggagacaagaataatgcagaaatatacagagggtctgtctgcgtgtgcattcatccgatggagttggccacacaaaccactaggcttctttagtccagagcaaatgtttcaactttgttcactacaaacaaaacctatgtcagactgaaatattgaccacaccagaagccaaagctgttggtttgccaaacaacgcttcacaccatttaatgtgaaacgttttgaaataaaactaggagaggctgctatctccatttggtatgtataaaaaaacactctaccttgactaaatgataattcagataaaaagcagtccccaagagaggacaaaatttgatctgatccaaacaccctgggaaagctctggaagccagagtccccagctggtgcagcagacagaggtctcgtcacagtcacaggacttctgggagcactgaggcaacttccctgacactaagaggcgcttagtctttctcaagttaaataacaactaaaatctcttccccatcccacaaaactccacatatatattttatatataaaaacatatttctttccgaactctccccactctccacagttttaagtcgccccttcagaaaactatgttgtttttttttctaaaacaaaaaaagcaacatgagcatatgtgtccatttcagtggaaacagccatgaagatctttcatctcttccaagcaccacctggtgtacctcgctggctgccgggctgaggtggggcaggggttacgtctgctcttcgatcctgtgattcaagggggatccattttcgtcttctttggtgtccgacacttcgctgagtcccagagaaggaatatcttcctcatatggtatgcaaatattacctttttccttgttttcacagtaaacacattctgccacgtcgatggctgcgggcaggccgcccgtctgcatccactggtggacctcgcgcagctcctgcttctgactctccgtgaacctgggctggagtttctgtaggagcttcagcttctctctgtcctccttcaaaaccgcttctaaatttcgggaaggcagctggtacgtcatcatgacgctgctgtccgcatctgccatcagcagccagatgggatcctgcaggacgcacttaatgaaatgctcactttcttccataccagtgttcatttttgctttgtgattattctctgaggagtcaatgcttccaaaatatttgctggtatgacttgtgtcactactgcctgccccactcggggaggcgtcgcagcccagtgagccggagcccagagactccgaagcagcagagcccgaggctgagcagaggtcctcattcagcaggaggtttaggaggccgcttgacgtggaaagggcgtcactgttctgtgtgtctgagggttcatcacgggtcagaggcgccttcggctgctggtcccgagaagtgccaggtttgcagtccgcccctacagctgctgtctctgtggcccctgtggtccccatggctccagtgccaccctcaggggcttcctccagctgcagcaggttgagctgcaggggcgagctgctgcgggactgaaagagcggtggggaggccctacccatggccgatggtggggtggcccgggtggctggacaagcacatggctgtctggggatcgaggtccggctggggaactcaggctgtgaggcagaggccatctcggatgtgagtgtggggtggctcggaaactgaggctggctggggaagaaggcctggggcaggtttggggtccccgaggggaaggaataactgggtagcatgaatgccatgacaggcgccaaaggggcagggaaaggtgggggctggactgcaaactggtgctggaggtccacgggcacagcaggcactgtgaagctggcgtggggaggtgccgggggtgctgccacagtccctggcgctggaaacacgggcagtgaataagctgctggcactggggcgggaaagggcacggctgggcagctggactgggacgtgtctgagggtgaccaggctgtggcgttcaagcccaccagcgggggccgggcggacacgggccccccagatccggtgctctcagatgagtctcgaggtttgacccgcttggacttcaattttctgttctttcctgtttttttccaaggtgaatctattccggaagtatttcttagtccaggggcagttcgttcacttggctgccccttggatctttcttgcaagtagtaatggcagtgggactggaaaatgctgagttttcttatttctttgaacttctgcaggaagctctgctcctccttctgtgtgtgtgcagcgagtacctccttggtgaggcccagcttcttgaagggctccttctcttggctgagaccacaggccagggcagggcccgccaggcagtccagggattctggcccactcgcagcatcttccaccatctctaactccggctgcggcttcttgtctcccacatggacgatggtgctgctgtagctgcactggctggtgagcgacgccacactctctgccttgcccggcagtgccagcgaggtcaggtgcgtacctactcccgtgcggctgttcaccctggagggcggctctgcctctccagcgtgtggccctgggctgactgtggccttccgcttatcactggaccttagcgctgggacgtttgctgggaactcgcatttcctcttcagggtggcagcctcattgcagctctccaagtacctgatgacgctgtccaagcagctgatctgctggtaggagcaggtgggctggttcttgcaggccaactcctcggggaagctgacccccaggctgtccttttccatggcagggacagctttcttctcagctgggggattagtttgcatttctgtaacggattttttcttttgttctccagattcatgagaataatgacttctatttttggtcttgttaccatttttacaaatttcggctctcctccggcgtgagtcctcatggccgttgctgtcgctggaggaggtctggctcataaggtgctcgtgggacccgttgctgcccagactcccgtagccactggagccgctgtgggggacgggctgcagcaggagccggtggatctgctctgtgagctcctgaatgctggggtgcagggccttctcctctgtgcaggggtgggctgcaaacacgtcctcattcaaagggcccaccctgactttgtgcctcccaatgatgaaggagattttcctgctccatgtgttgtttatagctggaccagctggtgtccaacgtgatgtactctccgttccgggcgcgaaaccgaatgggagaatagtcgaaaggctgcccgcctgactgcaggatctttttgtggatggccagcatcaagggcctgtcactagggtggagctgcacgagcactggggtttcaatcaggtcctgaggtaggtagcccaggagagggaccgccctttcatccacatcctggaacaaacaatttggtgtatgggtggttgtaaaaattctcttttcaggaggaattctaggggcttcataaccagagtgcactctctctgccagcagaaggcagcaaagctgactctcagcaccttgttggtcccgcaccttgaccaggtagggcgtcatgcggaaggggtggtagcggatttcattctcgtggcttttccggacactgacacggcaaaagaaagatttctcctccatgcattcttgagtaaaagaatctgctccactgcacatgctccacaagggaagcttgtacggggaggtgaaactgtggaacacgcccacatcgtgaggcgccaggaactccacaaacttggcatcgctgaaggcatctcttttacagtgaaatatggatgcaacctggtcagagatgtacaggatcttcccagacaccagggacacggccaccgcaaacatatcggcattcttcacaatgtgctcagaggtaacgctctccatctcctccacggtgtaggagggcacgtctgctccacaggggtgaccctcgctggacatcagcagctggtaatactcttcattggctttcacctgcttcacgctcctgagggcgtacttcaaggtggccagcgtactggccttgcccttggccttcttgtctgcagggaggtggaccttcagctcctttagtgtttttatcagttctttgtgtgtgtccactttcgaagactggtcgctactgcagccacttgtagatgggttgtgttcagattttgccatcatcaggctaaaggtatctggactctggcgggcatccggtggctccaccagcatccccagctccttcccactgtcgtcacagtcactgccctgcgagtcccgccccgtggagcagttttcgttggtctcatgtccactggagccactgctcatgtccacatcttcctgcagtgggacctggctgggctggggctccacgggctccttggtggggttactggggctgggcggaaattccgcgtatccattcatgctgggctctggaacgaagctttcggacctcaggctcctgagctgcgaagcgggggttcgagtccccaaccctcggtgtcaccgcagttcaaacgagcgcaccctgcgcgcggctcgaccac

SEQ ID NO: 14684 - DNA, 489 bp, Homo sapiens
  SIMILAR (17)..(274): 971254mologous to Homo sapiens Human TB2 protein (partial),accession number W76141,Smith-Waterman Score=433.
  misc_feature (1)...(489): n = a,t,c or g
cggtcgacgatttcgtccggcactaggaacagccccgagcggcgagacggtccccgccatgtctgcggccatgagggagaggttcgaccggttcctgcacgagaagaactgcatgactgaccttctggccaagctcgaggccaaaaccggcgtgaacaggagcttcatcgctcttggtgtcatcggactggtggccttgtacctggtgttcggttatggagcctctctcctctgcaacctgataggatttggctacccagcctacatctctgtggcttcctgttgtggtgcatggccccgagcccttctaatggggctgaactgctctacaagcgcatcatccgtcctttcttcctgaagcacgagtcccagatggacagtgtggtcaaggaccttaaagacaaggccaaagagactgcagatgccatcactaaagaagcgaagaaagctaccgtgaatttactgggtgaagaanagaagagcacctan

SEQ ID NO: 14685 - DNA, 3184 bp, Homo sapiens
  SIMILAR (9)..(635): 441254mologous to Homo sapiens Human TB2 protein (partial),accession number W76141,Smith-Waterman Score=266.
tcatcggaccggcattcccgggtcgacgatttcgtccccgggcggcgagacggtccccgaacatgactgcggccatgagggagaggttcgatcggttcctgcacgagaagaactgcatgagtgaccttctggccaagctcgaggccaaaaccggcgtgaacaggagcttcatcgctctttggtgtcatcggactggtggccttggtactggttgtccggttatggagacatctctccctctgcaacccttgttaggattttgctaccccgccctacatctcaattaaagctataggagagtccccaacaaagaagatgatacccagtgggctgaacctactgggtagtgtaatggtgtgttcagtcattgctgaacttcttctctgatattcttcctgtcatgggttccccttctaactacatggctgaaagtgtggcttcctggttggttggtgcaatggccccgaagccccttctaaatgggggctgaaactgctctaacaagcggcatcatccggtccttttctttccctggaagccacgaagtcccagattggacaagtgttggtcaaggacccttaaagaccaaggcccaaaagagactgcagatgccattcactaaaagaagccgaagaaaagcctaccgtgaattttactggggtgaaagaaaaagaaagagcacctaaaccagactaaaccagactggatggaaactttcttggcctctctggtaccttcctacttggaagcttggatgttatattaggggactggtggtataattattttaataatgttgccttggaaacatttttgagatattaaagattggaatgtgttgtaagtttcttttgcttacttttactgtctatatatatagggagcactttaaacttaatgcagtgggcagtgtccacgtttttgggaaaatgtattttggcctctgggtagggaaaagatgtatgttgctatcctgcagggaaatattaaactttaaaataaaattatataccccacagggctgtgtactttactggggctctccctgcacgcattttctctgtagttacatttaggataatctttatggttctacttcctataatgtacaattttatataattctgaaatgtttttaatgtatttgtgcacatgtacatatgggaaatgttactgtctgactacaacatgcatcatgctcatgggggaggggagcagggggaaggttgtatgtgtcatttataacttctgtacagtaagaccacctgcccaaaagctgggagggaacccttgtgctgggtgtggtctacttaaataattactttaggaaatacgtgattaatatgcaagtgaacaaagtgagaaatgaaatcgaatggagattggcctggttgtttccgtagtatatggcatatgaataccaggatagctttataaagcagttagttagttagttactcactctagtgataaatcgggaaatttacacacacacacacacacacacacacacacacacacacacacacacacacacagagtaccctgtaactctcaattccctgaaaaactagtaatactgtcttatctgctataaactttacatatttgtctattgtcaagatgctacaatggaaaccatttctggttttatcttcaaagcggagaaacatgttgatttagtcttctttcccaatcttcttttttaaaccagtttaaggaacttctgaagatttgtccacctctgattacatgtatgttcttgtttgtatcattagcaaccaacatgctaaatggccggcacctagctctaagagcaattctgggagaatgaaaggaagtataaagtaacccataatctgcttggcaatagttaagtcaatctattcttcagtttttcttctggcctttaaggtcaaacacaagaggcttccctagtttacaagtcagagtcacttgtagtccatttaaatgccctcatccgtattctttgtgttgataaggctgcacatgactacatagtaagtacaggaacagtaaagttaaaacgggatgtctccattgatctggcccaaatcgttataggaggaggcatttgtctgggactaggaaaatctggagtttttacaccatactgtttaggagtccttttggatttaaactggactaaaacaagtggataactaaactatcaagattaaatatccagccagtacaagtattttttaaggcaaataaagatgattagctcaccttgagataacaatcaggtaagatcataacaaatgtctcatgatgtaaaaaatattaaagatatcaatactaagtgacagtatcactctaatataatatggatcagagcatttattttggggaggaaaacagtggtgattaccggcattttattaaacttaaaactttgtagaaagcaaacaaaattgttcttgggagaaaatcaacttttagattaaaaaaattttaagtatctaggagtatttaaahtccttttcccataaataaaagtacagttttcttggtggaagaatgaaaatcagrcaacttctagcatatagactatataatcagattgacagcatatagaatattattatcagacaagatggaggaggtacaaaagttactattgctcataatgacttacaggctaaaattagttttaaaatactatattaaattctgaatgcaattttttttttggttcccttgagaccaaaaatttaagttaactgttgctggccagtctaagtgtaaatgttaaccagccaggagaagttaagaattgagcagttctgttgcatgatttcccaaatgaaatactgccttggctaagagtttgaaaaactaattgagcctgtgcctgggctagaaaacaagcgtttatttgaatgtggaatagtgtttcaaaggtatgtagttacagaattccttaccaaacagcttaaattcttcaagaaagaattcctgcagcagttattcccttacctgaaggcttcaatcatttggatcaacaactgctactctcgggaagactcctctactcacagctgaagaaaatgagcacacccttcacactgttattacctatcctgaagatgtgatacactgaatggaaataaatagatgtaaataaaattgagttctcatttaaaaaaaaaaaaaaaaa

SEQ ID NO: 14686 - DNA, 455 bp, Homo sapiens; identical to SEQ ID NO: 3188
  SIMILAR (231)..(455): 981254mologous to Homo sapiens Human chaperone protein 6 (HCHP-6),accession number Y91945,Smith-Waterman Score=377.
  misc_feature (1)...(455): n = a,t,c or g

SEQ ID NO: 14687 - DNA, 593 bp, Homo sapiens; identical to SEQ ID NO: 3189
  SIMILAR (328)..(429): 1001254mologous to Homo sapiens Human chaperone protein 6 (HCHP-6),accession number Y91945,Smith-Waterman Score=170.

SEQ ID NO: 14688 - DNA, 1095 bp, Homo sapiens
  SIMILAR (331)..(843): 991254mologous to Homo sapiens Human chaperone protein 6 (HCHP-6),accession number Y91945,Smith-Waterman Score=876.
gtttggcggggtgaaaggttgcgaagatggcgacggccttgagcgaggaggagctggacaatgaagactattactcgttgctgaacgtgcgcagggaggcctcttctgaagagctgaaagctgcctaccggaggctctgtatgctctaccatccagacaagcacagagacccagagctcaagtcacaggcggaacgactgtttaaccttgttcaccaggcttatgaagtgcttagtgacccccaaaccagggccatctatgatatatatgggaagagaggactggaaatggaaggatgggaggttgtggaaaggaggagaacccctgcttgaaattcgagaggagtttgagcggctgctgagagagagagaagagaggagattgcagcagcgaaccaatcccaagggaacgatcagcgttggagtagatgccaccgacctttttgatcgctatgatgaggagtatgaagatgtgtccggcagtagctttccgcagattgaaattaataaaatgcacatatcccagtccattgaggcacccttgacagcgacagacacagccatcctctctggaagcctctcaacccagaatggaaatggaggaggttccattaactttgcgctcagacgagtaacttcggcaaagggatggggagagttggaatttggagctggagacctacaggggcctttgttcggtctcaagctgttccgtaatctcacaccaagatgctttgtgacaacaaactgtgctctgcagttttcatcccgtggaatccgacccggcctgaccactgtcctagctcggaacctagacaagaacaccgtgggctacctgcagtggcactgcagctccccgctcctgcaggtccagcgtcctcacaggaacaccagggcctgtgctccggagccttccttcagacccttcctccacgtgcccacttgggatgcagaatgcagcggagctaggaccccctccacggcctggacctcggctgcagtaaagttacgtgaggcctgtctctcggggcctggaagtggcagccatcagttgctcttgctgacccctcggagcaagcgccgcacaggtggtggc

SEQ ID NO: 14689 - DNA, 1990 bp, Homo sapiens; identical to SEQ ID NO: 3191
  SIMILAR (7861)..(7112): 741254mologous to Homo sapiens clone 22,accession number AF009426,Smith-Waterman Score=896.

SEQ ID NO: 14690 - DNA, 639 bp, Homo sapiens
  SIMILAR (143)..(610): 831254mologous to Homo sapiens DNA binding protein RFX2,accession number X76091,Smith-Waterman Score=639.
cggccgccgccgccaccgccgccgccatagagactgtagccgtggagactgttacttaccaacggggaccaacacgcagcagccgctgccgccgccgcgggagccgctgcccgaactcccggcccgaactccagacctgagcatgcagaattccgagggtggagcggattcgccagcgtccgtggctctgcgtccctcggcggcagccccgcctgtgccagcctccccgcagagggtgttggtccaggcagccagctccaatcccaaaggggcccagatgcagccgatctccctccccagagttcagcaggtaccccagcaggtgcagccggtgcagcacgtgtatcctgcccaggtgcagtacgtggaagggggagacgccgtctacaccaatggagccatacgaacagcctacacctacaaccccgagcctcagatgtacgcccccagcagcacggcttcttacttcgaggccccaggcggtgcccaggtgaccgtggcagcctcgtcccgccagcggtccccttccacagcatggtgggcatcaccatggatgtcggggggagccccatcgtcttcagcgcgggagcctatctcattcacggggggatggacagaccagaacttctggccaacctc

SEQ ID NO: 14691 - DNA, 2094 bp, Homo sapiens
  SIMILAR (106)..(588): 821254mologous to Homo sapiens clone 22,accession number AF009424,Smith-Waterman Score=703.
atgaaaccagatgacaacagcacccagaacgagggaggacagagcttcgaggagcgacacgaaacactgcagagagtcaagttcagaggaggcccgaaaactgccccagggaggaaattaattgctttcttagggcagatgaactctggtacctctggaggccagcgagtaccaggagaggaggagctgatggccggaggagccacgtgcctcccaaacaccgaggctcatcagccaatcagaatgaagaatctccacaccccagcattcagactctgtcctctgacccttcaggataacgaggctgatgctttctggcaccaagcatttgtggactggggcatgcccacaggcaaaaagccacagactcttggtctgacctataagacaacacatgacctgagcatgcagaattccggggtggagcggattcgccagcgtccgtggctctgcgtccctcggcggcaccccgcctgtgccagcctccccgcagatgttacccctggaacttgtgattctgggggtggtgcgttggacaagtgcatacctgctcagtggtccaaggaggggcagacgaacagctacacctacaaccccgagcctcagatgtacgcccccagcagcacggctcttacttcgaggccccaggcggtgcccagcatggtgggcatcaccatggatgtcgggggagccccatcgtctccagcgcgggagcctatctcatccacggggggtggacagcaccagacactccctggcccacacctcccgctcatcgcccgcacggtccttcagatccaactcaaaagccccttcctccaggaagttctgctgttagctgccaactctttcttccaaaactcttttctcttttccaaaaatcttcttcgcaagctcccactgggtaaacattcgccagacagtgtccagtggccctggatctacggcctcctggtggcagggtctgagtctttggcctcgctgctatttcccaaagcctccagcagcggggagaccctgggatttgcgacaggacagctggctggggagtcaaggctgccatctctccttgctttcattctggttcccatcgatgtggcgtggggaaaggagcagctggtgactcagaccaccgtctaccgtgtgcagggttctggccagcacctaaacaaggcctggcaagagccagctctcgtaaatatttgtggaatgggtgaaaaggtggatgttcaagtcggattatgtcaacacagggcacacctggacggttggaatagctcccgagctgctagtgtatggcccggtgagactctaactcaccaccaggaccagtgtcaggcaaatttgcccccaggaatagaaacaagtatcttaggaacaaagggggccaggtacccgagccctcaagagcagggaggtgggcgagtgtggttggagcggctggaccctcgtggtcggtttccggaactgacctgtgatgcttgccgcagtctgacgtgccgccagggagagcatagtctgggggaacaggcgataaatcaatcagcacacatgacaaatccggacggggcaactcgaagtaccattacttgggattcgtctgaagccggactcaccactgaaccggctgcaggaggaccgcagtacatggccatgcggcagcagcccatgcaccagaagcccaggtggtgccgggccgagctgggaggagctggctctcccctggagcatggaggatgtctcccacgtcttccccgagttcccagcgcccgacctggcagcttcctgctgcaggacggcgtcacactgcacgacgtcaaggccctgagctggtgtacagacggcactgcgagatgtggtgataacctccagttccactacatcgagaagctgtggctctccttctggaacttaaggcctcctccagcgacggccccacctctcttcctgccagtgacgaagaccccgagggcgccgtcctgcccaagacaagcttatctccctgtgtcagtgcgaccccatcctcaggtggatgagagctgcgaccacatcctctaccaggcgctggtggagattctcatccccgcgtgctga

SEQ ID NO: 14692 - DNA, 3009 bp, Homo sapiens
  SIMILAR (380)..(204): 401254mologous to Homo sapiens Human secreted protein, SEQ ID NO: 4578,accession number G00497,Smith-Waterman Score=74.
cagtccggccgggcggagctaggggcgggcccctgcgtctctgggcgctggagcgcggcgactatcacgccgcgtggcggacggacggactgacggacgcgcagccttacccgaaaggccatggcggagcacgcccctcgccgctgctgcctgggctgggacttcagcacgcagcaggtaaaggttgttgctgttgatgcagagttgaatgtcttctatgaggaaagtgtgcattttgacagagatcttccagaatttgggcatgtacttgatgtgcatggtgttcatgtgcacaaggatgggctgacggtcacttctccagtactaatgtgggtccaggcactggatatcatcttggagaagatgaaggcttcgggcttcgaattctctcaagtcctagccttgtccggggcgggccagcaacacggaagtatatactggaaggctggagcccagcaggcactgacaagcttatcaccagacctccggctacaccagcagcttcaggactgtttctccatcagcgactgcccggtgtggatggactccagcaccacagcccagtgccgccagctggaggctgctgtgggtggtgctcaggctctcagctgcctcacggggtcccgtgcctatgagttcaacctggtttgtgatcggaagcacctgaaggacaccacacagtcagtgttcatggctgggctccttgttggcaccctcatgtttgggcccctctgcgaccggattggccgcaaggccacaatcctggcgcagctgctcctcttcaccctcatcggcctggccacagcttttgtgcccagctttgagctctacatggccctgcgctttgctgtggctactgccgtcgctggacttagcttcagcaatgtcaccctactgacagaatgggtggggccctcatggaggacgcaggccgtggtcctggcccagtgcaacttctccctcgggcagatggtgcttgcgggactcgcctacggtttccgcaactggaggctccttcagatcaccggcactgcgcctggcttactgctcttcttctacttctgggctctgccagaatctgcacgttggctcctgacccgtgggaggatggacgaggcgatacaactgatccagaaaacggcctcggtcaataggcggaaactctccccggagctcatgaaccagctggtcccagagaagacaggcccctcagggaatgccctggatctgttcagacacccccagctccggaaggtgaccctgattatcttctgtgtctggtttgtggacagtctggggtactacggcctgagcctccaagtgggggacttcggcctggacgtctatctgacgcagctcatctttggagctgttgaggtgcctgcccgctgttccagcatcttcatgatgcagaggtttggccgcaagtggagccagttggggaccttggtcttgggtggcctgatgtgtatcatcatcatcttcatcccagcagatctgcccgtggtggtcaccatgctggctgtggtggggaaaatggccacagctgctgcctttaccatctcctatgtgtactctgccgagcttttccccaccatcctccggcagacaggcatggggctggtgggcatcttctcacggatcgggggcatcctcacaccacttgtgatcctgctgggagagtaccacgctgccctccccatgctcatctacggcagcctccccatcgtggccggcctgctgtgcaccctgctgccagagacgcatggccagggcctgaaagacaccctccaggacctggagctggggcctcacccacggtcccccaaatcagtgccctcagagaaggaaacagaggccaagggaagaacttccagcccgggagtggcctttgtcagcctgggcaccagtgacaccctgtttctctggctccaagagcccatgcctgccctggaaggccacatcttctgcaacccggttgactcccagcactacatggcactcctgtgctttaaaaatggctccctcatgagagagaagatccgcaacgagtctgtatcccgttcctggagcgatttctctaaggcactgcagtccacagagatgggcaacggtggaaacctgggtttttattttgatgtaatggagatcacccctgaaattattggacgtcataggtttaacacagaaaaccacaagtactttaaaggaaaaggtgcccccggtcaccccatgccctctttgaaggcaaattttgatttgcttgcctgtctgcggggcgttggcagcagcacactgctcctctggccagcagtcctgggtgcacagaccaggcaagctggtgtcaacgaagggcggtcacaggtagctgacttccttcggatccccgtcactgggtgcccagaacagcgcaggaacccgccgagtcctccggcccctctgggcaccgggggtcctgccgaggagcgcctgcagtttcctggggtagctgggtccaggcggggtcgaggccgcatcttgcgagcgggtggcattggcagggcatctccgggcgagggcaccggcgccccacggccgcgcgcagggcaggggcgcgggggccccgggaagcccgagagcggaggaggcggccccgtggccctgcggccaggcgactgtacctgctgcgtgctgaagtcccagcccaggcagcagcggcgaggggcgtgctccgccatggcctttcgggtaaggctgcgcgtccgtcagtccgtccgtccgccacgcggcgtgatagtcgccgcgctccagcgcccagagacgcaggggcccgcccctagctccgcccggccggactgtggaccggagtcacgaggcgggcttgcgctctggcgccgcctgcggggctacgcgagccgggaccgcgtcctgtgcaatcgacggtgcccccacgcagcccgctttccttcgaagcgcaccccctctggttctccccatcttcatcttatgtcttcatgggccgtgccctga

SEQ ID NO: 14693 - DNA, 924 bp, Homo sapiens
  SIMILAR (256)..(366): 831254mologous to Homo sapiens xylulokinase,accession number AB015046,Smith-Waterman Score=150.
atgggcccggccgcgggcgcgcctacctctcgggcttcccggggcccccgcgcccctgccctgcgcgcggccgtggggcgccggtgtcctcgcccggagatgccctgccaatgccacccgctcgcaagatgcggcctcgaccccgcctggacccagctaccccaggaaactgcaggcgctcctcggcaggacccccggtgcacgaaccaactcatctgtgaacatcttcctctagagggtcttggctttggctatttggggaacaaagattccttgagacatgtaaaggttgttgctgttgatgcagagttgaatgtcttctatgaggaaagtgtgcattttgacagagatcttccagaatttggtgggcttgccagtagtgctgttacccagagctcttcagcgaccttcaacaagtgccttagtctcttcagagtctgcacgcagcatagagcctgcagaccaatgcctcccctttcactttcgagcactccttcttggggaaaaggcatcccaagggagcggggcaaaaaagagcagaaagtccaacacgaccaccacttcgcctccaagaagcggctccaggagagctgcaacgccctcttccatacggtactcaggtgccagctggtctttgcccttcggtttccggactcaggctgcgcgcgcgcgcgctactaccctacagaactcactcgctttcggtgtaaactaagcctcacgacgacgcacaggagaagtgcccaaacaaagcggtcccgcgaagcgaccacactccgcatcccggggccaacggcagggaaagagggagcaggtgggagccagcaccaacagcccgccgggccggtctacgaggcccttctcccccagtatgccaaactcgagcagagaatcttgtctcagacccgggggcctccggagtga

SEQ ID NO: 14694 - DNA, 328 bp, Homo sapiens
  SIMILAR (10)..(231): 271254mologous to Nicotiana tabacum Pistil extensin like protein, partial CDS only,accession number Z14020,Smith-Waterman Score=77.
atgcctgagcctcccaccccctccgtggactcctgtgcggccggagcatccccgacgagcgccaccccctgctccacggtgcccactcccatcgaccacccaagggctgagcaatgcgagcgcacggcgcaggactggcaggcagctccacctgcagccccgctcagggattgtaaatacaccaatcagcaccctgtgtttagctcaaggtttgtgagtgcaccaatcgacactctgtatctagctgctctggtgaggacgtggagaacctttatgtctagctcaagggttgtaaatacaccaatcggcactctgtatctagctcaag

SEQ ID NO: 14695 - DNA, 627 bp, Homo sapiens
  SIMILAR (475)..(185): 921254mologous to Homo sapiens CGI-27 protein,accession number AF132961,Smith-Waterman Score=473.
gagtgtggattggtgcactcacaaaccctgagctagacacagggtgctgattggcgtgtttacaatccctgagctagacataaaggttctccacgtccccaccagactcaggagcccagctggcttcacccagtggatcccgcaccagggctgcaggtggagctgcctgccagtcctgagccatgcgctcgcaccatatagtattatggtgtttcctcaagtaattgctaaaagatacagggtctaattgttctataatactcatacccattttatctagatgttcaatggatctataagtctccccctgggattcatcatagtaactgtaacggaatctttgaccccaatggcaaaaatcagaagaaaccacaaagaaattactaggatctgctagatatttactgaagagttttccgaattcctgttcttttgactcactcagagctccaaccagtacaggaataatggtatacgtatatcctgcatggggtgcaataatggctctagcaggtctttttgtagactttacttgtgaaagccaaccttctagctgtgcattcagctgtggtcctgagcactagctctaaagagtcagtgaggatggggatccttgttcagcaggaa

SEQ ID NO: 14696 - DNA, 1083 bp, Homo sapiens
  SIMILAR (526)..(296): 371254mologous to Mus musculus alpha-1 type II collagen,accession number M63709,Smith-Waterman Score=87.
atgccaaaatgtgtgcatgcatcgatgtgcattgcagggtgttatgaaacatgcaaccctgtaccaggcacgactgggaatatgggaaagacagtccctaccagtaagagcttcctatgggatgaccagaccctggcggctgccggctgtcaggcccggcccctgcctggctgcgaggccaattactgcggccttaatcaccacggtggcggcggcggcgcggcgttaacaactgtctgctcatcagtctccttcctggggcgtcgtggaggggatgaccccatgcggctctcctcgaaggagcttgaaactggatcccaacaacagcccgatggccgccgtccagggaaacgcctggctccctcctgctgcctgctggtctcctggtgctctgacagcctgaggcctggccggcccccaacctggctgcctctgcgcctgctccttgggctcaggcggatcttggtgcttcctggatgtggtgaggcccctctgcacgtggccctccaggctgtggtccgggagaggactctgagctcctctgatctgctcccatctacttgggatgccaggagagcccctgggagaagcagcaggacgtgggaaccatctagagcacaagctctggagttagacctgattatgaatcccagctctactgcacaccagctgtgtgccttaaacacagtaccaaatggaacccggtcccttggtcagcaaaacggagataataaagtaggacctgtatcctcatcacctaagctggcagagcagaaatgcagcaagaaagagaaagtcatgaagaggccaaagacccatccccgctatctcctagggaaggttctcaaaagcagcaacaaaatgttaatacttccacaccttcccattgcccgaggctcccctacgaatgccgccccctgctccacggcgcccagtcccatcgaccacccaagggctgaggaatgcgagcgcaaggcacagcactggcaggcagctccacctgcagccccagtgcgggatccactaggtgaagccagctgggctcctgagtctggtggggacgtggagagtctttatatctag

SEQ ID NO: 14697 - DNA, 549 bp, Homo sapiens
  SIMILAR (435)..(479): 601254mologous to Homo sapiens Human neuroendocrine-specific protein NSP-A mutant fragment 59,accession number Y21492,Smith- Waterman Score=46.
atgacgaagactgagagagaacagaatgaacaactggatgggggtggctatggggagagacttggagaatactctctcttcctgctatgtgtaccatcagaattgaaccaggggaaatgtgaacgggtctccagttactttgggatgaatctttcgggggttctaaagaaacttccttttcctccaaccagagaatcttggcctcctccacacttcaccggcaccccccacaatcatcatggaggagtcagcaatggtgctttgggatgtgcccagagatgctctctgcaccatgctaccaatgctgggggttgggagaggggtggtgtcagcaattcaagattgtttttctttctcctcagtgcctctttcagtgacgcaaagataaaaccagcgcccagtcccatcgaccacctaagggctgaggagtgcgagcacatggcgcgggactggcaggcagctccacctgcagcccctgtgcgggatcccctgggtgaagccagctgggctcctgagtctggtggggacctggagaacctttatgtctag

SEQ ID NO: 14698 - DNA, 471 bp, Homo sapiens
  SIMILAR (45)..(155): 431254mologous to Homo sapiens Human breast cancer related protein BCAR3L,accession number W48349,Smith-Waterman Score=75.
atggccagtgcagctgaagtaagggatgggtgtagagatcggggcaaaaagcttggtaaagaagcaaagccagatcatgcctgcgcacttgggatcccagacaaacattcgcttctagcagatgctgctgctgaaaattcctactgccccgagcctctgaatttcctgggcacctttccctcttctactgtggtgcacatttcctttccatcatcatcatctgctgtgaatcttttcatgagacctctcctttcagttcaggaagctgttgaagatccagagacttggaaaggtatctttcaagtatcttttaaagcgcccagtcccatcgagcacccaaggactgaggagtgcgggcacacagcacaggactggcaggcagctccacctgcagccgtggtgcatgatccactgggtgaagccagctgggctcctgagtctggtggggacttggagaacctttatgtctag

SEQ ID NO: 14699 - DNA, 1143 bp, Homo sapiens
  SIMILAR (1864)..(2733): 811254mologous to Homo sapiens melanoma-associated chondroitin sulfate proteoglycan (MCSP),accession number X96753,Smith-Waterman Score=1183.
atgaaaaacttcccggagttcccagagcgctctttaagggagccagatggggccttacattttggatcgagacggtgggggaacaaggaatcgacggcgcatgacacccagacggaacgaccggacggccggatcgatcgaaggacggaacgggtggaagtgtgcgctcgattgacccgattcggatcggcgcgactcggtcgcatcgctttggaccgtcacgcatcggtattggtctgggatgaatgcggatgcggtcggatcggaacgggctcgggatcgcgatcggcgtccggatcggagacggtactcgatatgggttccgcatggcgatgggaatcgggatcggcatggggagggggatccggaacgtcgacggtgatcccgaaccggattcgagtagggatccgtaactggctagggaactcgcatgcggatcgggcctcggagtcgcggcacgcaccgggaacgggaacgcgggaggggctctcggactcgggatgctgggggcttactaacaccaccgcctggaaccgaccggtatcgtcacgctcttccgtgcccttctcctctccccggttattgccccataaaaacaaaagggccctggcatccctggctttaacatcttcccggacccttgaaacgcgcacaacaacacctacacgaacaccgttagcgaaaaacaacccgctgccctacacgaccacgccatccaaggacatctcgacccgctggagaagcacttcagtgggaccagagagaacactgtgcatcccaggattgcagccactggactccagcaactcgaggaagaggcagccattgataccagacctagaattcactaaaggtcaatgccttcaggaattttcatctgatttgatgattgatgccctccccatcatgagccccaggaagtctcccatgccactttccccagagccttcagacaaccccctaattgctttgtgccccgtgcctagccagcaacagcaaacgtctccggaggccatactggaaacggggcgccccgcattccatcacaccccagcccatgcggaactcccactgcctcattcggtgctgccgctaacaaccattcctgcttcgaaaaccgcgtcggagagccccctggcttga

SEQ ID NO: 14700 - DNA, 4392 bp, Homo sapiens
  SIMILAR (862)..(1146): 581254mologous to Rattus sp. reverse transcriptase homolog,accession number S80119,Smith-Waterman Score=260.
gctcgacgatttcgtgtggggcgggactgatggcggagtgtgagcgggctcggttttgggccgcggcgggagcgggagtcgccgccactcgagtgcgcaggcgcctggcgattaccggtctcaccatggagcggaaagtgcttgcgctccaggcccgaaagaaaaggaccaaggccaagaaggacaaagcccaaaggaagaatgggcatttttgtatcatttcttagatctgaaactcagcaccgaggctctgctccccactctgagagtgatctaccagagcaggaagaggagattctgggatctgatgatgatgagcaagaagatcctaatgattattgtaaaggaggttatcatcttgtgaaaattggagatctattcaatgggagataccatgtgatccgaaagttaggctggggacacttttcaacagtatggttatcatgggatattcaggggaagaaatttgtggcaatgaaagtagttaaaagtgctgaacattacactgaaacagcactagatgaaatccggttgctgaagtcagttcgcaattcagaccctaatgatccaaatagagaaatggttgttcaactactagatgactttaaaatatcaggagttaatggaacacatatctgcatggtatttgaagttttggggcatcatctgctcaagtggatcatcaaatccaattatcaggggcttccactgccttgtgtcaaaaaaattattcagcaagtgttacagggtcttgattatttacataccaagtgccgtatcatccacactgacattaaaccagagaacatcttattgtcagtgaatgagcagtacattcggaggctggctgcagaagcaacagaatggcagcgatctggagctcctccgccttccggatctgcagtcagtactgctccccagcctaaaccagctgacaaaatgtcaaagaataagaagaagaaattgaagaagaagcagaagcgccaggcagaattactagagaagcgaatgcaggaaattgaggaaatggagaaagagtcgggccctgggcaaaaaagaccaaacaagcaagaagaatcagagagtcctgttgaaagacccttgaaagagaacccacctaataaaatgacccaagaaaaacttgaagagtcaagtaccattggccaggatcaaacgcttatggaacgtgatacagagggtggtgcagcagaaattaattgcaatggagtgattgaagtcattaattatactcagaacagtaataatgaaacattgagacataaagaggatctacataatgctaatgactgtgatgtccaaaatttgaatcaggaatctagtttcctaagtctcccaaaatggagacagcagcacatctcaagaaacagactcttgtacacctataacatctgaggtgtcagacaccatggtgtgccagtcttcctcaactgtaggtcagtcattcagtgaacaacacattagccaacttcaagaaagcattcgggcagagataccctgtgaagatgaacaagagcaagaacataacggaccactggacaacaaaggaaaatccacggctggaaattttcttgttaatccccttgagccaaaaaatgcagaaaagctcaaggtgaagattgctgaccttggaaatgcttgttgggtgcacaaacatttcactgaagatattcaaacaaggcaatatcgttccttggaagttctaatcggatctggctataatacccctgctgacatttggagcacggcatgcatggcctttgaactggccacaggtgactatttgtttgaacctcattcaggggaagagtacactcgagatgaagatcacattgcattgatcatagaacttctggggaaggtgcctcgcaagctcattgtggcaggaaaatattccaaggaatttttcaccaaaaaaggtgacctgaaacatatcacgaagctgaaaccttggggcctttttgaggttctagtggagaagtatgagtggtctcaggaagaggcagctggcttcacagatttcttactgcccatgttggagctgatccctgagaagagagccactgccgccgagtgtctccggcacccttggcttaactcctaagcccctgcccagcaccacagcagagatcacacactgaccctccgcccttccccttcaagcattttcctcttcccttttcagggtgaagctcttccttcaagagtttctagatcttgttttttttttaatccaacatgttcatttgggtttgcttacttgaccctgtggagatccccacagccattgggcatcctaggtgaatttggccttggttgggctctgccaaagactaatggactaaaatgtgaaacagcctcttgccctgtacctttccttcccattaggacatcctttaaattataagcatcctttttgaaaagagctatgaaggtgtatgagcccatccttttattcattgactctaagagtcaaattttctagtgcatatcctattgccagcataaggatgaggagggggaaagggtcttaattctatgtacagcagagacattaaacttgctgtgtccgggctgcatcatcttcctggactgtttctgttgttctctgtgttcacattttttcctgcaacttttaagctactgtcttttttaaatagctatatgaacaccaaatttgggtaccattttatcactgttcaaagcactgtcaaattcctttcatcctttaatagttaagatctttgaatcttcagtctgatttttaatgtaagcaaaaacagaaccattgaatagtaatttcttgagaacctcaggtgttctataaacagtcctttcctgtatgtcttctattaccctaagaccagagttattttggttggttgttttgttttattttttgtttttgtatccatggctggcactttactcattgcacttgagtttattgccccataactaaaggatcaggatgatggtagaacggagatctgggtttcagagctttcccatttaagaaaaatagatcttgagattctgattcttttccaaacagtcccctgctttcatgtacagctttttctttaccttacccaaaattctggccttgaagcagttttcctctatggctttgcctttctgattttctcagaggctcgagtctttaatataaccccaaatgaaagaaccaaggggaggggtgggatggcacttttttttgttggtcttgttttgttttgttttttggttggttggttcgttattttttaagattagccattctctgctgctatttccctacataatgtcaatttttaaccataattttgacatgattgagatgtacttgaggcttttttgttttaattgagaaaagactttgcaattttttttttaggatgagcctctcctagacttgacctagaatattacatattcctccagtaagtaatactgaagagcaaaagagaggcaggattggggtcacagccgcttcttcagcatggaccaagtgggccttggggattgcagcgttctcgaagtggctgtaggactcgaatttacagaaagccacagaggtgcaacttgaggctctgctagcaagccaccagtgaggctattgggtaaccacctttctatacaggagattggaatctactttgtcatttatccaccacagtgacaaaggaaaagtggtgccgttatgcaatccatttaactcataaacatattactctgagtaactggccagccattcatcggatccttcattgggtactcctgaaatcagacatgttcctgtagaaagaattttaagttaggctttctatgcacctatcaagaatcaagagaatagattgtatcaaacaacggcagggaaatccttcagcaattctaatccactttgggttttcagctgtttttacatctaaagcaatagactagaactgaattatcttctacatagtaaaatcacaattgtggaattacaggaattctggtgatattaaggtgaaataacaaaacacaaaaggccctattttaacagttgatgtgacagtaagttttaatagaacctgtaacttcattttggaaatgcttctccaccaaataagggctttttcccctatttaaggagccagatggattgaaagatgtggaaataggcagctgtagatcttgatcttccaggtaccccatgtacctttattgagcttaattataatactgtcaaattgccacgatctcactaaaggatttctatttgctgtcagttaaaaataaagccctaaatacatttttattctttctactgagggcattgtctgttttctttgtaaatgccgtacaataaacaaattatttaataaccta

SEQ ID NO: 14701 - DNA, 1474 bp, Homo sapiens
  SIMILAR (457)..(1596): 251254mologous to Gallus gallus high molecular mass nuclear antigen,accession number D88440,Smith-Waterman Score=141.
gtggggaggtccaagctaggggagtttgtgcctcctctgtggagttggggaggaaaggtaccgggcgggctctggtcctcctccgacagccctttccagcaggcccggggctgataagacccaggcctggcgttgagcaacagcagctctcttccacatggttgctggagagcgaccctccgagctgccccgaggccatgtggctgcagccacagggtgcccaaacccggtgcacgttcaagacgtgaaaccagagcagagaaggtgccggaggaaaatccaaagaatgggatgttggggtacaagactcacttcctttgggctttgtccttcttggccttggtccttttctttcgggcctggagcgcaagcactgcaggagagagggatggatgaagggcgaatgtggaggaaaggaggcgaccaaggtgagggtggagacccagctgcactgcgggagcccctttgtgggccggccaagaccggagccggctccctcagcttgcagggaggtgtggagggagaggagcgagggggaaccggggctgcacgcggcgctttcgggccagctggagttccaggtgggcgtgggcttggcgggccctgcactcggagcagccagccggccctgctggccccggacaatgaggaggggcttagcacccaggccagcggcttcggagggtgtactggttcccccagcagtgccagcccgccggcgctgtgctcgatttctcaccatgccttagctgtcttcctgcggggcaggtctcgggaccagcagcccgccatgcctgagcctcccaccccgtccatgagctcctgtgccgcccgagcctccccgatgagtgccgccccctgctccagggcgcccagtcccatcgaccacccaagggctgaggagtgtgggcacacggcaccgggactggcaggcagctccacttgcagccctggtgctggatccactgggtgaagccagctgggctcctgagtctggtggggacgtggagagtctttatgtctagctcagggattgtaaatacaccaatcagcaccctgtgtctagctcagggtttgtgaatgcacccaatggacactctgtatctagctactctgggtggggacttggagaacctttatgtctagttcagggattgtaaatacaccaattggcactctgtatctagctcaaggattgcagccactggactccagcaactcgaggaagaggcagccattgataccagacctagaattcactaaaggtcaatgccttcaggaattttcatctgatttgatgattgatgccctccccatcatgagccccaggaagtctcccatgccacgagcagagggtttaataggcaagagggaagggagaaaacagaaggaagaagctccccagtacagagacagagggtggggggctccaaagccacgaaaggaggtggcaagtgtggtggacaccagccag

SEQ ID NO: 14702 - DNA, 525 bp, Homo sapiens
caacagctagtactacttgcctagcttagttatttaagaaaattattatgtaaaaagaaggtagaacccagaggacctggagatctatttcagcattctttgagcaaactcctgtgtcttcagtttttcttatagagacttttccttttgaggagacttggaaatctacattaacgataacttaatgtaaataaattgttaataaagcacctataagtcaaaagaaaatgctcatttaatataattaaaactacatatgacagatactcaatttaccacacgttaaaccaatccatttaatttactgcagcactgaaaaaaaccatgatgctacacttacatttctattacagatcccacagatgcctgccacaaaaataaagcattttcttcaccagcagtcagccagcttacagtattttctcttccactgctggttcattctttgtgctctccggccacagctgcggccacctcgcagtcttttctctctggcctcggagcccgcagctgccgggaacgcgc

SEQ ID NO: 14703 - DNA, 616 bp, Homo sapiens
  SIMILAR (421)..(1212): 281254mologous to Homo sapiens proline-rich protein G1,accession number X07881,Smith-Waterman Score=132.
acccatttcttccttcataataccatgcatattcaccatttcctctacttgctgccttgagttcttctggtgacaacaaggttggcttgtcaaggaaatcctcgggaatttcttgtcgacaaagagcacaccgctttccaagccatgaagctccttttacacatagatagcagaaaacgtgcttacagggcagactgactggatgaacacatgtttgcagacaaatggcacattcagggacggttaaagaaggtgcagtattagaacaggactcgttcgctttcctgtttgtaggaagcatgtttattgaatgatcaatttcaccacagccagccatcatttctattacagatcccacagatgcctgccacaaaaataaagcattttcttcaccagcagtcagccagcttacagtattttctcttccactgctggttcattctttgtgccggagtacgttgcggctggaggtgacaccgcgagctatgcctcctctccccgagtgaggatcctagagtggccggcgttcaccctgctcccccgagagggcctcgctccgactcccacctctccggccacagctgcggccacctcgcagtcttttctccctcgtgcc

SEQ ID NO: 14704 - DNA, 842 bp, Homo sapiens
  SIMILAR (380)..(1237): 281254mologous to Homo sapiens Ps 2=basic proline-rich protein(PRB1L precursor protein=basic proline-rich proteins (Ps, PmF, PmS, and Pe) precursor) {C-terminal},accession number S62941,Smith-Waterman Score=125.
atgactaaatggaaaagcaatcctcaaattcatatggaattgcaaaggaccctaagtaacccaaacaatcttgaaaaatccaatgtcaaaacttactacaaagctaagatctttgacgataacctcatacagctgacctttcaacaacacaggcaagaccgagacactgagcaggagaaaaaaaaggaggaagagcgagagaagagaaagcagcagcaagagccactccggaaaaaggcaaaaatgcagactgtacgccctggcttcgatctgacccaaggcccaaactgtctgaccccacacgggaaaacatggagcaggctaccgccgaaaaaccatcgccgcccctacacctcgaggccagaaggtccccgggtaaaggcctaaaaccacggcccagaggggaggagagggacccgcctgccacccgaggcagcgaagcgggctcaggcggaagaggctgcgcagtaatggccgacccggagtacgttgcggctggaggtgacaccgcgagctatgcctcctctccccgagtgaggatcctagagtggccggcgttcaccctgctcccccgagagggcctcgctccgactcccacctctccggccacagctgcggccacctcgcagtcttttctctctggcctcggagcccgcagctgccgggaacgcgcgcggccgtcacagtgtgcttgctttgtattagggcccagaggctctgaaagagtgcagttccaacagaaagagatttggggtggaggaagtaaaacgtgtgtaggaccagcaggtggtgctgctcaaaaatccagctttgctatcctgaggaagctctggggcgcctag

SEQ ID NO: 14705 - DNA, 765 bp, Homo sapiens
  SIMILAR (759)..(466): 611254mologous to Homo sapiens Novel protein (Clone AX56_28),accession number W85723,Smith-Waterman Score=268.
ctatccacagcccctcctggagtgtgtctcttcatcctgaggtctaaagtcctgataatctcccccagtgaacctgcggtttctctgaggagccaggtcctctgaggacatgggtcccctggtgactgccttgccattactggaccttctcagttgagtgtgcagaccacatcccatgatccctggataataaggataatctccacatctcatgagcattaatttaatcacatttgcaaatttcctttttccatgtgagtaacgtaattcacaatttctcaagtctgcatcttcgtaatgtggatgattcacaatgggatgaagtgtagacagcttgacacttgccattgtaggcatggcacctgcaaagacagcatctgccctgggctggaagagagcccactgccctgaagggtgagttccaggcctggcagcactcaccacaagctgactgaaaggtccttcagccttaagtgaatgttggcggtagccaggcattacctcccacgggcctgtggtagtggtggaaatgaggagagaccactctgcctgtccagcaagagctggacccactgagttgtcacctggtacggtattgtatttgatccactgtaaaagttcttcctgaggcaaatcattaaattctcctgttatgctccattgattacagaggtttgcataaccttgtattgacatcactgttagaatgccaaagataacattctctctgcgaactctgcgaaaaagccagccaaagagcaccat

SEQ ID NO: 14706 - DNA, 774 bp, Homo sapiens
  SIMILAR (1)..(147): 661254mologous to Homo sapiens Novel protein (Clone AX56_28),accession number W85723,Smith-Waterman Score=162.
atgcctacaatggcaagcgtgaagctgtctacacttcatcccattgtgaatcatccacattacgaagatgcagacttgagaaattgtgaattacgttactcacatggaaaaaggaaatctgcaaatgtgattaagttaatgctcatgagatgtggagattatccttattatccaggtgaattgcttcagattttctctagtaccagagtgtacccgctcaaactctttgaaccacttagggcagaggaatgcaaagtcctgcccaagtggacccagcggcaaagagaggcaatattgcgggccacacggcacacttatggcccaaaggaggaactctgcctctctgcttcttcatcttcttataatgcaaatacgagaacaaccttgaagctcattggaatacccgactttcccatactatctcttgtgtctgggacaaagctcaacaaaatacttgcaaaccgaatccggcagcacatcaaaaagctgatacaccacaatcaagtaggcttcatccctgggatgcaaggtgggctgcccacgcctggcagcgagcaaggccacctcagggtttctccttcatcaccatccagcactgtgactctgaaacttttcaatttcatggaacctttcgaaaatctgaatctgagcaaagggaaggcctctgtgcacacaatcacgcaagaaaacacagactccttaaaagttcagggttcacagttttcccaaggccatgaaaaacggaccctagacttaaaagtatccacacaatag

SEQ ID NO: 14707 - DNA, 1557 bp, Homo sapiens
  SIMILAR (247)..(1038): 281254mologous to Homo sapiens proline-rich protein G1,accession number X07881,Smith-Waterman Score=149.
atggagatgctgaaggtctttatgcagaggtttgggcgagccaggaatgccgacaagttggtcattggagttgctgaagaggcaaagccagaatttgttaagttcaaggggatcttgacaactgtacagaaactgcagcacatcagccctccaaaaacactaacagacgagagagttgtttgtgagctctgttcagctgagtatcatacttggccaagtcagtcacttctcgttattggggcgtcttctacctgtcacttgaaaaagactgttctttggaacaataaggcggtaacacatacacaggaccaccctgtagccggccacacaggttccgcctccaggtgcttggatctacttaacggacctcccagggggaaagatttgcggtctctccgtccctctaccaggggagggcgccgttccagcccttgcctctgcggcacagatcaaaggacggaggaaaaaaggtgcgggtccggggcactaatgttcgaaaatgcagttttaagtgacctctccccgcgcacgcactgtcggtgggggcagtcccgaggccaggctgcggggcgcctggggggactcgcctcagggggaaatggccctttcagggctcgacgggtccccgggactaaacgctccggccgcggatcggtgccgggggagcccggtcagagaggccgggaccccgagggacgcctaggtgcgtgtcccgaagcccgcgtacctccagccccggcgagacggcgcccaactcgcggctccagtcacacggcccttcctgagaggaaacaccagggaaagcacctctcacttttctcagggtgggaaaactgtgaaggaagaagacaaagcaacaggcagtgccgggagctcaacatagagcacgcggcgctggccgccggcactcgcgccctgaggctgctgccccggagcgcccggcggcggtttcggcgcgcggccgggctggcgatggaagatggaaggaatgaggcgcaccgctgctggaagaaagtatcacaaacttggtggcttaaagcaacagagatttattctcttcaagttttggagactagaagtcggaaaggagtcttaggggctaaaatcaagaagattccaggtgattcgtatatacaacagagtacgaagaccattggtcgagagcagtggttcacaaagaagatggctcctgtaccagcaacatcagcatcacctgaaaaattgttagaaaatgcagattcgcaggccccacagacctacggcatcagaaactctgggatggaccccagcagtagcttcaggacggggctgggcaccagaaggacacagcgggattggagggttcggactttctcctacgtgtgttcagggaaactaagtagcatggcagcagcccagagcccccgggtcagtggctacacagcagcaattataggttcttttgtgggtttccgtgttgtcctgtatgctgaatcatcagaatgcagaggtcactatctcagccacccctgtggacagtctgtggttgtgtggcatcaccctcattcctgcctctga

SEQ ID NO: 14708 - DNA, 1668 bp, Homo sapiens
  SIMILAR (457)..(1596): 251254mologous to Gallus gallus high molecular mass nuclear antigen,accession number D88440,Smith-Waterman Score=141.
ctatctgctaggaaacacgagggtgagtgatgagtttttagggtggagctggtcggcagtggggccccgactcccagtccagggctgcttctgttgcaccagtgtcccccagtgacccctgcacttgtttgggtgctggacccctttgagaatctgatgcacgacagggaccatttcccctggaaaacacacgtccccacccttcttgtatgcagaatcatgggatttgccgcagtttgcacccaggcctgtgcggatgccccccgactgcccgagatgctgcacctgccactgctgggggtgtacctgcctatgcccactcacaggggcacctccagggtagctgcctggtgcaggcattggctctaagcagagcagcactatgggcccatctggggctggctcttgcctgggcctgtgagcaccatcacagccagccgatctgggagtatccagggtgttcttgtcattgcggacactgaatagccattggtgggtggcgatgggggcttggaagccgagcatcagtggcaatgagaagcaggccctgtggtttaattccgaagcacatgaacccacagagccgccaacagtcgttattcggcaggagggggtacagagacagcagcctgcggagcgttctaggcaggacagggcagcaaacctgacatgcggagctgggggcaggggtaatggggccagggggtaatggcaggtgaggccatggcctagagggttgccatgcttggtgcaggggaggagaggcccaggtgtggctgcagtggcagcaggagtcagtgtggctgtgcccagtgggatgttgtcagagaatggacctggctgcagcaagcacattctggagatgcggggcagagacgaggcctccgtgagaacctttgaggtgtgagggccttgatctggggtgcagcctccagctttctgcttacagagcaggacctgcaggagctcgctgactgcctgcacagtggaaggaagacctgtttcttttactttcagggacgtggtgatgtggcaccaggcccagtggcaccagcacaccaccgtctcgctggcatttccaccgtggtccctgaagggccggggctctgtgtgggtgaagaccggcagcttcctggagtaaccagagggctgagcctcctccttgacttgttcggagtgtttcttcactgaccggtttaccagccctcggcccgcggcaaatgccgaatgccggtgctgggaacggaagtgggaaatgacggggggtgcgggggagcggccctgactgggactgtacggggacgcatgggggtgcgggcactggaaagctgctatgggctggtctgagcctcttccctctttccgggaaatctgaggcccaccagcagcgggcagcaggtcatgggtatggtcgcggacttggaagcccaggaaggccaccaaggagcaggaagggccgtgtcctgggatcagagtctgcccctgcctgagggagccctcagccactacgctcagcccgtcagaaacctgagagctcatgtccacgacagggccagccagtggggagaggacccggggctcccttggaggcagggcactgctcgttcccgcggccgctcggccccgcccgctccctccaccccgatttcccacagggcttgcaggcat

SEQ ID NO: 14709 - DNA, 495 bp, Homo sapiens
  SIMILAR (115)..(26): 401254mologous to Homo sapiens Human secreted protein encoded by gene 41 clone HPBCJ74,accession number W67904,Smith-Waterman Score=53.
ttagaagacccccttcttggggctagaggggctgctcacagctccctgaatgtgctgctgatggctcccttgaagaccacggcccactcccacccatggtttcctgtttctcacgccacccagcaggaaggtttctgcgtgtcttcccaccatcccctcttcttgctgtggactgttgttggcataacaacagttatgttgttgctgtggactgttgctctgccacttcctgctccctcctcctttacccttcacaggagtttcctccccataaatttcttgtgtatctagtcctgtcttggcatcagcttcttggaggacttgaactgatatgcactcaacagccagtaaatcctgttgtgagtgatggttgaggagagtcatgcaaactgttatggaaggtgggtgagactcctcccgtttcatccaagtgacatctgggcatccaggaaagccctgcaggagattacaggtgcccataggaccaactgccat

SEQ ID NO: 14710 - DNA, 1303 bp, Homo sapiens
  SIMILAR (380)..(1237): 281254mologous to Homo sapiens Ps 2=basic proline-rich protein(PRB1L precursor protein=basic proline-rich proteins (Ps, PmF, PmS, and Pe) precursor) {C-terminal},accession number S62941,Smith-Waterman Score=125.
gacggtcgcaatgaaactgattgatcaccattacgccaagcttggcacgaggtggggtggcactaacagtagatgtcattggtgaggactgatggcaaagtctcattccctcacagccgcgctgccagctcgcctccccctcgctttgctgggagcctgccctggactccaaaaggacacgggttcacctcctttcccaggctggaggggtactgcccttccctgaggggccttctgactggggcaggaactcttttcgtgtgtccagctgggcctggaggccaagtcaaggtgtgtcacaccacacaccagggcaaggacctcatctccagggaacagggacaagtgagtggctaccagaaagtcccccgggcagcctgggagttccccagagcctggctggtccttacagagcacttcttcccctggggccaccaggaccaaaggcaacctaaacactttgaaaggttaaaagcaagttgttgattgatgggttggggttggcactgggtgggagggttctggggcaccacagagccctcagcccagcagagagtggaggctcagtccgcggggagtgggggttgtgwaggagacatggcccagcccctggtcggggagataagctcccccatgtccaggccagccccaggggcmacaarcccacatggagagaggtggcaggtgaggctgacaggtgggtgcctgtggcctgggcccatgagggcaatggtcctcagtaaccaatggaaaggacacaagggcgccgtggtcaccaccacccaggcaaagaaatgggaggtggccagcacccccacccttcacttttcattattattattattattattattattattattattattatttttttttttttggagagtaggaaggcaacttcattggagcttttggggaaaaaagccttcaaagtcaccttctggcagctctggggagggtcatttggggtggactgagactgtagggcaggtagggtgtgtgccgggcagcagctgtgtccgtgcagccagcacccagcagggcagtctcacaggagccgttgtgagcactttggacttgaagcagctatgaaccaccccccgcccccaccgtctctccctctcacacacacacacacacacacacacacacccgttttaccattttctcagtgctttttctgctttcattcctttgattttagttagaagcacaagccatgatggatgtgggactcttctcaattgctctttaaattgtcactttttaaatcctattaaatgaagtgtcgattcctgac

SEQ ID NO: 14711 - DNA, 830 bp, Homo sapiens
  SIMILAR (799)..(1323): 921254mologous to Homo sapiens Polypeptide identified by the signal sequence trap method,accession number Y02377,Smith-Waterman Score=832.
ggcacgaggagactttccagtgtcaacaacaatacctcgataaccacgccaactcttagtcccagccagcagccgcttgcgacagaactgaatgtaacttcaccgagtaaagaggagtgtgggccatgcacagacacagcttatgtttcattaatcacaccaacaaaaagatcctgtggtacagattcacagtctgagaatgaggcttcaccagtaaaacggccacgactacttgagaatacggaacggtccgaggaaaccagtcgatctaaacagaagagtcgacgtcggtgctttcagtgccaaaccaaactggagctggtgcagcaagaattgggatcgtgtcgctgcggttatgtggtctgtatgttacatcgcctccccgagcagcacgaatgcacattcgaccacatgggccgtggccgggaggaagccatcatgaaaatggtgaagctggaccggaaagtggggcgctcctgccagcgcatcggggaggggtgctcctgaaggccaggcatggccaccacgtgacgctgttcttagttcactaatgttagccttatttaggacaaagtcagccagacaccttgtactgggcacgcgtcagactgcagccagtccgtttcctttctttagccagccatcctggtactgtagtttaggggttgatggtggttgaaattgatttctggctggttactaaggtgcctgctagccattgtataaaattaaaacatgaagaatattttttttttgagcatggctagtggatttaaaacaacacatacctgtcactgctggagtcaaacttataaaaagccttaagtgga

SEQ ID NO: 14712 - DNA, 860 bp, Homo sapiens
  SIMILAR (32)..(1090): 521254mologous to Homo sapiens GGA1,accession number AF218584,Smith-Waterman Score=668.
gccctcacccacctggatctgatgcggcactaggaccactgggactgctcaccctgcctgggctttcaagggaatcctgatcctgtccacccagccccagccccacctgactggtagtgatttcctaacatggggcaaccaggcccacccccacccttccccacctggcgtgcgcagttgcagctgctgaaatcctctgtgaacatgagggggcacaggtggagaaatgtaccctcaggccctcacctaccagagcaaatatcactctcggagctgggccacagccacaaaccgctgttcctaagacagaatccaaaccccactgtcccctgggacgtaatgctgcccttccccttactaaacttgctatatggtaagatgtggactgggtgtccttggacttatggggctgcatagaaacgagaatggaggccacgacatcatcctcttggcccctggaggcacgggcggctccagctgaaaggggcaggagcccgtgggcggcagcttccccagctgctgctcccagcacttctagtgattcttgttggctatgaaatgtctttttaaaaaactcccaatatagaaatctggctgcagaggccagtgtgcagaccccagccaccgcgctgtgctgccattcgccacatctggtccgtgccagatccctgcactggcgaatggcagaccagagccggcggaggcggggcactctggctgcttctcgtgaccttggatcctgtgtagaaaaggcgggtctcgttcgtggactagtcttgagtggagctaattttcaaagtgaggttactgtttctcttcttgtgtgatgagttttttcatagcaagtcaggtaaaaaacc

SEQ ID NO: 14713 - DNA, 2316 bp, Homo sapiens
  SIMILAR (107)..(379): 481254mologous to Caenorhabditis elegans coded for by C. elegans cDNA CEESS55F; coded for by C. elegans cDNA yk84a1.3; coded for by C. elegans cDNA yk78g7.3; coded for by C. elegans cDNA yk168g9.5; coded,accession number U80448,Smith-Waterman Score=202.
ttactgttgtgcccatctggggccctctctcttggagacccccttcttggggctagaggggctgctcacagctccctgaatgtgctgctgatggctcccttgaagaccacggcccactcccacccatggtttcctgtttctcacgccacccagcaggaaggtttctgcttgtcttcccaccatcccctcttcttgctgtggactgttgttggcataacaacagttatgttgttgctgtggactgttgctctgtgaagcaatcaggaaggagctgacgcagacccagttcctgtggaccagtgggcagagcacagcccactgctccctgcaggcccgcctcacacccaggccaccaaggccctctcttgccctttgcccccgtgcttgttcatcgccactgggcctctgatttcctctgaggattttcatcacgctcatgacaactatgcggtcaatatctctgtcctttaccccaaggccagtcccgcagcttcccagggcagaggctcccaacagaaagcaaggaagcggctgtttagcctggacactaactggacgagtgcctccaagtactgcagacggtctctgcacacaggcccccatctctttccagccctggcgtgcgcagttgcagctgctgaaatccttaaacttgctatatggtagatgtggactgggtgtccttggactatggggctgcatagaaacgagaatggaggccacgacatcatcctcttggcccccctccccgatgcgctggcaggagcgccccactttccggtccagcttcaccattttcatgatggcttcctcccggccacggcccatgtggtcgaatgtgcagtcgtgctgctcggggaggcgatgtaacatacagaacacataacactcgggcccccagctgtccttccctccactgggtaggtgagagaggttgagatgcccacactcggacccccagctgtccttcactccactgggtaggtgagagaggttgagatgcccacactcggacccccagctgtccttcactccactgggtaggtgagagaggttgagatgcccacactcaggcctccagctgtctttccctcccagaagcgcaggatgctgcaaggctctttttgaagcagagaaatccaagggagacactggtcttgggaagagagggtgggctggggggggtgctggaggagctgcccggccctgcatctgcaaccctacagtcccctgcccacagagcacgcagagccctcctgtgctccgggaacgagatagcagcttggcagctcggcctcgcatagccgcgctgccagctcgcctccccctcgctttgctgggagcctgccctggactccaaaaggacacgggttcacctcctttcccaggctggaggggtactgcccttccctgaggggccttctgactggggcaggaactcttttcgtgtgtccagctgggccttctatgtggtgaccagctcctccgagcgatgcccaggtcgggcacggcccgggcagggcaggtctgcagcgatgccgtggcagaggtgggcatactccatttgttttggcagctgcagccattgattctgcatatttttcctgatgagcccgtgagtatttggtagcaacttcccccatttatcttgcttcccaggggagatgcggggaagggaaccagtgagccaggaggcggccccttgcaggcgctgccgctctccctggccccaatctcgagtcctgggtgtgtgaactcagtgttgcaggccctgccgtctgggatccagtgccctctcctgtgaccccacaactgggcctgagtctccagcaactccgctggtgcatgtggggcccaaggctccatgcgctgaacatgagggaccccggccacctggagccttggcctcctcctgagcttccagggagcagacaccagcgtcagtgtgaatgtggcccagcccatgtgcagagggagaggatgccgggctgggcgtgcatgttgaagtccgtggcccagagaggcttccagagaaggtgacagctgagtaaagcccaggccgctgcctggagagtgcactgggggccgatggggctgggaaggattgaggatggcgacggtggggggtgagcaggggcggtggagggctttgctgtgcacggggaggtggaggctcttctgtgcggagaggggaggtggagggctctgctgtgcacggggaggtggaggctgtgctgggtggagggctctgagcccatcttcccttcccatttctggtgcacaggaacttggaagctgattttggcggtacaccat

SEQ ID NO: 14714 - DNA, 387 bp, Homo sapiens; identical to SEQ ID NO: 838
  SIMILAR (262)..(363): 411254mologous to Homo sapiens Human gene 70-encoded protein fragment, SEQ ID NO:428,accession number Y86513,Smith-Waterman Score=66.

SEQ ID NO: 14715 - DNA, 430 bp, Homo sapiens
  SIMILAR (352)..(417): 451254mologous to Homo sapiens Ig kappa chain V-region (V-J2- C),accession number M27031,Smith-Waterman Score=49.
  misc_feature (1)...(430): n = a,t,c or g
ntgagctggttaatcatcagagtctgacctatggcccatcgagcaagggtgggagcattctgcttccacttttcagaaaagtaagtggctttctcctccctaagacccagagttatgcaatccgcctggacctgcttggctgtgagacttttcttcaaagctccttttggacccagaaggaggcttttctcgatgcttctgagggagccaaggctaatttgattggtggtggcaaattcagagagctgagccagaattctttccgccttttttggctcagttaggaagtggaaaagcccctctgtcagggctgaaaattgctgcgcgcccagatggttcagatgctgcatgtctccgcccgcggctttcggcaccgggtcctcagtgcagtgcagacggcccatggcgcgcgccccagccccgcaggttc

SEQ ID NO: 14716 - DNA, 409 bp, Homo sapiens; identical to SEQ ID NO: 839
  SIMILAR (409)..(302): 1001254mologous to Homo sapiens Unknown (protein for IMAGE:3343149),accession number BC000628,Smith-Waterman Score=175.

SEQ ID NO: 14717 - DNA, 1990 bp, Homo sapiens
  SIMILAR (925)..(623): 371254mologous to Homo sapiens Fragment of human pre-pro- artemin polypeptide,accession number Y84598,Smith-Waterman Score= 93.
acacaaagcatttcacatgttatgctttttcctgtggcttttaacctgagtttccccggaattgctcttacaaattccaactttggaacagacccaatttcactggagacccaggatcgtcacaaaaccaggaagataatttttaaagacaagagcaagcactagctctctgcaaggtacacgactctttaatccatgcagaaagacaactggatccagaccttttcttcagaacctttttattcatcatctaaccaacagaggtggttggctcgaactcaaactaaaatggcctcaaaaggcccacctcgttacgacatgacagggcaaaaccagaagtagggacagagtttagcctcagttctctgcagagaagaccaaagcaggtatttacacacaaggtgcctcatttaaaaactgaattggcattgttccacccagccacagcacccagagtgtgcaaaaatccgtgggggctctgtatatgtgtcatttcagacaatcccgccgatccctcagccataaaccaagctcttgctttttggggagggaggggtgatcagcatggttatcttgaaatggatggcacccatttgtttacttctgggaacttttgaagggggagggtgacaactttattttctccccctgaaatctgaagatgcagtggccttgtcaagagtatctaaaaatgtggtccctggaagaacaggtgggtgggtggttgcccctaacagagagttttaccaggggtaatttgtgttgggcttcttttcagtactttaatcctgctgttttttcagaaaccctttgcacctggggccccatggagccagcagggccccatggagcattcccacaggcctgtgagtgaagtgcctctcagagcagtcaacccagggaagggaggagggcagggaacggggccaggggagatgcagggacaagaaatcagcagaaacacctccatgctggttctgactcgctccatctcgtgcaggaagctgtagaactgaggcaaggttaattctatatacacattttcggtttgatttcctttcttaaccaccaactttagttgtaaaaaatcataacttccccaactttctaccaaattcgctgctccccagatgtccactcccaaatttcccactcccatatcctatgagctggttaatcatccagagtcgtggccctatggcccagcgagcaagggcggaaagcagtatgcttacacttatcaggaaagtaagtggctgtatcctcactaagacacagagttatgaaatccgcctggacctgcttggctgtgagactcttcttcaaagcaccatttggaaccagaaggaggcttttcacgatgcttctgagggagccaagactgatctgattggtggtggcaaattcagagagctgagccagaaatctttccacctcttttggctcagttaggaagtggaaaagcacctctgtcagggctgagaactgctgcgcgcccagcataattaagctgctgcatgtcgccgcccacggcctccggcaccgggtcctcagtgcagtgcaggcgggcccatggcgcgcgccccagccccgcaggttccaccgccgccgccgccctgctcagcttcctcctccgctgccgctgccaccgctgccggcctctccgcgcatccacaaccgcactttcgccacggccgtcgcagcgcgctcctcccccggccgccctgggctgtccggagccggggagccctcgcagggccgcggacacgcgcggccgccgggctccggggaggggcaggggcggcgccggcaccggcagacgcgaggtttcctgccagctctcccgctgagtgaccaaagtttcctcaaaatagtgcgagggctttgaccggtttccctcgatgcacagatcccacagtgtcatcaccaggatattgacattgatacagtcaagacgcagaacatttccatggcagcaacgatctcccat

SEQ ID NO: 14718 - DNA, 580 bp, Homo sapiens
  SIMILAR (777)..(1208): 451254mologous to Xenopus laevis p33 ringo,accession number AJ249978,Smith-Waterman Score=251.
  misc_feature (1)...(580): n = a,t,c or g
accagcggctgctcacactccctccacaaacctgccggagtctccactcgcccgccaactgtagcctccatatgcgccccacgccnccgcacaagccccctccgtcgcgggtctcttaccttgtggcctttccccgggggacacctgacgctattggagactcctgcggtttgattcatgtccagaggaagttgaggggcccagattctctaccttcaaaacttcctaggcgcgtggagggcggcgacagaggtgcgcgcctcgggggagacgcgaggtgggtcctccttctgcagccgagtctgggcgagcgcgaggggagcctccacgctgcaggcttctgtgcaggggcggtaaaatccgcagcccagagctggagaaggagaagcagctgctgggaccccggagggaagccgggccggcgccagcggctccgagggcgctctgcccagtgctgcctccccgggaaacagttcaggacgctcaagaccagaagcgggagcaaacccaaaaggagctccaaggaggtgtgtgtggggagagccagggggacgcaggactaggctctttcctgacgaaa

SEQ ID NO: 14719 - DNA, 1551 bp, Homo sapiens
  SIMILAR (342)..(1121): 281254mologous to human herpesvirus 5 HCMVUL61,accession number X17403,Smith-Waterman Score=140.
atgggggaatcccaagagccattttgtaaggaactccacccaatagagccaaaggaccagaagagggtaaagacaggaagtgtgaggatgtgtgaaggcatcacagtgagagaaaaggctaaaagccatcttccaacattctatgtgagggtctccaaagaagctctccaaaagctccccatgagaaaaaatggtggttctgaagccaagtgtgtgagaaaagaaaaggggcaggaaaaggacctgctgttatggcagcaactggtgaaacgccgtaagccttgcatgagtttgccatgtcccgtagcctgcacgcatcgctccattaaagttaatgaagcacgtgtccgtgacagcagccagcgccagcgcccgcgggagagccccgcgcgcgcttcccgggaaagagctcctctgcaagctctggcccagggggcctcgcaatcatgggaaacagctgcacctgccagcccagccgcaaagcagggtaggatctccagccccagggtggccggcgggagcggatgcacgggcagagccctgctgctggccgcgggtctacaaaacagcacacgttctctcaacccccgcgatccgccaaccatcctcagtcaccgacccctgcaaggcatgcagacgcaccagcggctgctcacactccctccacaaacctgccggagtctccactctccggccaactgtagcctccatctgcgccccacgcccccgcacaagccccctccgtcgctggtcccttaccttgtggcctttccccgggggacacctgacgctattggagactcctgcggtttgattcatgtccagaggaagttgaggggcccagattctctaccttcaaaacttcctaggcgcgtggagggtggcgacagagccgagtctgggcgagcgcgaggggagcctccacgctgcaggcttctgtgcaggggcggtaaaatccgcagcccagagctggagaaggagaagcagctgctgggaccccggagggaagccgggccggcgccagcggctccgagggcgctctgcccagtgctgcctccccgggaaacagttcaggacgctcaagaccagaagcgggagcaaacccaaaaggagctccaaggagatttctgggtggctgtttgctgtaggaacttcattctcatttggatacatgaattgtcactgattttcagttcactcaggttcttcttgtgggtagtcacggtaacgccctggaagaactccaagtacctagagaggaacaatgaaggcctctgctgctgtgctttggaatccatggcagcgtttgcgtgcaatcacaccttcctactcctagccaataacgggagtatggcagggatactagcgcaggcctcgccctggcagatttttaatgataccaaatggaaacctcgtctttctaattggaaatatcctcatttgaagtctacaagaatgctcattacaagcaattgtaatgctgatgagaagttggaagttggaaacaacctaaatattctttaccgggagagcattgggacaaatacctaa

SEQ ID NO: 14720 - DNA, 4270 bp, Homo sapiens
  SIMILAR (900)..(1067): 371254mologous to Gallus gallus Chox-1.4 protein (AA 1- 309),accession number X52670,Smith-Waterman Score=74.
atgactgaagccattacagaagcagcagtagcctcaagtgaggaggtgtcagaggaaagagacgacctggggcctcttgaattacatgacagtggtacctttcaacaagtcgtgaaccttctggacatcattgacagcgagtcagcaaagacggacacaacaggggcaggccttgacatgcggaagaccctggcctcggtgataatcatggagaaggccaccactgagccttctgtagtgataaacactctcatccgctgcctgcaggtgccagagatttccacccagcgcaaggtcaacatttacaacatcctccaggacatcatccagcaggagggggagctggaggagcagtgcgtgcagaggctggtggccattgcctccaaggagatgagggagatcccagagatggagggctatatgaaggcagaggtggccagcgacacactggtggctctgtcccgaaaccacttcagcttggtcatgtacgagctgcagcaccacctcaagcccctcaacctcactgatgaatttgtcatcatcacactggccaagctggccaacggcaatggtaggggcttgagggccctcagccgggcccagtgtgcccttctgaagcatgcgctgagctcctactccatgcaggccttgtggcagccccaacttcctgtaatcatccctcacaacctcacagtgtttgagttcatgccatacatgggcatcaccctggctaccatattcaccatgctgagacttgccaatgaagccaagatacgccaggcgatctgcagtgccatggagaccttctgtgagacggtgcagttttatctgaagcacctggaggagagcgtgtaccccgtgatgactgaggaggagtttgccctgaaggtgttccccatgtatcgctacttcgtgacagtgtggctgaggcactacaaccccgaggtgaagctgggggtgatcaagtccctgaagcccatgctcggcctccttctgcccaacgatgacctgcgggagcaggtctacgactacatccccctgctgctggcggagtaccagggcagtctggaggacacctacccaaaatccaggatgatctcacttcgaaatcctgaactaattccatcacaaagaccctatttccaaataaggtcacattatcagattctgggcgagcctgaattttggaaggacaccggtcaactcaaggcagccttggtcttgaggcagatcctggaactgtcagtcaccaccaacacccctgtcccccaaatgcagctacacaccattttcacagaactgcacgtccaggtgtgcaacaaggccccggcccagcatcagtacagcagccagaatctgatggagatggtgcactgcttcgtagcccttgctcgctcctaccccaaggagctgatgaagttcttcttcagccagatggagacaaacaaggaggccgtccgcgtggggactctgaatctgattagggctatagtgagcgcagatgagcccaggatgagtatcagggccatctacctggctatccgggtagtcaagaacaccatctctgatacccggtccaaggtgaggatggctattctccacatcattgggcagttggctctctgtggctaccaggagagaatcaaaggctggggcctgaagtacctgtctgtgcagctgaccttatccacctacaaactgacaaatcgccgggagaagttttatcagagggacttggaggagaggatggtccacaaagtcaccatggacactgtgaagatcattacctcttctgtcagtgggatgaccaccgagttttgggtgaggctgctgtgctacatcatggagacagactacgtggaagctttgactcctatctgtatcagcctcacaaacctggcagaacaccagctccatggccaggatgtggatgtcagcgtggctggcaagagcaggcaagctcctccctttaaaaatgaggacaaagagctccaagacaaggagcaaggtgctcaggtgctacttcactggagccttggtgccctccaggtgctgatgtcatcaccttacaagggggagggtcgtgggatagccatgctcaacctcttgaggaccctgagccagagcatcgcaccctccatggccgacatgtgggagctggagattgcgctactggtccggtacctggaagaacatactgagttcacttgggatcagaaagcctgggaagacaagctgattcagtttctgcgaaactccctcaagaagacccgggggtctagctggagcctgcgcttgagtaaagagctgaacaaccagattgcgagctttgacagcccctctctggagaagggctttctgtaccgggccttgggcttcaccttggccacaggcctggaggccagcaaggtggaggtcctgctgttggagctgctgtacaagacggactacagcaatgactttgacagcgagggtgtgattatgtgctttggcctgtgtgcccggggccaggtaaaaacggtgctgaatgtgcttcatgacttcgaggagaggatccaggagtcagagcagtcctggcagatcagtgcttggcggaaggaccatccctggaggcgggagacagtgaaaagtgccctcatggtgatgtatagctgcgtggcctcctactgccacccccagttgctcctcaacctcgtggacagccccatcaccgctaagatcattcaccattatgtcagcagctgccaggacatctgtctcaaaatggccttcatgaagagtgttgtgcaggttaccaaggccatcaacaacatcaaggacctggaggactttcactttgcccagaagacgactcttaccagcattatagtggcggtcatcaaggcagaaccgactgacaacctggtttctccagtgcgagccttggcgatggaggccctctcgcacctgagcaagctgaagcctttctactccacagaggaaaacagtgagctgatggatatcagcatacattctgtaatttctctccaactcccaggagaggacaatgagtccattaagaccctgtatgcaaatgccctgagctccctggagcagctgatggagagcctcctgcagaggcagctggaccccaaggggctgcaggagatggtgcagatccacctaaagctggggcagtttggcacaatggtcggactcattgccccgtgcacctgtgatgcccatcaaagaacccgcatggcctcaatgaatgtcctgtccagcctgctagatcttcacgcaagccagacctgctccttgtggggcccttccaagcagaaggagcttgagaaatgtaagggggacctccagagcacagatgtggagaagatcttctgtgcatcctccagaatcgccaaggtggtctgcatggagtttagctgcgatgaggtggtctcgctcatccagaagctctgcgagaacactggggccatgaacctgcagcatgacaaggcctctgtcacctggatagccttcttcctccagatgcgggccaaggagctggaggacaaggtggccgagatcctgagtgccatcctggtgcacctgccggtggtggaccacccagaggtgcggcgccttctcattgacggcatcctgctgctggcgcaccaccaccaggagaccatcctcacatcgctcctgaggcagccactgcccatggagagccacctggcagaggtgtggctggcagtgtcggagaacgtgcccttcgcccggaccatgctccacagcctgatgggccggctgcagtcacggctcagccccagaatcagtgccacctccaaggctgacatctggcgcctggctgcggtggaccccctgatgaccctgtgcaccatccaccttctcattcagaagctggatgagaatgacaagctcccggacttcctccctgacctcatctacaccctcctgctgcagcttggaagcagccaccgaccagaggccgccccgccggtcttgaagatgtggaagctggtccacaccactcctctgccggaggagatgaacctgcaaagttcatgagcggcccagttctgtaccaggagaagctgctgaagccggcagctttgctgctggagaagggtgccgaccaggaggaagacgaggccctgcgggtgctgtccctgcgcgccctcggcaacatggccctgggcgcccccaagaaggtgaagcagtaccggaaggtcttgctggagaagtgcctgggccccctgagggagcccgt

SEQ ID NO: 14721 - DNA, 3013 bp, Homo sapiens
  SIMILAR (3984)..(4): 1001254mologous to Homo sapiens neuropathy target esterase,accession number AJ004832,Smith-Waterman Score=6863.
gcctgcctaggagagaaacatgggcactgtcacaccaccacaggggactgctgctgtctgaggtcagcaggccagttcacatgccacgcaaggtggctactgagccaagtcataaaaatcttccagatcatcatggaacaagtcccactcattttcaaagtctgtcagttcatcgtccccatctgccaaaagcataagcaacatctcacccagctcaaaggtgacaacctcttcttcattgttgtcaaaggggtcattgttctctctttcctcaatgagctccgagaagtggttccttcactgggcccagtatctgtttgcctgtctctgtgtatcctttctatggccatcagggaatacctgcttgtaaaaacacatcccccaagatgggcagctcccctgtccttcatcaaaatccctgcacgcctggctgctcattgcctccttgactttctggatgagtttctgcttctcttctttctcccgcctggtactcactgggaatgacaaagttagatgtgatccggcattctgggtaggacactatgatcttgctctcaacttaaggaagcagcaagggatgattttgtagttagatctgtagcagttgcttgttcgtttcagtggcttgctgtgttcacatctgcagcggcctccataaacacagtaccgtcgctgaaaatacttgcccactacgccatgtggactgtcagagagggaatgcaagtagcgacagttatgtccttccttacaaatcccatgcacaaaataccagcaggtgacctgtttagttcagctgttgctgcagctactgccactccttcttcccgtccccagggatgggggtgtgttgttctgggagctgcagcctccactgttactgtttatcccacatacccatttttggtaaaattaactgatcccatggttaagatgatatgtaggccaatatacttttatatcaattgtttctttttgctgaaagcgccaaactgcctctcctcctccatgcagctgcctcatgggggtgggaggcaccaggtgaggccccttatctcagagattgaagtggaaagagtggcacaaacctatctgggtgtgtgttatatgaagaaagaacctgaaagccaaggttggtacgctgttatggattcctggtttcctctgtgtgtgtggttgggggtaggggttggagtacctgtccatggagaataccgaacacatcgtacttttgtccagcattatgaatgtgatgactgtggcatggcttttgggcatgtgtcacaacttactggacatcagaaaatccataaggtaggggaaacccacgaatatggtgaaaatacaaggggctttaggcatcgctcatcatttacaatgctccagagaatatgtacactatataaacactttgaatgtaaccaatgtggtgaaacttttaacagaccttcaaaggttattcaacatcagagcatgcacagtggactgaagccatacaaatgtgatgtatgtcaaaaggcctttaggtttctctcatccctctctatacatcagagatttcatgttggcaacagagtaaacctgactcggcatcaaaaaactcatactcaaaggaagcccttttcctgtaacttttgtggaaaaacctttcaccgtttctcagaaaaaactcaacatctattaattcatactagaaagaaatattatacatgtaattattgcaaaaaggaattcaatccgtactccaaatttattctacatcaaagaactcatacaggagagaaaccccacaagtgtgatgtttgtgagaaatcctttaaaagcatctcaaatcttaataaacatcagaaaactcatactggagagaagcccttttcatgtaatgaatgtaaaaaaacctttgcccagcgcacggatcttgctcgccaccaacaaatccataccggaaagaagtcttttatttgcagtagttgtaaaaagacctttgtccgtctgtcagatctaacacaacataaaggaactcatacgggagagagaccttaccaatgtacgacttgtgaaaaagcctttaaatatcggtcaaactttactaaacatcagaaaactcattctatagggaggccctttgcatgtaatgaatgtggaaagacctatcgccttaactgggaacttaaccaacataaaaaaattcatactggagagaaaccctatgaatgtggtgaatgtggaaagcgttttaacaataattcaaatcttaataaacacaagaaaatccatacaggagagaaacactttgtatgtaatcaatgtggaaaagcttttagcttaaactcaaagctttctcgacatcagagaactcacaataaaaaggaaaactcctctaaaagcgtctcaaatcttaacaaacatcagaaaactcatgctggagagaagccctttccatgtaatgaatgtaagaaagcctttgcccagcgcatggatcttgctcgccaccaacaaatccatactggaaggaaaccttttatttgcagtagttgtaaaaaaacctttgtccgtctgtcagatctaacacaacataaaggaactcatacaggagagagaccttaccaatgtacaacttgtgaaaaagcctttaaatatcagtcaaactttactaaacatcagaaaacccattctatagggaggccctttacatgtaatgaatgtggaaagacctttcgccttaactggaaacttaatcaacataaaaaaattcatactggagagaaaccctatgaatgtggtgaatgtggaaaatgttttaacaataattcaaatcttagtaaacacaagaaaatccatacaggagagaaacactttgtatgtaatcaatgtggaaaagcttttagcttaaactcaaagctttctcgacatcagataactcacaataaaaagaaaccctaaaaaaagaggaaggtgaagaaggatatttagagatgacttaccctttgctaaactcgagatcaatgtagaa

SEQ ID NO: 14722 - DNA, 818 bp, Homo sapiens
  SIMILAR (587)..(450): 541254mologous to Homo sapiens Human secreted protein, SEQ ID NO: 7077,accession number G02996,Smith-Waterman Score=110.
atggaagaagagttgttaagagagttgctctattctgaaaactggtggagcataccctacaatgacaccatacaggagttatgctgttgggctgttttgaagaggacattcattaatggaaataccagtaggaagccagggatgaagatggtaacgggccttaaaaagcaagaaaggagaagtaagcaatggggctgtgaaaaagaggctaagtttgtaccagacatgtggattgtactggaagtagggaggcctgaggaaaggggcatagatggaaagagatggggaaaaagctgttctgtggagcagtcagtctgggccttccaaaacccaatttggagtaaggcccagactctcttgaattctatgaaggctatgagaaaggtaaggaaggtgtagaagaaaagtttgaagctaggagaagttggttcatgaggaaaaaggcaataagccatctccataacatggaaatgcaaggtgaagcagcaagtgctgatgtagaagctgcagtaagttatccagaagatctagctaagatcattgatgaaagtgactacactaaacagtggatttcaaatgtagacaaaacagtcttctattggaagaagatgccatctagaactttcatagctacagaagagaagtcaatgcctggcttcaaagcttcaaaggacagcctgactcccttgttagggactaatgcagctggtggcttttagttaaagccactgctcacttatcattcccaaacttctagagcccttaagaactatgctaagttaactctgcttatgctttataaatggaacaaataaaac

SEQ ID NO: 14723 - DNA, 724 bp, Homo sapiens
  SIMILAR (149)..(859): 321254mologous to Homo sapiens proline-rich protein G1,accession number X07881,Smith-Waterman Score=156.
  misc_feature (1)...(724): n = a,t,c or g
accgggaagggaacgtggaaccaggaaatcacagggaaaggctccctaccatccagaactcagaatttnctccaaaaggaaatatttaaaaaatcagaaacatataccatatgaaaaagtagccaaaacaatctgcaaaaactatctggacttccactgcccgccctgaagatgtggttacttgttcatttaaagaggaatttctcccaggaaatacacatcatgacttcagtattaagaaccgtagcgatcctgaattagaagtcagccgtccgttagcaaggccggagaattttccagcaaaccgatctcactccctgcttgaactgcgccatgtcgggggcgttgggcagcacactggacaggctgtagttccctgctggatgcttcctcggctcctcgaacagatcagccgagcttatggaggaacttgccgacagcctctctaggcgggccctggtctcataatcagcctgggattgtcttccaaaatacatatctgatgaaatggccttgacattgccaaacttcttctgggcctcatctgtattttcagctggctcataatcatggcttgcggcgagcagtaggtctgtctgaatagcctgtggttttcagaactgtttcagtatctttgctggtctcttttttccaataggaatctgaactgtcatcccagctagagaaagaactgctccttaactccactggctcgtcaaagtac

SEQ ID NO: 14724 - DNA, 1136 bp, Homo sapiens
  SIMILAR (980)..(1135): 711254mologous to Homo sapiens ADAMTS7, alternatively spliced product,accession number AL359934,Smith-Waterman Score=177.
ccgctgcttggtcctcctgcctccagtcttggctgctgctcacccctctcctcactcttcccacagggatctttcagaacacagtcatctgggtactgggtttgccgcagctgtggccagggcagtgatgagacagtgtctgctgtgtgtgtgcagggaactacagcctgtccagtgtgctgcccaacgcccccgacatggcgcagttcaagataagtcatcgtaagtcgaggtttttggtgtgacattgatgaacgtttgaattgtggtgactgtaggtggacgtggatttagcgtgcgtgcggggcctgctgtgcagttgtgatgaatttttgagctggcttgcccttaaccgcactgtccttgccacaccagccctcccctcctgcttgtcacagatggcatcctcccttccaggcctctgcgcaagaacaaggagaggagaaagggctgactcccagcgagggacttgtgcctttttctccccagccagaactgcgtcccaggcccccctagttgcaagctcagtcaggaagcagagggtctgggcacccaacccactaaactgccacactctgccaccctccaggggcagtcagaggggaggctacattggagaggaaggtgtctttgggtctcgggtggtgggcatctgggtgccaggcccaaatggatccccatggcccctaggtgtgcagaggcagagtgtgtactgctcggagtgggcagcggctcctcagccacgagctcttcagcgaggctgacttcatctcacgcctcctggccccaagcccttcacctgcgccagccagcatggcaatgccattgaggaggaggccccagagctgggcccactggggcgcgtgtttgtagatgacttccactacgactacaatttcattcatctccacgaggatctgtgctatgggcccttagaggggcctgacctagacctggcagggacaggggatcggacgcccccactgcacagccgtccaagggccagcctgagcccctcagccctgaggtgcccctgagctctgggcttctgtccacgctagcttggggcagccccaacagcagcagcagagttcctgaggcccagcccccggcccccagcctggctgagacggggc

SEQ ID NO: 14725 - DNA, 1599 bp, Homo sapiens
  SIMILAR (256)..(3021): 861254mologous to Homo sapiens DNA (cytosine-5-)- methyltransferase,accession number X63692,Smith-Waterman Score= 4108.
ggcggcaggaaagcagctgttggtgtggagacaaggccccaaggctctgcccagcccacctggctccccgtgcatggggacacctgcacgacactcctgcttccctgccgggcctggtggcggctggggggccttccctgggcagcctcggtggtgggtgccaagtgtgtctggaccccacctgagcgtggccttctcatgcttcacaaacccatgcctggttggtcgtctgggtacagagtggtcctgcccgccgtggctttcttccggctgagggcccaggtgaccaagctcggcgaagaggtgagcctgcgcttcctgaagagggaggccaagctgtgcggcttcctgcagaagagcttcctggccctggagaagagaatgaaggcctcggagagctcacggctgaagctggagggcagcctgcggggcgagctggagagccggtgggagaagcttcgggggctgatggaggagcgcctgcgggccctgcaggggcagcatgaggagagccacctcctggagcagtgccagggcctggatgctgccgtggcccagctgaccaagtttgtgcagcagaaccaggcgtcgctgaaccgtgtcctactggccgaggagaaagcctgggacgccaaggggcgcttggaggaaagccgggctggggagctggccgcctatgtgcaggagaacctggaggccgcacagctggctggcgagctggcccggcaggagatgcatggagagctggtgctgctccgagagaagagccgggctctggaggcatccgtggcgcagctggccgggcagttaaaggagctgagtggccatctcccggctctgagcagccggctcgatctgcaggagcagatgctgggcctcaggctgtccgaggcaaagaccgaatgggaaggtgcagagaggaagtccctggaggacctggccaggtggcggaaggaggtgaccgaacacctgcgaggggtgcgggagaaggtggatggcctcccccagcagatagagagtgtctccgacaagtgcctgcttcataagagcgactcagacctcaggatttccgccgaaggcaaggccagggagttcaaggttggggccctgcggcaggagctggccacgctactatcatccgtgcagctgctaaaggaagacaaccctgggcggaagatcgcggagatgcagggcaagctggccacgaaccaaataatgaagctggaaaactgcgtccaggccaacaagaccatccagaacctcaggttcaacactgaggcccggctgcgcacgcaggagatggccaccctgtgggagagtgtgctccggctgtggagtgaggagggcccgcggacgccgctgggcagctggaaggcgctcccatccctggtgaggccgcgggtcttcatcaaggacatggcgcctggcaaggtggtgcccatgaactgctggggcgtgtaccaggctgtgaggtggctgcgctggaaggcgtccctcataaagctcagggccctgcggaggccaggaggggtcctggagaagccccacagccaggagcaggtgcagcagctcacaccctcactgtttatccagaaataa

SEQ ID NO: 14726 - DNA, 3217 bp, Homo sapiens
  SIMILAR (2923)..(110): 1001254mologous to Homo sapiens inositol polyphosphate 4- phosphatase,accession number U26398,Smith-Waterman Score=4856.
aaagaacacaaaataaaccaatccttcagtctcctgaagaattcatatatgacactagaggtacccacatttattatgtaacagctaattagaggaaaccgtgtgttcacgtttcaacttttccgtaagtcccttcgggaggcctgtaatgcttggggaaagccttcagctgcagggaattaaatgcatatttgcgacttccaacattcttcattgtattttctcttcgacaaccctcactgcgcatgcactccagggcctgggtgaagacctgcggggccatgccatgctcgtgttgcaggatcaggcactgctccagtgtcaccgacatggctgtacggtccttagcgctcttgcagctggtgaaccggaccccattaaggcggcggcagatctcagcagcttgccagagaatgtcgacgttcttattcttccgggcatgcacgttctgacccagaaaccgcagcagctctggcaggcacgtctgactgcgagaccgaggcaggcaatcctcaggcaaaacttccttaaactgctcaaagtaggaatttaaccgcaccaaactctccacgttgatgacttcttgtaaagacgtatcgccaaacctctcggccagtgtctgctgctcattgatgcccacgttgaagaggacgggctgcactcgcagcagcatgccactctggatctcccggggcaaggcgtcaaacagcgggcccggcagagggacccgcacgttaaacccgtcgcgatttcctgtgatgacgggcagcatgtctgcggaggcgctggaagtggcctgagtgactttgaaggtcacgttcctcaagtccatgatcccaaggctcatgtcctccagcattgccagctcctccccgtaggtgctcagcaggctctcgaactgggccagcagcccgatggtgtagagctggcgcaggaagccgtcgtcatgcaggcagttcctcagcttaatgatgaagccgcagatgagggcggtcagcgtctggcagaagaccacgtcacggcggtactgcaggctcaggtaggtggctatggtgggcgcgctgtcctgcatgagcaggaataccatggccttcttggccttgtcactcatcatggccacgcagtcggtgagagtggtcagcagcgggtaaagggcctcactccattcacctgggctggactcttcaggagggggactgcaatctttcttgctggtgcagctgcctgcacaggggaagacatcctcacagccctcgccatgcagccgctccttctgcagcagcttgtccacacgctgaatgatgcactctaggctcttgtccacgttcagccacactttctcccactcctcctcgtgccagtccacctgcagggaagatcggctgtttctccctgtccaccgggccatgagggtgtcctggtcatttctaagcatcacctgctcctcctcagtcgaagtgggagaggccttggaggcaatgtagtcaggccgtgcagcgttcagcccatggatggagttggccaggagcttgcagtcgcagaccgtgaccagctgccgtgtcttgtctgccaagatggcgagtgtcctctcaaggccagtggcagacctgtccttggctgcccttgacagccgctctgcgtagtaactcacttgggttttcagggtgttgatctgggcgatgatctccttggctctgacaacatcctggggtatgtagattatggactggcagccagatgatgtacaacactcctcaaaatgtttcttggtctcttcaaatttgtgcagctttttgcggagacctcctgacttaaaaccttggcagtgtgctgctggcgccccaatggtgacgatgtcgtagttctgatctgatcctccatcgtcttgaactctcatcctttgtatgtgcaagtttgtgggaacaaattctaactttttatctgctttcaaactgcttgctttaaacgagggccctctgtactgatggaggtcggtcaggttctcctggtatgtgaggatgatggtctggtactgggtgacaatttggcgccggaggctctcccagcaaggggacagctctcccagctcctccagctcacacactctggctgcatcttcctctagtaggagcttcacgaactgccggggcacgtgcagggagagcacgctctctgccatctgctccaggatccgcaaatggttaccatcagtggttggaaaccggtacatgcggcagatggcaccaccgaacaccgatttcagcaaagtgtcctttcgcaatgaagcgtatttggatcggattcctaacgcctccgtcaagctctcatcgacaggaagaaccatcctcccattgacagtgtccacagaccgggtcacagggggccgttggtctgacttctcctccatctgccagccaatcacggtgatgttacctacacggtcactctctgcagaccttagtgttaaatgcaacctatgatgcctgtcctggagcagatctttgacaatgaacgttccagagcccagtaaatacattgttccctgagatctatctttgacatcatacacggagagtttgacttgtgtcatctgattgataagagagtcttgaaagaaggcaatactgcttagaaatataggattgttggttccctcaatgatctccgtctgtgcatgcttcgtccagaatgcctgaggaggggtggtgacactcaccgcaacaaaactatttggctttcgatctagcgatggagtatgcagctcactgcaagctaagctaaattctaaaatgggctcatctgggtcttgtatatttcctgccagagagaggcccagcatgtcggccgccacgtcgatggtggaagcccgctgcattgcacgggccctggcaccatggcgagggctgtgctctcttgctgtcatgatgtcattggtgatgatgtgcttcttgatcctcggtcagaccacgtctgattacccgggaagtgctggcaccgagccctagtcactaaagtgagtagcctggacatgtttgctctcggaccatgtggcatttcttcatagaagcatgtccaaatccatcatctggcgctccccggcccccgccagcccccgctgtcccgccggctggcgcgccagagccccgcagcagcagcagcgacgcgcgcgcctggctgtgaagtcggcctgcggcccggcctcaggtgctggtcctcg

SEQ ID NO: 14727 - DNA, 1446 bp, Homo sapiens
  SIMILAR (1341)..(1051): 981254mologous to Homo sapiens Secreted protein CC198_1,accession number W70321,Smith-Waterman Score=513.
tcaaggcccctcactctcaatgtatggaatgtcatggtacttgatgttattgcatgcccattgctgcaaggcatcacacaagatatcctgagacaggcggtgtgcatattccaagatcacagtattggtccctggaggttccttcacttcctctttgacattaactggagaagccatcctaggtagacatctctcttctggcataaagggttcttcactctcatgctgcttctcaccttcatatatggtaggaaatgggaaagtttgctttgatttcatgcagcccatgttatgaagagctgaggatttctctccatttgccagttctgtgtttccttcttgggctttacccacacagttttctagttgcagacctgttgtgcacctcattcggagtttaggaggctggtttggagcctgttgccttagctctgtggggtgatgatgggaatagtgaaaaagagggtgacaaaagcagagagtctcaaagaggggacagaactcagtgactgaccagtttggttgatggttggaaagaggtgtcagatacatctgagctcccaagaatggtggtactttagaagggcctagggtgatggagctaatgcagaactccttgtaacctcttaaggtgtagtggctggcactgaggttggggctgtgaccatggtgagaggtgctccgggtctgggtgtgcctctcagtcttgtagatggcttgggcatgagggagggagggactgacaggaagcaggaagactccatgtgtttggcatggccgcttacttggagaatggcagtgccattgctgagatggagaagaccgggggcagagcaggctggacacagcaacagcgagcatcccagaaaattgggcatcacttgaagggctgggtgtctcatccggtttcctttttctgagcatgctgcatatcacatgggaatctatggcaccatcttgaccagaagcatggcctgcagtcctgaggagagaagtcaaggctattttccaggcccaacctgcaagtacctgttcacactggcctggaccacagagccagatacttaacaggaccaagaaagcagggtcatctctggcccactggtccttcgtctgttttcgataatgaaaatttctgtaaactctctgtggggatgtgaacaggtagagcatctgccaggcagcaaattcaaagtccatttgccgaaagcggaaaagccttctcagatatttgtagcgtttcgctccggctgtgtgtcttgccgcatccctggaattcaagactccgttcccctgcactaaggaattcactgaagtactcggtaacatcttccgccgcggcccgccggaagttgttgccgctggcttccggtcccctgagactggggcctcgctcgctcccgacccggttgcaagtgttgcggtgggagaaagtcgcgtccgcat

SEQ ID NO: 14728 - DNA, 678 bp, Homo sapiens
  SIMILAR (227)..(307): 401254mologous to Mus musculus SPR2D protein,accession number AJ005562,Smith-Waterman Score=68.
atggcatcagacctggtgaaccgctgtgaagcatgtgaccttccacagggtcccatctctgtgcatcagtttcctcgcctgtcaaatgaagttacgactactgttggaaggaattcagagtctcccaatcagaggagtgtgagtggaccctggactcccagggaagtgaggagaggtgtggctgcagctgctcatggcttctcaggacagaatgcaaagtgggcggcccacatcccagccacagcaatgtcctttgccttgccgtacagtgttttgcattcaccccatgccctcaccacccaccccctcaacccaggggatgcagtgacgatgccatcatggacttcaacagtgtctgctgccaatgcaagcaagggacgtagtttctcacaatgtttccaatccacagaagagggtcaagagaggaggagaccaagaacttctcaggccaaggttcaacaaggaagcactgcagggaaagtgaacgagctcatcactctggctggacacataaaaagtcaggccccacatgggaaacgcaagcctccaccaaggaccttcctggagagagggttctatggcttcagctactcggctgtgttgctggttgttcagcgttccgtgtttggtgagggaggacccccactggcagtcctccatgggcctcttccacagtga

SEQ ID NO: 14729 - DNA, 2353 bp, Homo sapiens
  SIMILAR (752)..(3937): 881254mologous to Homo sapiens DNA (cytosine-5-)- methyltransferase,accession number X63692,Smith-Waterman Score= 4848.
  misc_feature (1)...(2353): n = a,t,c or g
atggcatcagacctggtgaaccgctgtgaagcatgtgaccttccacagggtcccatctctgtgcatcagtttcctcgcctgtcaaatgaagttacgactactgttggaaggaattcagagtctcccaatcagaggagtgtgagtggaccctggactcccagggaagtgaggagaggtgtggctgcagctgctcatggcttctcaggacagaatgcaaagtgggcggcccacatcccagccacagcaatgtcctttgccttgccgtacagtgttttgcattcaccccatgccctcaccacccaccccctcaacccaggggatgcagtgacgatgccatcatggacttcaacagtgtctgctgccaatgcaagcaagggacgtagtttctcacaatgtttccaatccacagaagagggtcaagagaggaggagaccaagaacttctcaggccaaggttcaacaaggaagcactgcagggaaagtgaacgagctcatcactctggctggacacataaaaagtcaggccccacatgggaaacgcaagcctccaccaagagattcccatgtgatatgcagcatgctcagaaaaaggaaaccggatgagacacccagcccttcaagtgatgcccaattttctgggatgctcgctgttgctgtgtccagcctgctctgcccccggtcttctccatctcagcaatggcactgccattctccaagtaccaccattcttgggagctcagatgtatctgacacctctttccaaccatcaaccaaactgggccctgtgcatggcttcccaccccagtcacgtgactgcattctggactttgagctcatcaggaaagtaactggggcttggtcttccctgactgcaggatcatgggaaacaaagatacaggaattttcagaggaagacatccttgctccacacaggatcacaccaggtccacattcctccaagtctcctgttcacttcctggcctctctgtggggcaggaagaccaagctgtaccaccacaccattcaggacaaagagccaagaagcgtgcctgaagcaggcagctcagggagacgggacggcgggggagctgcacacagcatgctgtgcatggccccagagccagaccatccgggctccaaccccaactgccgctcacccgccacgctacacgctgatgctgatggcaatctgcaaagagaggctgccaaatgtcagggtgatggcacccaggtctccacccatgtggaccatacttctgctccacggcaggcagaaacaggcccagccacaggagagaacgagaaaatggagtcacatgggagatcaaaaagaggccttgttggagcagaccaatgcccagctgaaactcttgattcctacaccctccttgtggggcacaaaaagagggacaaggacagacagaccccagggccagctccacaagtcaattcctttgtgcctgaaaactacctgctgcgtggaccactggcaccgttaggcagtgcaatttccatgaaaaccgcgggcgccgtccacatccgccccagcggggaccttggacgcgcccccgcgcccgctgtccgtccccggccccggcccccgcggcggccgcgtcgcctcctgcccggcccggcccacctacctggcgctccccggcccccggcgccagccccgctgtcccgccgggctgcgcgccagagccccgcagcagcagcagcgccgccgcctggctgtgaagtcgcgggctgcgggcccggcctcaggtgctggtcctcctgccccggcccacggagcccgacccggcggcaaaccagcagcgaaccctccacgcgcgccgcagccctagccagccgccgccgctctagacgccgggcgcagccccgccctggccccgcccccttgtcgcgcatgcgcgctgagggcccggcccgcgccctgcgacccccgccccactaccagcccgagctgggtccgccctctgagacagtagggccggtgaccgagctgctcgcgccaattcctactgctaggttccccacaagatcccacccctatcctgtgactgcttcacctgcaaggagttcttgaacttctggacttgactgagcgatggcatcttcaccctgtcatccactgaggcatctgaggccctgacggatccccaagggaaagtttcctgggaggagccgcgacccggggatgcgcccccaaccttttgccctccggacaagagcacttcctgaagtgcagacgtacttcattgcccagggagattgtttaggaaattgaacatttccaaccagacaagcaaaaaattaaaatcttaattctttgaaaatacanccttctcaaa

SEQ ID NO: 14730 - DNA, 455 bp, Homo sapiens; identical to SEQ ID NO: 5095
  SIMILAR (111)..(299): 461254mologous to Rattus norvegicus L1 retroposon, a portion of its ORF2 sequence,accession number X61295,Smith-Waterman Score= 186.
  misc_feature (1)...(455): n = a,t,c or g

SEQ ID NO: 14731 - DNA, 359 bp, Homo sapiens
  SIMILAR (1)..(153): 861254mologous to Homo sapiens reverse transcriptase,accession number L27428,Smith-Waterman Score=232.
  misc_feature (1)...(359): n = a,t,c or g
attcaggacataggcatgggcaaggacttcatgactaaaacaccaaaagcaatggcaacaaaagccgaaattgacaaatgggatctaattcaactaaagagcttctgcacattaaaagaaattaccatcagagtgaacaggcaaactacagaaaatctacccatctgacaaagggctaatatccagaatgctacctaatttttaaagactttttccggcatcttgaaaaaaaccaccattatttgacataggtaaaactgaaaaaacaaactattcataattacaatttgtgacacattatgtagtagctaggttcatcacataaattacatgntaccccagttcaagttaaatttcag

SEQ ID NO: 14732 - DNA, 2025 bp, Homo sapiens; identical to SEQ ID NO: 5416
  SIMILAR (550)..(2007): 941254mologous to Homo sapiens putative p150,accession number U93572,Smith-Waterman Score=2397.

SEQ ID NO: 14733 - DNA, 3570 bp, Homo sapiens; identical to SEQ ID NO: 2157
  SIMILAR (1866)..(2120): 421254mologous to Plasmodium lophurae histidine-rich protein,accession number X01469,Smith-Waterman Score=242.

SEQ ID NO: 14734 - DNA, 1380 bp, Homo sapiens
  SIMILAR (181)..(1365): 941254mologous to Homo sapiens putative p150,accession number U93563,Smith-Waterman Score=1968.
atggataaattcctcgacacatacaccctcccaagaataaaccaggaagaacttgaatctctgaatagaccaataacagcctctgaaattgtggcaataatcaatagcttatcaagcaaaaagagtccaggaccagatggattcacagctgaattctactggagtgttggaagtgctggccaggcaatcaggcaggagaaggaaataaagggtattcaattaggaaaagaggaagtcaaattgtccctgtttgcagatgacatgattgtatatttagaaaaccccattgtctcagccccaaatctccttaagctgataagcaacttcagcaaagtctcaggatacaaaatcaatgtacaaaaatcacaagcattcttatacaccaataacagacaaacggagagccaaatcatgagtgaactcccattcacaattgcttcaaagagaataaaatacctaggaatccaacttataagggatgtgaaggacctcttcaaggagaactacaaaccactgctcaaggaaataaaagaggatacaaacaaatggaagaacattccatgctcatgggtaggaagaatcaatatcgtgaaaatggccatactgcccaaggtaatttacagattcaatgccatccccatcaagctaccaatgactttcttcacaatattggaaaaaaatactttaaagttcatatggaaccaaaaaagagcccgcattgccaagtcaatcctaaaccaaaagaacaaagctggaggcatcacactacctgacttcaaactatactacaaggctacagtaaccaaaacaacatggtactggcaccaaaacagagatatagatcaatggaacagaacagagccctcagaaataacgcctcatatctacaactatctgatctttgacaaacctgagaaaaacaagcaatggggaaaggattccctatttaataaatggtgctgggaaaactggctagccatatgtagaaagctgaaactggatctcttccttacaccttatacaaaaattaattcaagatggattaaagacttaaaggttagacctaaaaccataaaaaccctagaagaaaacctaggcattaccattcagcacataggcatgggcaaggacttcatgtctaaaacaccaaaagcaatggcaacaaaagccaaaattgacaaatgggatctaattaaactaaagagcttctgcacagcaaaagaaactaccatcagagtgaacagggaacctacagaatgggagaaaattttcgcaacctactcatctgacaaagggctaatatccagaatctacaatgaactcaaacaaatttacaagaaaaaacaaacaactccatcaaaaagtgggcgaaggacatga

SEQ ID NO: 14735 - DNA, 2745 bp, Homo sapiens; identical to SEQ ID NO: 5617
  SIMILAR (931)..(1362): 991254mologous to Escherichia coli K12 frv operon protein,accession number AE000465,Smith-Waterman Score=747.

SEQ ID NO: 14736 - DNA, 1698 bp, Homo sapiens
  SIMILAR (1933)..(311): 1001254mologous to Homo sapiens UDP-Galactose ceramide galactosyl transferase,accession number U30930,Smith-Waterman Score =2867.
atggaagatgaaatgaatgaaatgaagcaagaagggaagtttagagaaaaaagaataaaaagaaacgaacaaagcctccaagaaatatgggactatgtgaaaagaccaaatctgcgtctgattggtgtacctgaaagtgacggggagaatggaaccaagttggaaaacactctgcaggatattatccaggagaacttccccaatctagcaaggcagaccaacattcagattcaggaaatacaaagaatgccacaaagatactcctcgagaagagcaactccaagacacataattgtcagattcaccaaagttgaaatgaaggaaaaaatgtcaagggcagccagagagaaagaaatacaaactaccatcagagaatactacaaacacctctacgcaaataaactagaaaatctagaagaaatggataaattcctcgacacatgcactctcccaagactaaaccaggaagaagttgaatctctgaatagaacagtaacaggatctgaaattgtggcaataatcaatagcttaccaaccaaaaagagtccaggaccagatggattcacagccgaattctaccagagacaatcagagagccaaatcatgagtgaattcccattcacaattgcttcaaagagaataaaatacctaggaatccaacttacaagggatgtgaaggatctcttcaaggagaactacaaaccactgctcaatgaaattaaagaggatacaaagaaatggaagaacattccatgctcatgggtaggaagaatcaatatcgtgaaaatggccatactgcccaaggtaatttatacattcaatgccatccccatcaagctaccaatgactttcttcacagaattggaaaaaactactttcaagttcatatggaatcaaaaaagagcccacgtcgccaagtcaatcctaagccaaaagaacaaagctggaggcatcacgctacctgacttcaaactatactacaaggctacagtaaccaaaacagcatggtactggtaccaaaacagagatatagatcaatggaacagaacagagccctcagaaataatgctgcatatctacagctatctgatctttgacaaacctgagaaaaacaagcaatggggaaaggattccctatttaataaatggtgctgggaaaactggctagccatatgtagaaagctgaaactggatcccttccttacaccttatacaaaaattaattcaagatggattaaagacttaaacattagacctaaaaccatagaaaccctagaagaaaacctaggcattaccattcaggacataggcatgggcaaggacttcatgtctaaaacatcaaaagcaatgtcaacaaaagccaaaattgacaaatgggatctaattaaactaaagagcttctgcacagcaaaagaaactaccatcaaagtgaacaggcaacctacaaaatgggagaaaattttcgcaacctactcatctgacaaagggctaatatccagaatctacaatgaactcaaacaaatttacaagaaaaaaaacaaacaaccccatcaaaaagtgggtgaaggatatgaacagacacttctcaaaagaagacatctatgcagccaaaagacacatgaaaaaatgctcatcatcactggccatcagagaaatgcaaatcaaaaccacaatgagataccatctcacaccagttag

SEQ ID NO: 14737 - DNA, 1596 bp, Homo sapiens
  SIMILAR (31)..(1593): 941254mologous to Homo sapiens putative p150,accession number U93574,Smith-Waterman Score=2608.
atgatcaagtgggcttcatccctgggatgcaatatatgcaaatcaataaatgtaatccagcatataaacagaaccaaagacaaaaaccacatgattatctcaatagatgcagaaaagacctttgacaaaattcaacaacccttcatgctaaaaactctcaataaattaggtattgatgggacatatctcaaaataataagagctatctatgacaaacccacagccaatatcatactgaatgggcaaaaactggaagtattccctttgaaaactgccacaagacagggatgccctctctcaccactcctattcaacatagtgttggaagttctggccagggcaattaggcaggagaaggaaataaagggtattcaattaggaaaagaggaagtcaaattgtccctgtttgcagaagacatgattgtatatctagaaaaccccattatctcagcccaaaatctccttaagctgataagcaacttcagcaaagtctcaggatacaaaatcaatgtacaaaaatcacaagcattcttatacaccaataacagacaaacagagagccaaatcatgagtgaactcccattcacaactgcttcaaagagaataaaatacttaggaatccaacttacaagggacgtgaaggacctcttcaaggagaactacaaaccactgctcaatgaaataaaagaggatacaaagaaatggaagaacattccatgctcatgggtaggaagaatcagtatcgtgaaaatggccatactgcccaaggtaatttacagattcaatgccatccccatcaagctaccaatgactttcttcacagaattggaaaaaactactttaaagttcatatggaaccaaaaaacagcccgcaacaccaagtcaatcctaagccaaaagaacaaagctggaggcattatgctacctgacttcaaactatactacaaggctacagtaaccaaaacagcatggcactggtaccaaaacagagacatagataaatggaacagaacagagccctcagaaataacgccgcatatctacaactatctgatctttgacaaacctgagaaaaacaagcaatggggaaaggattccctatttaataaatggtgctgggaaaactggctagccgtatgtagaaagctgaaactggatcccttccttacaccttatacaaaaattaattcaagatggattaaagacttaaacgttagacccaaaaccataaaaaccctagaagaaaacctaggcattaccattcagaacttaggcatgggcaaggacttcatgtctaaaacaccaaaagcaatggcaacaaaagccaaaattgacaaatgggatctaattaaactaaagagcttctgcacagcaaaagaaaccaccatcagcgtgaacaggcaacctacaaaatgggagaaaattttcgcaacctactcatctgacaaagggctaatatccagaatctacaatgaactcaaacaaatttacaagaaaaaaacaaacaaccccatcaaaaagtgggcaaaggatatgaacagacacttctcaaaagaagacatttatgcagccaaaagacacatgaaaaaatgctaa

SEQ ID NO: 14738 - DNA, 2760 bp, Homo sapiens; identical to SEQ ID NO: 7859
  SIMILAR (799)..(1992): 901254mologous to Homo sapiens putative p150,accession number U93563,Smith-Waterman Score=1908.

SEQ ID NO: 14739 - DNA, 3267 bp, Homo sapiens; identical to SEQ ID NO: 14594
  SIMILAR (1084)..(2460): 931254mologous to Homo sapiens putative p150,accession number U93564,Smith-Waterman Score=2255.

SEQ ID NO: 14740 - DNA, 1193 bp, Homo sapiens
  SIMILAR (118)..(984): 891254mologous to Homo sapiens putative p150,accession number U93564,Smith-Waterman Score=1417.
atgcagaaacaggagggggctttagtgaggaaaaaggggagaaagaaagaaagaattactgcaagaggaagagtaagagcaaaaggagaaaattggaaaattttaaacatgtatagagtaaagttcatatggaaccaaaaaagagcccgcattgccaagtcaatcctaagccaaaagaacaaagctgcaggcatcaccctacctgacttcaaactatactacaaggctacagtaaccaaaatagcatggtactggtaccaaaacagagatatggaccaatggaacagaatagagccctcagaaataatgccacacatctacaactatctgatctttgacaatcctgacaaaagcaagaaatggggaaaggattccctatttaataaatggtgctgggaaaactggctagccatatggagaaagctgaaactggatcccttccttacaccttatacaaaaattaattcaagatggattaaagacttaaatgttagacctaaaaccataaaaaccctagaagaaaacctaggcaataccattcagaacataggcatgggccaggactacatgtctaaaacaccaaaagcaatggcaacaaaagccaaaattgacaaatgggatctaattaaactaaagagcttctgcacagcaaaagaaactaccatcagagtgaacaggcaacctacagaatgggagaaaatttttgcaatctactcatctgacaaagggctaatatccagaatttacaatgaaccccaacaaatttacaagaaaaaaacaagcaaccccatcaacaagtgggcgaaggatatgaacagacacttctcaaaagaagacatgtatgcagccaaaagacacgtgaaaaaatgctcatcatcactagccatcagagaaatgcaaatcaaaaccacaatgagataccatctcacaccagttagaatggcgatcattaaaaagtcaggaaacaacagggattgcggagatcagtgccactatcaaggacttgaaaggtgcaggggtggtgattcccaccacatccctgttcaactcttccgtttggcctgtgaagaagatggaccttggagaatgacagtggattaccataagcttaaccaagtggtgactccaattacagctgctgtaccagatgtggttttattgcttgagcaaattaacacatctcctggtacctg

SEQ ID NO: 14741 - DNA, 2307 bp, Homo sapiens
  SIMILAR (1168)..(2478): 851254mologous to Homo sapiens putative p150,accession number U93565,Smith-Waterman Score=1954.
atcaacaaaattgatagaccactagcaagactaataaagaagaaaagagagaagaatcaaatagatgcaataaaaaatgataaaggggatatcaccaccaatcccacagaaatacaaactaccatcagagaatattataaacacctctacgcaaataaactagaaaatctagaagaaatggataaattcctcgacacatacatcctcccaagactaaaccaggaagaagttgaacctctgaatagaccaataacaggctctgaaattgaggaaataatcaatagcttaccaaccaaaaaaactccaggaccagatggattcacagccgaattctaccagaggtacaaagaggagctggtaccaatccttctgaaactattccaatcaatagaaaaagagggaatcctccctaactcattttatgaggccagcatcatcctgataccaaagcctgacagagacacaaccaaaaaagagaatttcagaccaatatccctgatgaacatcgatgtaaaaatcctcaataaaatactggcaaaccgaatccagcagcacatcaaaaagcttatccaccatgatcaagtgggcttcatccctgggatgcaaggctggttcaacatacgcaaatcaataaatgtaatccagcatataaacagaaccaaagacaaaaaccacatgattatctcaatagatgcagaaaaggcctttgacaaaattcaacaacccttcatgctaaaaactctcaataaattaggtattgatgggacgtatctcaaaataataagagctatctatgacaaacccacagccgatatcatactgaatgggcaaaaactggaagcattctctttgaaaactggcacaagacagggatgccctctctcaccactcctattcaacatagtgttggaagttctggccagggcagtcaggcaggagaaggaaataaagggcattcgattaggaaaagaggaagtcaaattgtccctgcttgcagatgacatgattgtatatctagaaaaccccatcgtctcagccccaaatctcctcaagctgataagcaacttcagcaaaagaataaaatacctaggaatccaacttacaagggatgtgaaggacctcttcaagaagaactacaaaccactgctcaatgaaataaaagaggatacaaacaagtggaagaacattccatgctcatgggtaggaagaatcaatatcgtgaaaatggccatactgcccaaggtaatttatagattcaatgccatcccaatcaagctaccaatgactttcttcacagaattggaaaaaactactttaaagttcatatggaaccaaaaaagagcctgcatcgccaagtcaatcctaaaccaaaagaacaaagctggaggcatcatgctacctgacttcaaactatactacaaggctacaggaaccaaaacagcatggtactggtaccaaaacagagatatagatcaatggaacagaacacagccctcagaaataatgccacatatctacaactatctgatctttgacaaacctgacaaaaacaagaaatggggaaaggattccctatttaataaatggtgctgggaaaactggctagccatatgtagaaagctgaaactggatcccttccttacaccttatacaaaaattaattcaagatggattaaagacttaaacgttagccctaaaaccataaaaaccctagaagaaaacctaggcaataccattcaggacataggcatgggcaaggacgtcatgtctaaaacaccaaaagcaatggcaacaaaagccaaaattgacaaatgggatctaattaaactaaagagcttctgcacagcaaaagaaacgaccatcagagtgaacaggcaacctacagaatgggagaaaatttttgcaacctactcatctgacaaagggctaatattcagaatctacaatgaactcaaacaaatttacaagaaaaaaacaaacaacctcatcaaaaagtgggcgaagaacatgaacagacacttctcaaaagaagacatttatgcagccaaaaaacacatgaaaaaatgctcatcatcactggccatcagagaaatgcaaatcaaaaccacaatgagataccatctcacaccagttggaatggcaatcattaaaaagtcaggaaacaacagtctaagtaaccagatgtacagaatacaaaagatgcaggtacaagcccaaattcaagcttacaatgtgattacaaataataattataataacaatggcattcagctacgggacctgacactgaagatacctactgaatag

SEQ ID NO: 14742 - DNA, 3099 bp, Homo sapiens; identical to SEQ ID NO: 13948
  SIMILAR (574)..(1962): 951254mologous to Homo sapiens putative p150,accession number U93563,Smith-Waterman Score=2340.

SEQ ID NO: 14743 - DNA, 3095 bp, Homo sapiens
  SIMILAR (946)..(2256): 951254mologous to Homo sapiens putative p150,accession number U93574,Smith-Waterman Score=2181.
atgggagactttaacaccccactgtcaacattagacagatcaacgaggcagaaagtcaaaaaggataaccaggaattaaactcagctctgcaccaagtggacctaatagacatctacagaactctccaccccaaatcaacagaatatacatttttttcagcaccacaccacacctattccaaaattgaccacatagttggaagtaaagctctcctcagcaattgtaaaagaacagaaattataacaagctatctctcagaccacagtgcaatcaaactagaactcaggattaagaatctcactcaaaaccgctcaactacatggaaactgaacaacctgctcctgaatgactactgggtacataacgaaatgaaggcagaaataaagatgttctttgaaaccaacgagaacaaagacacaacataccagaatctctgggacgcattcaaagcagtgtgtagagggaaatttatagcactaaatgcccacaagagaaagcaggaaagatccaaaattgacaccctaacatcacaattaaaagaactagaaaagcaagagcaaacacattcaaaagctagcagaaggcaagaaataactaaaatcagagcagaactgaaggaaatagagacacaaaaaaccctgcaaaaaattaatgaatccaggagctggttttttgaaaggatcaacaaaattgatagaccgctagcaagactaataaagaaaaaaagagagaagaatcaaatagacgcaataaaaaatgataaaggggataccaccaacgatcccacagaaacacaaactaccatcagagaatactacaaacacctctatgcaaataaactagaaaatctagaagaaatggataaattcctcgacacatacactctcccaagactaaaccaggaagaagttgaatatctgaatagaccaataacaggatctgaaattgtggcaataatcaatagcttaccaaccaaaaagagtccaggaccagatggattcacagccgaattctaccagaggtacaaggaggaactggtaccattccttctgaaactattccaatcaatagaaaaagagggaatcctccctaactcattttatgaggccagcatcattctgataccaaagccaggcagagacacaacaaaaaaagagaattttagaccaatatccttgatgaacatggatgcaaaaatcctcaataaaatactggcaaaccgaatccagcagcatatcaaaaagcttatccaccatgatcaagtgggcttcatccctgggatgcaaggctggttcaatatacgcaaatcaagaaatgtaatccagcatataaacagagccaaagacaaaaaccacatgattttctcaatagatgcagaaaagccctttgacaaaattcaacaacctttcatgctaaaaactctcaataaattaggtattgatgggacgtatttcaaaataataagagctatctatgacaaacccacagccaatatcatactgaatgggcaaaaactggaagcattccctttgaaaactggcacaagacagggatgccctctctcaccactcctattcaacatagtgctggaagttctggccagggcaattaggcaggagaaggaaataaagggtattcaattaggaaaagaagaagtcaaattgtccctgtttgcagacgacatgattgtatatctagaaaaccccattgtctcagcccaaatcttctttaagctgataagcaacttcagcaaagtctcaggaaacaaaatcaatgtacaaaaatcacaagcattcttatacaccaacaacaggcaaacagagagccaaatcatgagtcaactcccatacacaattgcttcaaagagaataaaatacctaggaatccaacttacaagggatgtgaaagacctcttcaaggagaactacaaaccactgctcaaggaaataaaagaggacacaaacaaatggaagaacattccatgctcatgggtaggaagaatcaatatcgtgaaaatggccatactgcccaaggtaatttacagattcaatgccatccccatcaagctaccaatgactttcttcacagaattggaaaaaactaccttaaagttcatatggaaccaaaaaagagcccacatcgccaagtcaatcctaagccaaaagaacaaagctggaggcatcacactacctgacttcaaactatactacaaggctacagtagccaaaacagcatggtactggtaccaaaacagagatatagatcaatggaacagaacagagccctcagaaataacgccacatatctacaactatctgatctttgacaaacctgagaaaaacaagcaatggggaaaggattccctatttaataaatggtgctgggaaaactggctaaccatatgtagaaagctgaaactggatcccttccttacaccttatacaaaaatcaattcaagatggattaaagacttaaacgttagacctaaaaccataaaaaccctagaagaaaacctaggcattaccattcaggacataggcatgggcaaggacttcatgtctaaaacaccaaaagcaatggcaacaaaagacaaaattgacaaacgggatctaattaaactaaagagcttctgcacagcaaaagaaactaccatcagagtgaacaggcaacctacaaaatgggagaaaattttcgcaacctactcatctgacaaagggctaatatccagaatctacaatgaactcaaacaaatttacaagaaaaaaacaaacaaccccatcaaaaagtgggcaaaggacatgaacagacacttctcaaaagaagacatttatgcagccaaaaaacacatgaaaaaatgctcatcatcactggccatcagagaaatgcaaatcaaaaccacaatgagataccatctcacaccagttagaatggcaatcattaaaaagtcaggaaacaacagctattcagctagtgggttttctattatgacggtaaaagtgccctttacactggcgtccaaggtgtgtccttctaaatctttccttttgcaagtcttcccagactcacagtgtaatgaaggcgataaagatgaaag

SEQ ID NO: 14744 - DNA, 3657 bp, Homo sapiens; identical to SEQ ID NO: 6045
  SIMILAR (793)..(2076): 941254mologous to Homo sapiens putative p150,accession number U93569,Smith-Waterman Score=2160.

SEQ ID NO: 14745 - DNA, 3192 bp, Homo sapiens; identical to SEQ ID NO: 3969
  SIMILAR (827)..(880): 611254mologous to Gallus gallus collagen type III,accession number X00822,Smith-Waterman Score=50.

SEQ ID NO: 14746 - DNA, 2067 bp, Homo sapiens
  SIMILAR (700)..(1794): 931254mologous to Homo sapiens putative p150,accession number U93572,Smith-Waterman Score=1835.
atgatcagagcagaactgaaggagatagagacacaaaaaacccttcaaaaaatcaatgaacccaggagctggtttttggaaaagatcaacaaaattgatagaccactagcaagactaataaagaagaaaagagagaagaaccaattaaatgcaataaaaaatgataaaggggatatcaccactgatcccacagaaatacaaactaccatcagagaatactataaacacctctatgcaaataaactagaaaatcttgaagaaatggataaattcctggacacatacaccttcccaagactaaaccaggaagaagttgaatccctgaatagaccaataacaggctctgaaattgaggcaataattaatagcttaccaaccaaaaaaaagtccaggaccagatggattcacagccgaattctaccagaggtacaaggaggagctgatgcagaaaaggcctttgacaaaattcaacagcccttcatgctaaaaactctcaataaattaggtattgaagggaagtatctcaaaataataagagctatttatgacaaacccacagctaacatcatactcaacgggcaaaaactgaaagcattccctttgaaaactggcataagacagggatgccctctctcaccactcctattcaacatagtgttggaagttctcaccagggaaatcagggaagagaaagaaatgaagggtattcaattaggaaaagaggaagtcaaattgtccctgtttgcagatgacatgattgtatctctagaaaaccccatcgtctcagcccaaaatctccttatgcagataagcaacttcagcaaagtctcaggatacaaaatcaatgtacaaaaatcacaagcattcttatacaccaataacagacaaacagagagccaaatcatgagtgaactcccattcacaattgctacaaagaaaataaaatacccaggaatccaacttacaagggatgtgaaggtcctcttcaaggagaactacaaaccactgctcaatgaaataaaagaggatacaaatgaatggaagaacattccatgctcatggataggaagaatcaatatcgtgaaaatggccatactgcccaaggtaatttatagattcaatgccatcaccatcaagctaccaatgactttattcaaagaatttgaaaaaactactttcaagttcatatggaaccacaaaagagccagcattcccaagtcaatcctaagccaaaagaacaaagctggaggcatcaagccacctgacttcaaaaaatactacaaggctacagtaaccaaaacagcatgggactggtaccaaaacagagttatagaacaatggaatagaatggagccctcagaaataatgccacacatctacaactatctgatctttgaccaacctgacaaaaacaagcaagggggaaaggattccctatttaataaacggtgctgggaaaactggctaaccatatgtagaaagctgaaactggatcccttccttacaccttatacaaaaatcaattcaagatggattaaagacttaaacgttagacctaaaaccataaaaaccctagaagaaaacctaggcaataccattcaggacataggcatgggcaaggacttcatgtctaaatcaccaaaagcaatggcaacaaaagccaaaattgacaaatgggatctaattaaactaaagagcttctgcacagcaaaagaaactaccatcggagtgaacaggcagcctacagaatgggagaaaatttttgcaatctactcatctgacaaagggttaatatccagaatctacaatgaagtcaaacaaatttacaagaagaaaacaaacaaccccatcaaaaagtgggcaaaggatatgaatagacacttctcaaaagaagacatttatgcagccaaaagacacatgaaaaaatgctcatcgtcactggccatcagagaaatgcaactcaaaaccagaatgagatatcatctcacaccagttagaatggtaatcattaaaaagtcaggaaacaacagagacatggatgaaattgaaaatcatcattctcagtaa

SEQ ID NO: 14747 - DNA, 3093 bp, Homo sapiens
  SIMILAR (1009)..(2544): 921254mologous to Homo sapiens putative p150,accession number U93572,Smith-Waterman Score=2525.
atggaagatgaaatgaatgaaatgaagcgagaagggaagtttagagaaaaaggaataaaaagaaacgagcaaagcctccaagaaatatgggactatgtgaaaagaccaaatctacatctgattggtgtacctgaaagtgacggggagaatggaaccaagttggaaaacactctgcaggatattatccaggagaacttccccaatctagcaaggcaggccaacgttcagattcaggaaatacagagaacgccacaaagatactcctcgagaagagcaactccaagacacgtaattgtcagattcaccaaagttgaaatgaaggaaaaaatgttaagaacagccagagagaaagaaacagaaactaccatcagagaatactataaacacctctatgcaaataaactagaaaatctagaagaaatggataaattccttgacacatacactctcccaagactaaaccaggaagaagctgaatctctgaatagaccaataacaggatctgaaattgtggcaataatcaatagcttaccaaccaaaaagagtccaggaccagatggattcacagccgaattctaccagaggtacaaggaggaactggtaccattccttctgaaactattccaatcaatagaaaaagagggaatcttccctaactcattttatgaggccagcatcatcctgataccaaagctgggcagagacacaaccaaaaaagagaattttagaccaatatccttgatgaacattgatgcaaaaatcctcaataaaatactggcaaaccaaatccagcagcacatcaaaaagcttatccaccatgatcaagtgggcttcatccctgggatgcaaggctggttcaatatacacaaatcaataaatgtaatccagcatataaacagaatcaaagacaaaaaccacatgattatctcaatagatgcagaaaaggcctttgacaaaattcaacaatgcttcatgctaaaaactctcaataaattaggtattgatgggatgtatttcaaaataataagagctatctatgacaaacccacagccaatatcatactgaatgggcaaaaactggaagcattccctttgaaaactggcacaagacagggatgccctctctcaccactcctattcaacatagtgttggaaggtctggccagggcaattagtcaggagaaggaaataaagggtattcaattaggaaaagaggaagtcaaattgttcctgtttgcagacgacatgattgtatatctagaaaaccccattgtctcagcccaaaatctccttaagctgataagcaacttcagcaaagtctcaggatacaaaatcaatgtacaaaagtcacaagcattcttatacaccaacaacagacaaacacagagccaaatcatgagtgaactcccattcacaattgcttcaaagagaataaaatacctaggaatccaacttataagggatgtgaaggacctcttcaaggagaactacaaaccactgctcaaggaaataaaagaggatacaaacaaatggaagaacattccatgctcatgggtaggaagaatcaatatcgtgaaaatggccatactgcccaaggtaatttacagattcaatgctatccccatcaagctaccaatgactttcttcacagaattggaaaaaactactttaaagttcatatgggaccaaaaaagagcccgcatcgtcaagtctatcctaagccaaaagaacaaagctggaggcatcacgttacctgacttcaaactatactacaaggctacagtaaccaaaacagcatggtactggtgccaaaacagagatatagatcaatggaacagaacagagccctcagaaataaggccgcatatctacaagtatctgatctttgacaaacctgagaaaaacaagcaatggggaaaggattccctatttaataaatggtgctgggaaaactggctagccatatgtagaaagctgaaactggatcccttccttacaccttatacaaaaattaattcaagatggattaaagacttaaatgttagacctaaaaccataaaaaccctagaagaaaacctaggcattaccattcaggacataggcatgggcaaggacttcatgtctaaaacaccaaaagcaatggcaacaaaagccaaaattggcaaatgggatctaattaaactaaagagcttctgcacagcaaaagaaactaccatcagagtgaataggcaacctacaaaatgggagaaaattttcgcaacctactcatctgacaaagggctaatatccagaatctacaatgaactcaaacaaatttacaagaaaaaaacaaacaaccccatcaaaaaatgggcgaaggacatgaacagacacttctcaaaagaagacatttatgcagccaaaaaacacatgaaaaaatgctcaccatcactggccatcagagaaatgcaaatcaaaaccacaatgagataccatctcacaccagttagaatggcaatcattaaaaagtcaggaaacaacagcctgatgtggtggagagatttgacgagactgagactctggttgaagagagaggcaatcccaggagaggggcggaaagcggcaaaagttaatgcgggagtcggagagaagggcatctacacagcaagcagcaggggcggcccgccatctgcgcgctcgaaggcggtcacggtggtcgcggaaggggcggcgtccagatcctggctttccatggatgcgcccgagctgggcccggggctggtggagcgtctggagcagctggcgacgtgtcctctgtgcgggggctccttcgaggacccggtgcttctggcgtgcgagcacagcttctgccgcgcgtgtctggcccgccgctgggggactccgccggcgaccggcaccgaggcttcccccaccgcctgtccctgctgcggcctgccgtgtccccgccgcagcctgaggtctaatgtgcggctggcggtggaggtgcgaatcagccgcgagctgcgagagaagctggctgagcctggggcccgtgcggggagacgccgaggggggcgcatccccaccatgggctgcctggacctgcccggagag

SEQ ID NO: 14748 - DNA, 3195 bp, Homo sapiens
  SIMILAR (1108)..(2328): 921254mologous to Homo sapiens putative p150,accession number U93574,Smith-Waterman Score=1956.
atggagctgaaaaccaaggctcaagaactacgtgaagaatgcagaagcctcaggagccaatgcgatcaactggaagaaagggtatcagcgatggaagatgaaatgaatgaaatgaagcgagaagggaagtttagagaaaaaagaataaaaagaaacgaacaaagcctccaagaaatacgggactatgtgaaaagaccaaatctacgtctgattggtgtacctgaaagtgacagggagaatggaaccaagctggaaaacactctgcagaatattatccaggagaacttccccaatctagcaaggcaggccaacgttcagattcaggaaatacagagaacgccacaaagatactccttgagaagagcaactccaagacacacaattgtcagattcaccaaagttgaaatgaaggaaaaaatgttaagggcagccagagagaaaggtcgggttaccctcaaagggaagcccatcagactaaagcggatctctcggcagaaactctacaagccagaagagatgtgtagagggaaatttacagcactaaatgcccacgagagaaagcaggaaagatccaaaattgacaccctaacatcacaattaaaagaactagaaaagcaagagcaaacacattcaaaagctagcagaaggcaagaaataactaaaatcagagcagaactgaaggaaatagagacacaaaaaacccttcaaaaaattaatgaatccgggagctggttttttgaaaggatcaacaaaattgatagaccgctagcaagactaataaagaaaaaaagagagaagaataaaatagatgcaataaaaaatgataaaggggatatcaccactgatcccacagaaatacaaactaccatcagagaatactacaaacacctctacgcaaataaactagaaaatcgagaagaaatggataaattcctcaacacatacactctcccaagactaaaccaggaaaaagttgaatctctgaatagaccaataacaggagctgaaattgtggcaataatcaatagcttaccaaccaaaaagagtccaggaccagatggattcacagccgaattctaccagaggtacaaggaggaactggtgccattccttctgaaactattccaatcaacagaaaaagagggaatcctccctaactcatttgatgaagccagcatcatcctgataccaaagcccagcagagacacaaccaaaaaagagaattttagaccagtatccttgatgaacattgatgcaaaaagcctcaataaaacactggcaaaccgaatccagcagcacatcaaaaagcttatccaccatgatcaagtgggcttcatccctgggatgcaaggctggttcaatatacacaaatctataaatgtaatccagcatataaacagaaccaaagacaaaaaccacataattatctcaatagatgcagaaaaggcctttgataaaattcaacaacacttcatgctaaaaactctcaataaattaggtattgatgggacgtatctcaaaataataagagctatctatgacaaacccacagccaatatcatactgaatgggcaaaaactggaagcattccctttgaaaactggcacaagacagggatgccctgtctcaccactcctattcaacatagtgttggaacttctggccacggcaattaggcagaaggaaataaagcgtattcaattaggaaaagaggaagtcaaattgtccctgtttgcagacgacatgactgtatatctagaaaaccccactgtctcagcccaaaatctccttaacctgataagcaacttcagcaaagtctcaggatacaaaatcaatgtacaaaaatcacaagcattcttatacaccaataacagacaaacagagagccaaatcatgagtgaactcccattcacaattgcttcaaagagaataaaatacctaggaatccaccttacaagggacgtgaaggacctcttcaaggaaaactataaaccactgctcaatgaaataaaagaggatacaaagaaatggaagaacattccatgctcatgggtaggaagaatcaatatcgtgaaaatggccatactgcccaaggtaatttatagattcaatgccatccccatcaagctgccaatgactttcttcacagaattggaaaaaactactttaaagttcatatggaaccaaaaaagagcccgcatcgccaagtcaatcctaagccaaaagaacaaagctggaggcatcatgctacctgacttcaaactatactacaaggctacagtaaccaaaacagcatggtactggtaccaaaacagagatatagatcaatggaacagaacagagccctcagaaacaacgccatatatctacaactatctgatctttgacaaacctgagaaaaacaagcaatggggaaaggattccctattcaataaatggtgctgggaaaactggctagccatatgtagaaagctgaaactggatcccttccttacaccttatacaaaaatcaattcaagatggattaaagacttaaacgttagacctaaaaccataaaaaccctagaagaaaacctaggctttaccattcaggacataggcatgggcaaggacttcatgtgtaaaacaccaaaagcaatggcaacaaaagccaaaattgacaaatgggatctaatgaaactaaagagcttctgcacagcaaaagaaactaccatcagagtgaacaggcaacccacaaaatgggagaaaattttcacaacctactcatctgacaaagggctaatatccagaatctacaatgaactcaaacaaatttacaagaaaaaaacaaacaaccccatcaaaaagtgggcaaaggacatgaacagacacttctcaaaagaagacatttatgcagccaaaaaacacatgaaaaaatgctcatcatcactggccatcagagaaatgcaaatcaaaaccacaatgagatatcatctcacaccagttagaatggcaatcatgaaaaagtcaggaaacaacaggtgcctgcattcaatgcctccagccctgcatgctgggagccacagaggtttcatggacacatatttatttattcaaggtcagcccttcaaccctttaggcctttactgccctgtgccatctcatgaagttgtgaactacggccctcctaagaagtcagcacaattcagcagctga

SEQ ID NO: 14749 - DNA, 3213 bp, Homo sapiens; identical to SEQ ID NO: 2322
  SIMILAR (979)..(2166): 881254mologous to Homo sapiens putative p150,accession number U93563,Smith-Waterman Score=1863.

SEQ ID NO: 14750 - DNA, 3147 bp, Homo sapiens; identical to SEQ ID NO: 10229
  SIMILAR (1)..(1821): 851254mologous to Homo sapiens putative p150,accession number U93563,Smith-Waterman Score=2589.

SEQ ID NO: 14751 - DNA, 1336 bp, Homo sapiens
  SIMILAR (154)..(1068): 891254mologous to Homo sapiens ORF2 contains a reverse transcriptase domain.; ORF2,accession number M80341,Smith-Waterman Score=1460.
atggcaacacgactgtcgggtgatggatcactttccgatgagggtgctgtgcaggccgccagctgtgccagtgcagactcccgatcagcatggctgcaccgctccccactaacccacacttgccggaacagggaaccaggaaacatcacacctcggattcaatgccatccccatcaagctacgaatgactttcttcacagaactggaaaaactactttaaagttcatatggaaccaaaaaagagcccgcatcaccaagtccatcctaagccaaaagaacaaagctggaggcatcacactacctgacttcaaactatactacaaggctatagtaaccaaaacagtgtggtactggtaccaaaacagagatatagaccaatggaacagaacagagccctcagaaataatgccacatatctacaactatctgatctttgacaaacctgacaaaaacaagaaatggggaaaggattccctatttaataaatggtgctgggaaaactggctagccatatatagaaagctgaaactggatcccttccttacatcttatacaaaaattaattcaagatggattaaagacttaaatgttagacctaaaaccataaaaaccctagaagaaaacctaggcaataccattcaggacataggcatgggcaaggacttcatgtctaaaacaccaaaagcaatggcaacaaaagacaaaattgacaaatgggatctaattgaactaaagagcttctgcacagcaaaagaaactaccatcagagtgaacaggcaacctacagaatgggagaaaatttttgcaacctactcatctgacaaagggctaatatccagaatctacaatgaactcaaacaaatttacaagaaaaaaacaaacaaccccatcaaaaagtgggtgaaggatatgaacagacacttctcaaaagaagacatttatgcagccaaaagacacatgaaaaaacgctcatcatcactggccatcagagaaatgcaaatcaaagccacaatgagataccatctcacaccagttagaatggcaatcattaaaaagtcaggaaacagcagtagaagcaacatcgttcattcagttactcaggcaaatgccttggaatcatcctggattcctctgttcctcattccccacatccaatacatcagcaaaccacaagcctcttccttcaaaatgtatcacgtcactgaccccattttaccgccttcttcccaacacctagaccaagctgccatcatcaacctctgcctgcaatggcctctgctgtggtttgaatgtatgtgtccctccaaaattcatatgctgaaactcacaccccaag

SEQ ID NO: 14752 - DNA, 3156 bp, Homo sapiens; identical to SEQ ID NO: 10078
  SIMILAR (353)..(466): 971254mologous to Homo sapiens brain myo-inositol monophosphatase A2b; IMPase A2b,accession number AF200432,Smith- Waterman Score=186.

SEQ ID NO: 14753 - DNA, 2745 bp, Homo sapiens; identical to SEQ ID NO: 14522
  SIMILAR (359)..(2497): 971254mologous to Homo sapiens threonyl-tRNA synthetase,accession number M63180,Smith-Waterman Score=3718.

SEQ ID NO: 14754 - DNA, 2001 bp, Homo sapiens
  SIMILAR (412)..(1323): 251254mologous to Dictyostelium discoideum interaptin,accession number AF057019,Smith-Waterman Score=168.
atgtcttctgccttcaggaaaaccacaatccagttgaaaaatcacgattacgcactcgataagttagatgattacacgctttgtaacttagctccaaattcaaggctaacaatgacaataagtggcactcagcaaggaacagaaagtttgactcgggtagtccagaacagggagaagctaaacagaggcgggatagttcaggaagaatcagaggcagagcaagtgttatgtagtgctaacaagctccttccccggcaaatgaagggcagtgatactcaccagacgcgactgactagaaaaagacaatgggaatctgacgttttggaaagatctccaaacatcagagcacaaacagaaagagctttttggttgcctcttcacaaaggatcagaaatacaaactaccatcagagaatactataaacacctctatgcaaatcaacttgaaaatctagaagaaatggataaattcctcgacacacacactctcccaagactaaaccaggaagaagttgaatctctgaataggccaataacaggctctgaaattgaggcaataattaatagcttaccaaccaaaaaaagtccaggaccagatggattcacagccgaattctaccagaggtacaaggaggagctgagaataaaatacctaggaatccaacttacaagggatgtgaaggacctcttcaaggagaactacaaaccagtgctcaatgaaatcaaagaggatacaaacaaatggaagaacattccatgctcattggtaggaagagtcaatattgtgaaaatggccatactgcccaaggtaatttatagattcaatgccatccccatcaagctaccaatgactttcttcacagaattggaaaaaactactttaaagttcgtatggaaccaaaaaagagcccgcactgccaagtcaatcctaagaaaaaagaacaaagctggaggcatcatgctacctgacttcaaactatactacaaagctacagtaacaaaaacagcatggtactcctaccaaaacagagatatagaccaatggaacagaacagagacctcagaaataatgccgcatatctacaactatctgatctttgacaaacctgacaaaaagaagaaatggggaaaggattccctatttaataaatggtgctgggaaaactggctagccatatgtagaaagctgaaactggatcccttccttacaccttatacaaaaagtaattcaagatggattaaagacttacatgttagacctaaaaccataaaaaccctagaagaaaacctaggcattaccattcaggacataggcatgggcaaggacttcatgtctaaaacaccaaaagcaatggcaacaaaagccaaaattgacaaatgggatctcattaaactaaagagcttctgtacagcaaaagaaaccaccatcagagtgaacaggcaacctacagaatgggagaaaatgtttgcaacctactcatctgacaaaggactaatatccagaatctacaatgaactcaaacagatttacaagaaaaaaacaaacaatcccatcaaaaagtgggtgaaggatatgaacagacccttctcaaaagaagacatttatgcagccaaaaaacacatgaaaaaatgttcatcatcactggccatcagagaaatgcaaatcaaaaccacaatgagacaccatctcacaccagttagaatggcgatcattaaaaagtcaggaaacaacagtaaggataatcaagatgatgtagaagcaaagcccatcatcaaactggcattgagtccctatcaggttaaagcctcaactaagctctcagaaattcccttaaaaaatatgactgttgacaggtcacttgatgtagaactgagatcctgctcacctttcaaggctcaagtttcatccccatgtgaagctttctatgctcacagcagcccacgtgctgatctcttctttctcagagcattgtgtctcctggtgcccccaatccgaacttaa

SEQ ID NO: 14755 - DNA, 3033 bp, Homo sapiens; identical to SEQ ID NO: 3983
  SIMILAR (346)..(1437): 711254mologous to Homo sapiens BC273239_1,accession number AC007204,Smith-Waterman Score=1427.

SEQ ID NO: 14756 - DNA, 2622 bp, Homo sapiens
  SIMILAR (1049)..(486): 261254mologous to Sus scrofa gastric mucin,accession number U10281,Smith-Waterman Score=104.
atgagaacaaagacacaacataccagaatctcttgggacgcattcaaagcagtgtgtagagggaaatttatagcactaaatgcccacaagagaaagcaggaaagatccaaaattgacaccctaacatcacaattaaaagaactagaaaagcaagagcaaacacattcaaaagctagcagaaggcaagaaataactaaaatcagagcagaactgaaggaaatagagacacaaaaatcccttcaaaaaattaatgaatccaggagctggttttttgaaaggatcaacaatattgatagaccgctagcaagactaataaagaaaaaaagagagaagaatcaaatagacacaataaaaaatgataaaggggatatcaccaccgatcccacagaaatacaaactaccatcagagaatactacaaacacctctatgctaataaactaaaaaatctagaagaaatggataaattcctcgacacatacaccctcccaagactaaaccaggaagaagttgaatctctgaatagaccaataacaggatctgaaattgtgacaataatcaatagcttaccaaccaaaaagagtccaggaccagatggattcacagccgaattctaccagaggtacaaggaggaactggtaccattccttctgaaactattccaatcaatagaaaaagagggaatcctccctaactcattttatgaggccagcatcattctgataccaaagccaggcagagacacaaccaaaaaagagaattttagaccaatatccttgatgaacattgatgcaaaaatcctcaataaaatactggcaaaccgaatccagcagcacatcaaaaagcttatccaccatgatcaagtgggcttcatccctgggatgcaaggctggttcaatatacgcaaatcaataaatgtaatccagcatgtaaacagagccaaagacaaaaaccacatgattatctcaatagatgcagaaaaagactttgacaaaattcaacaacccttcatgctaaaaactctcaataaattaggtattgatgggacgtatctgaaaataataagagctatctatgacaaacccacagccaatatcatactgaatgggcaaaaactggaagcattccctttgaaaactggcacaagacagggatgccctctctcaccactcctattcaacatagtggtggaagttctggccagcgcaattaggcaggagaaggaaataaaggcccaaaatctccttaagctgataagcaacttcagcaaagtctcaggatacaaaatcaatgtacaaaaatcacaagcattcttatacaccaataacagacaaacagagagccaaatcatgagtgaactcccattcataattgcttcaaagagaataaaatacctaggaatccaacttacaagggacgtgaaggacctcttcaaggagaactacaaaccactgatcaaggaaataaaagaggatacaaacaaacggaagaacattccatgctcacgggtaggaagaatcaatatcgtgaaaatggccatactgcccaaggtaatttacagattcaatgccatccccatcaagctaccaatgactttcttcacagaattggaaaaaactactttaaagttcatatggaaccaaaaaagagcccacatcgccaagtcaatcctaagccaaaagaacaaagctgggggcatcacactacctgacttcaaactatactacaaggctacagtaaccaaaacagcatggtactcgtaccaaaacagagatatagatcaatggaacagaacagagccctcagaaataacgccacatatctacaactatctgatctttgacaaacctgagaaaaacaagcaatggggaaaggattccctatttaataaatggggctgggaaaactggctagccatatggagaaagctgaaactggatcccttccttacaccttatacaaaaatcaattcaagatggattaaagacttaaacgttagacctaaaaccataaaaaccctagaagaaaacctaggcattaccattcaggacataggcatgggcaaggacttcatgtctaaaacaccaaaagcaatggcaacaaaagacaaaattgacaaatgggatctaatgaaactaaagagcttctgcacagcaaaagaaactaccatcagagtgaacaggcaacctacagaatgggagaaaatttttgcaacctactcatctgacaaagggctaatatccagaatccacaatgaactcaaacaaatttacaagaaaaaaacaaacaaccccaacaaaacgtgggcgaaggacatgaacagacacttctcaaaagaagacatttatgcagccaaaaaacacatgaaaaaatgctcatcatcactggccatcagagaaatgcaaatcaaaaccacaatgagataccatctcacaccagttagaatggcagtcattaaaaagtcaggaaacaacagggacatggatgaaactggaaaccatcattctcagcaaactgtcacaaggacaaaaaaccaaacaccgcatattctcactcatacgtgggaactgaacaatgagatcacatggacacaggaaggagaatatcacactctggggactgtg

SEQ ID NO: 14757 - DNA, 3831 bp, Homo sapiens; identical to SEQ ID NO: 10111
  SIMILAR (1795)..(2616): 821254mologous to Homo sapiens putative p150,accession number U93564,Smith-Waterman Score=1100.

SEQ ID NO: 14758 - DNA, 4137 bp, Homo sapiens
  SIMILAR (52)..(198): 821254mologous to Homo sapiens vasopressin activated calcium mobilizing receptor-like protein,accession number X81882,Smith- Waterman Score=204.
atgaggaaaaaacagagcagaaaaactggaaactctaaaaagcagagcacctctcctcctccaaaggaacgcagttcctcaccagcaatggaacaaagctggacggagaatgactttgacgagttgagagaagaaggtttcagacgatcaaactactccaagctacaggaggaaattgaaaccaaaggccaagaagttgaaaacttggaaaaaaatttagacaaatgtataactagaataaccaatatagagaagtgcttaaaggagctgatggagctgaaagccaaggctcgagaactacatgaagaatgcagaagcctcaggagccgatgcgatcaactggaagaaagggtatcagtaatggaagatgaaatgaatgaaatgaagcaagaagggaagtttagagaaaaaagaataaaaagaaatgaacaaagcctccaagaaatatgggactatgtgaaaagaccaaatctacctccgattgatgtacctgaaagtgacagggagaatggaaccaagttggaaaacactctgcaggatgttatccaggagaacttccccaacctagcaaggcaggccaacattcagattcaggaaatacagagaatgccacaaagatactcctcgagaagagcaactccaagacacataattgtcagattcaccaaagttgaaatgaaggaaaaaatgttgagggcagccagagagaaagcattcaagcaggcctcccggagagaagatgacattgccaaggtaaccagtggcatgagagttttattcaagccaggaaccacagaggtacaggagctggccctttgctatggtggaatggccaacagaaccatctcagccctcaagaccactcagaggcagctttccaagctctggaaggaggagctgctgcaggacgtgtgtgcaggactggcagaggagctgcatctgcctcccgatgcccctggtggcatggtggacttccggtgcaccctcaccctcagcttcttcttcaagttctacctgacagtccttcagaagctgggccaagagaacctggaagacaagtgtggtaaactggaccccactttcgccagtgcaactttactgtttcagaaagaccccccagccgatgtccagctcttccaagaggtgcccaagggtcagtctgaggaggacatggtgggccggcccctgccccacctggcagcggacatgcagcctctggtgaggccgtgtactgtgacgacattcctcgctacgagaatgagctgtctctccggctggtcaccagcacccgggcccacgccaagatcaagcatcgagatgaagttcaagaatatgctgtttcctatgattgtctgcccagcctggatccctgagctgaattcggtagaacatggacccgacggtatctcctttggagctgcttgccccctgagcattgtggaaaaaaccctggtggatgctgttgctaagcttcctgcccaaaagacagaggtgttcagaggggtcctggagcagctgcgctggtttgctgggaagcaagtcaagtctgtggcgtccgttggagggaacatcatcactgccagccccatctccgacctcaaccccgtgttcatggccagtggggccaagctgacacttgtgtccagaggtgagctgcctgaagcagaggtccaggaagaaggacttgggggagaaaagtctcaccagataggtcattttctggagaaacagagctcaaagttcagtgacccagctttccctgtgatttggatccagggaagcatggagaatgtacctggtttggtggacgggaaagctggatattttctctgtagagaattcacagcaggaactgctacctgcatgccttacctagtggggcaccaggagaactgtccagatggaccacaccttcttccctggctacagaaagaccctgctgagcccggaggagatactgctctccatagagatcccctacagcagggagaaatacaaactaccatcagagaatactacaaacacctctccgcaaataaactagaaaatctagaagaaatggataaattcctcgacacatacactctcccaagactaaaccagaaagaagttgaatctctgaatagaccaataacaggagctgaaattgtgccaataatcaacagcttaccaaccaaaaagagttcaggactagatggattcacagccgaattctaccagaggtacaaggaggaactgcatataaacagaaccaaagacaaaaaccacatgattatctcaatagatgcagaaaaggcctttgacaaaattcaacaacccttcatgctaaaaactctcaataaattaggtattgatgggacgtatctcaaaataataagagctatctatgacaaacccacagccaatatcatactgaatgggcaaaaactggaagcattccctttgaaaactggcacaagacagggatgccctctctcaccactcctattcaacatagtgttggaagttctggccagggcaatcaggcaggagaaggaaataaagggtattcaattaggaaaagaggaagtcaaattgtccctgtttgcagatgacatgattgtatatctagaaaaccccattgtctcagcccaaaatccccttaagctgataagcaacttcagcaaagtctcaggatacaaaatcaatgtacaaaaatcacaagcattcttatacaccaataacagacaaacagagagccaaatcatgagtgaactcccattcacaattgcttcaaagagaataaaatacctaggaatccaacttacaagggacgtgaaggacctcttcaaggagaactacaaaccactgctcaatgaaataaaagaggatacaaacaaatggaagaacattccatgctcatgggtaggaagaatcaatatcatgaaaatggccatactgcccaaggtaatgtatagattcaatgccatccccatcaagctaccaatgcctttcttcacagaattggaaaaaactactttaaagttcatatggaaccaaaaaagagcccgcatcatcaagtcaatcctaagcccaaagaacaaagctggaggcatcacgctacctgacttcaaactatactgcaaggctacagtaaccaaaacagcatggtactggtaccaaaacagaaatatagatcaatgcaacagaacagagccctcagaaataatgccacatatctacaactatctgatctttgacaaacctgacaaaaacaagcaatggggaaaggatcccctatttaataaatggtgctgggaaaactggctagccatatgtagaaagctgaaactggatcccttccttacaccttacacaaaaattaattcaagatggattaaagacttaaacattaggcctaaaaccataaaaaccctagaagaaagcctaggcattaccattcaggacataggcatgggcaaggacttcatgtctaaaacaccaaaagcaatggcaacaaaagacaaaattgacaaatgggatctaattaaactaaagagcttctgcacagcaaaagaaactaccatcagagtggacaggcaacctacagaatgggagaaaattttcacaacctactcatctgacaaagggctaatatccagaatctacaatgaactcaaacaaatttacaagaaaaaatcaaacaaccccatcaaaaagtgggcaaagcatatgaacagatgcttctcaaaagaagacatttatgcagccaaaagacacaggctgaaagacactcctcggaagcagctgcgatttgaaggggagcgtgtgacgtggatacaggcctcaaccctcaaggagctgctggacctcaaggctcagcaccctgacgccaagctggtcgtggggaacacggagattggtaagggccagggaggctgccctggggctgccagggggtctgggggtgtttctaggtcctcttgcccatcctcacctccccctgactttacttgcctctgcaccctatccctctgccccactgactacctggagcccactggaaatccctggacactccagttcctgcaaaggcccctagctgtggagtcccacaggcctgctcagccccttgctggatgtgtgacctcagaatag

SEQ ID NO: 14759 - DNA, 3555 bp, Homo sapiens
  SIMILAR (2)..(430): 551254mologous to Mus musculus fatso protein,accession number AJ237917,Smith-Waterman Score=370.
atgggagactttaacaccccactgtcaacattagacagatcaaggagacagaaagtcaacaaggatacccaggaattgaactcagctctgcaccaagtggacctaatagacatctacagaactctgcaccacaaatcaacagaatatacatttttttcagcaccacaccacacctattccaaaattgaccacatagttggaagtaaagctctcctcagcaaatgtaaaagaacagagattataacaaactatctctcagaccacagtgcaatcaaactagaactcaggattaagaatctcactcaaaaccgctcaactacatggaaactgaacaacctgctcctgaatgactactggatacataacaaaatgaaggcagaaataaagatgttctttgaaaccaacaagaacaaagacacaacataccagaatctctgggatgcattcaaagcagtgtgtagagggaaatttatagcactaaatgcccacaagagaaagcaggaaagatccaaaattgacaccctaacatcacaattaaaagaactggaaaagcaagagcaaacacattcaaaagctagcagaaggcaagaagtaactaaaatcagagcagaactgaaggaaatagagacacaaaaaacccttcaaaaaattaatgaatccaggagctggttttttgaaaggatcaacaaaattgatagaatgctagcaagactaataaagaagaaaagagagaagaatcaaatagacacaataaaaaatgataaaggggatatcaccaccgatcccacagaaatacaaactaccatcagagaatactacaaacacctctatgcaaataaactagaaaatctagaagaaatggataaattcctcgacacatacactctcccaagactaaaccaggaagaagttgaatctctgaatagaccaataacaggagctgaaattgtggcaataatcaatagcttaccaaccaaaaagagtccaggaccagatggattcacagccgaattctaccagaggtacaaggaggaactggtaccattccttctgaaactattccaatcaatagaaaaagagggaatcctccctaactcattttatgaggccagcattattctgataccaaagccgggcagagacacaaccaaaaaagagaattttagaccaatatccttgatgaacattgatgcaaaaatcctcaataaaatattggcaaaacgaatccagcagcatatcaaaaagcttatccaccatgatcaagtgggcttcatccctgggatgcaaggctggttcaatatacgcaaatcaataaatgtaatccagcatataaacagaaacaaagacaaaaaccacatgattatctcaatagatgcagaaaaagcctttgacaaaattcaacaacccttcatgctaaaaactctcaatagattaggtattgatgggacgtatttcaaaataataagagctatctatgacaaacccacagctaatatcgtactgaaggggcaaaaactggaagcattccctttgaaaactggcacaagacagggatgccctctctcaccactcgtattcaacatagtgttggaagttctggccagggcaattaggcaggagaaggaaataaagggtattcaattaggaaaagaggaagtcaaattgtccctgtttgcagacgacatgattgtatatctagaaaaccccattgtctcagcccaaaatctccttaagctgataagcacttcagcaaagtctcaggatacaaaatcaatgtacaaaaatcacaagcattcttatacaccaacaacagacaaacagagccaaatcatgagtgaactcccattcacaactgcttcaaagataataaaatacctaggaatccagcttacaagggatgtgaaggacctcttcaaggagaactacaaaccactgctcaaggaaataaaagaggatacaaacaaatggaagaacattccatgctcatgggtaggaagaatcaatattgtgaaaatggccatactgcccaaggtaatttacagattcaatgccatccccatcaagctaccaatgactttcttcacacaattggaaaaaactactttaaagttcatatggaaccaaaaaagagcccgcatcgccaaggcaatcctaagccaaaagaacaaagctggaggcatcacactacctgacttcaaactatactacaaggctacagtaaccaaaacagcatggtactggtaccaaaaacagagatatagatcaatggaacagaataaagccctcagaaataacgccgcatatctacaactatctgatccttgacaaacctgagaaaaacaagcaatggggaaaggattccctatttaataaatggtgctgggaaaactggctagccatatggagaaagttgaaactgggtcccttccttacaccttatacaaaaattaattcaagatggattaaagacttaaacgttagacctaaaaccataaaaaccctagaagaaaacctaggcattaccatgccaggaccataggcatgggcaaggacttcatgtccaaaacaccaaaagcaatggcaacaaaagccaaaattgacaaatgggatctaattcaactaaagagctactgcacagcaaaagaaaataccatcagagtgaacaggcaacctacaaaatgggagaaaattttcgcaacctactcatctgacaaagggctaataaccagaatctacaatgaactccaacaaatttacaagaaaaaaacaaacaaccccatcaaaaagtgggcaaaggacatgaacagacacttctcaaaagaagacatttatgcagccaaaaaacacatgaaaaaatgctcatcatcactggccatcagagaaatgcaaatcaaaaccacaatgagataccatctcacaccagttagaatggcaatcattaaaaagtcaggaaacaacaggaatccaacttacaagggatgtgaaggacctcttcaaggagaactacaaaccactgctcaaggaaataaaagaggatacaaacaaatggaagaacattccatgctcatgggtaggaagaatcaatatcgtgaaaatggccatactgcccaagaattggaaaaaactactttaaagttcatatggaaccaaaaaagagcccgcatcgccaaggcaatcctaagccaaaagaacaaagctggaggcatcacactacctgacttcaaactatactacaaggctacagtaaccaaaacagtatggagaagtgatatcaaaagacaacgactacaccaaaatttggagaaaaaggtgaatccagacagtcacagtactaacttcatcttcgagaaattcatctctcctgtggggtttattgaagctataacccaagaaatcaaggaacgtggattctacattgatctgagagtgatttttgttgttctccgatggaagttggacagcaaagctaaagcagtgatcaaacatcttggtggaccaggcctcaactgtgatcgcccagacaaggctggttcaggtttgctgaaattaggatag

SEQ ID NO: 14760 - DNA, 3348 bp, Homo sapiens; identical to SEQ ID NO: 6075
  SIMILAR (641)..(543): 631254mologous to Homo sapiens Human secreted protein, SEQ ID NO: 7115,accession number G03034,Smith-Waterman Score=109.

SEQ ID NO: 14761 - DNA, 3451 bp, Homo sapiens
  SIMILAR (1086)..(2498): 251254mologous to Leishmania major L8453.1,accession number AC008054,Smith-Waterman Score=177.
cacaccaaaaacccatctgtacatcaccatcgtcaaagaccaaaagtagataaaaccacaaagatggggaaaaaacagaacagaaaaactggaaagtctaaaacgcagagcgcctttcctcctccaaaggaacgcagttcctcaccagcaatggaacaaagctggatggagaatgactttgacgagctgagagaagaaggcttcagacgatcaaattactctgagctacgggaggacattcaaaccaaaggcaaagaagttgaaaactttgaaaaaaatttagaagaatgtataactagaataaccaatacagagaagtgcttaaaggagctgatggagctgaaaaccaaggctcgagaactacgtgaagaatgcagaagcctcagaaattggataaagagtcaagacccatcactgtgctgtattcaggaaacccatctcatgtgcagagacacacataggctcaaaataaaaggaaggaggaagatctaccaagccaatggaaaacaaaaaaaggcaggggttgcaatcctagtctctgataaaacagactttaaaccaacaaagatcaaaagagacaaagaaggccattacataatggtaaagggatcaattcaacaagaagagctaactatcctaaaaatatatgcacccaatacaggatcaccaagattcatgaagcaagtcctgagtgacctacaaagagacttagactcccacacattaataatgggagactttaacaccccactgtcaacattagacagatcaacgagacagaaagtcaacaaggatacccaggaattgaactcagctctgcaccaagcggacctaatagacatctacagaactctccaccccaaatcaacagaatatacatttttttcagcaccacaccacacctattccaaaattgaccacatactgggaagtaaagctctcctcagcaaatgtaaaagaacagaaattataacaaactatctctcagaccacagtgcaatcaaactagaactcaggattaagaatctcactcaaaacggctcaactacatggaaactgaacaacctgctcctgaatgactactgggtacataacgaaatgaaggcagaaataaagatgttctttgaaaccaacgagaacaaagacacaacataccagaatctctgggacgcattcaaagcagtgtgtagagggaaatttatagcactaaatgcccacaagagaaagcaggaaagatccaaaattgacaccctaacatcacaattaaaagaactagaaaagcaagagcaaacacattcaaaagctagcagaaggcaagaaataactaaaatcagagcagaactgaaggaaatagagacacgaaaaacccttcaaaaaattaatgaatccaggagctggttttttgaaaggatcaacaaaattgatagaccactagcaagactaataaagaaaaaaagagagaagactcaaatagacacaataaaaaatgataaaggggatatcaccaccgatcccacagaaatacaaactaccatcagagaatactacaaacacctctacgcaaataaactagaaaatctagaagaaatggatacattcctcgacatatacactctcccaagactaaaccaggaagaagttgaatctctgaatagaccaataacaggagctgaaattgtggcaataatcaatagtttaccaaccgtgggcttcatccctgggatgcaaggctggttcaatatacgcaaatcaacaaatgtaatccagcatataaacagagccaaagacaaaaaccacatgattatctcaatagatgcagaaaaagcctttgacaaaattcaacaacccttcatgctaaaaactctcaataaattaggtattgatgggacgtatttcaaaataataagagctatctatgacaaacccacagccaatatcatactgaatgggcaaaaactggaagcattccctttgaaaactggcacaagacagggatgccctctctcaccgctcctattcaacatagtgttggaagttctggccagggcaatcaggcaggagaaggaaataaagggtattcaattaggaaaagaggaagtcaaattgtccctgtttgcagatgacatgattgtttatctagaaaaccccatcatctcagcccaaaatctccttaagctgataagcaacttcagcaaagtctcaggatacaaaatcaatgtacaaaaatcacaagcattcttatacaccaacaacagacaaacagagagccaaatcatgagtgaactcccattcacaattgcttcaaagagaataaaatacctaggaatccaacttacaagggatgtgaaggacctcttcaaggagaactacaaaccactgctcaaggaaataagaggacacaaacaaatggtgcccaaggtaatttacagattcaatgccatccccatgaagctaccaatgactttcttcacagaattggaaaaaactactttaaagttcatatggaaccaaaaaagagcccgcatcgccaagtcaatcctaagccaaaagaacaaagctggaggcatcacactacctgacttcaaactatactacaaggctacagtaaccaaaacagcatggtactggtaccaaaacagagatatagatcaatggaacagaacagaggcctcagaaataatgccgcatatctacaactatctgatctttgacaaacctgagaaaaacaagcaatggggaaaggattccctatttaacaaatggtgctgggaaaactggctagccatatgtagaaagctgaaactggatcccttccttacaccttatacaaaaatcaattcaagatggattaaagatttaaacgttagacctaaaaccataaaaaccctagaagaaaacctaggcattaccattcaggacataggcgtgggcaaggacttcatgtccaaaacaccaaaagccaatggcaacaaaagccaaaattgacaaatgggatctaattaaactcaagagcttctgcacagcaaaagaaactaccatcagagtgaacaggcaacctacaacatgggagaaaattttcgcaacctactcatctgacaaagggctaatatccagaatctacaatgaactcaaacaaatttacaagaaaaaaacaaacaaccccatcaaaaagtgggccaaggacatgaacagacacttctcaaaagaagacatttatgcagccaaaaaacacatgaagaaatgctcatcatcactggccatcagagaaatgcaaatcaaaatacctgtgagccaaataaacctcttttatttacaaattactcaacctcatgtatgcctttctagtcgtacaaatggcctaaaacagaaaattggtatgaaggagtgcagttttgttataaagatacctgaagatgtggaagtggctttggaactgggtaatgagcagcaa

SEQ ID NO: 14762 - DNA, 2606 bp, Homo sapiens
  SIMILAR (1)..(2979): 941254mologous to Homo sapiens putative p150,accession number U93563,Smith-Waterman Score=4870.
atggtggcctccagatcctctagagtcggtgtcttctatggaggtcaaaacagcgtggatggcgtctccaggcgatctgacggttcactaaacgagctctgcttatatagacctcccaccggggcgtacttggcatatgatacacttgatgtactgccaagtgggcagtttaccgtaaatactccacccattgacgtcaatggaaagtccctattggcgttactatgggaacatacgtcattattgacgtcaatgggcgggggtcgttgggcgatgcagccacttggccagctgggtcagctcgaacacctcggagaccggcgcgatcaggtcctcgaccgaagtggacgctcccgacgactcgatgctgctcagcacctgcgacatcgacctgaccgccgcccgcagggcatggttggggtgcttaccaaccaaaaagagcccaggaccagatggattcacagcagaattctaccagaggtgcaaggaggaactggtaccgttccttctgaaactattccaatcgatagaaaagagggaatccttcctaacttatttgatgaggccagcatcatcctgataccaaagcggggcagagacaccaccaaaaaagagaattttagaccaatatccttgatgaacattgatgcaaaaatcctcaataaaatactggcaaaccgaaaccagcagcacatcaaaaagcttatccaccatgatcaagtgggtttcatccctgggatgcaaggctggttcaatatatgcaaatcaataaatgtaatccagcatataaacagaaccaaagacaaaaaccacatgattatctcaatagatgcagaaaaggcctttgacaaaattcaacaacccttcatgctaaaaactcttaataaattaggtattgatgggacgtatctcaaaataataagagctatctatgacaaacccacagccaatatcatactgaatgggcaaaaactggaagcattccctttgaaaactggcacaagacagggatgccctctctcaccactcctattcaacatagtgttggaagttctggccagggcaatcaggcaggagaaggaaataaagggtattcaattaggaaaagaagaagtcaaattgtccctgtttgcagatgacatgattgtatatctagaaaaccccatcgtctcagcccaaaatctccttaagctaataagcaacttcagcaaagtctcagcatacaaaatcaatgtacaaaaatcacaagcattcttatacaccaataacagacaaacagagagccaaatcatgagtgtattcccattcacaattgcttcaaagagaataaaatacttaggaatccaacttgcaaggaatgcgaaggacctcttcaaggagaactacaaaccactgctcaatgaaataaaagaggatacaaagaaatggaagaacattccatgctcatgggtaggaagaatcaatatcgtgaaaatggccatactgcccaaggtaatttacagattcaatgccatccccatcaagctaccaatgactttcttcacagaattggaaaaaactactttaaagttcatatggaaccaaaaaagagcccgcatcgccaagtcaatcctaagccaaaagaacaaagctggaggcatcacgctacctgacttcaaactacactacaagattacagtaaccaaaacagcatggtactggtaccaaaacagagatatagatcaatggaacagaacagagccctcagaaataacgccgcatatctacaactatctgatctttgacaaacctgagaaaaacaagcaatggggaaaggattccctatttaataaatggtgctgggaaaactggctagccatatgtagaaagctgaaactggatcccttccttacaccttatacaaaaattcatccaagatggattaaagacttaaacgttagacctaaaaccataaaaaccctagaagaaaacctaggcaataccattcaggacataggcatgggcaaggacttcatgtctaaaacaccaaaagcaatggcagcaaaagccaaaattgacaaatgggatctaattcaactaaagagcttctgcacagcaaaagaaactaccatcagagtgaacaggcaacctacaaaatgggagaaaattttcgcaacctactcatctgacaaagggctaatatccagaatctacaaagaactcaaacaaatttacaagaaaaaaaacaaacaaccccatcaaaaagtgggcgaaggacatgaacagacacttctcaaaagaagacatttatgcagccaacaaacacatgaaaaaatgctcaccatcactggccatcagagaaatgcaaatcaaaaccactatgagataccatctcacaccagttagaatggcaatcattaaaaagtcaggaaacaacagccagacagtgaagccacagaacaaagctcattttgccaaaatggaccgccaatgtgtccacggcttgtctccccgtttagaacacagcccccgggggcgctcttccccacggtgcgcagaatgctgcctctactcttgcctgcatgctcagacttcaaacggggctgtgaaaataaatctaatgacag

SEQ ID NO: 14763 - DNA, 2862 bp, Homo sapiens
  SIMILAR (136)..(384): 971254mologous to Homo sapiens NAG13,accession number AF194537,Smith-Waterman Score=418.
atgggaacctctgaagtgcagaatggagaggagagagctggcaccagcggccagggcagcgtggagcagctcagcggcagctcagtccagctccctcctggcctcaaactctgctttgagccctacttttccagctgtgcttctgactgcattcttcatgccagccccctctccttaatggctgcatcaggctcccaaaaccccaatctgtgggcttcctggttgtgctgcaaatgggttcagtgcccagaacgtcagcttggctgccacctgacttcaagtgtcatctatggcctcaggtactacccccaggccaaacgcagtgaattagaactcagggactgtgagggcctctgcaatcagacatctcccctcagctcacttgatgggatgggctggaaagcagcagcagaagagagcaactctggaatcagaaacatctggattccaattccagcatttgctactcacaagcaatacaatgtcagacaggtgataagcccctctccaccttactggtctcatcgaggaaatggaaataacagcctctgtgtcacaaggttatcaggaggactgaagcaaccagtagcaggcacaggaagaggtttagaaggtgggagcggaacaagggacctgatgccattcttgtcagcagcacccaaggaacagcccccaatcctggcacctgcacgtaggagctggttttttgaaaagatcaacaaaattgatagactgctagcaagactaataaagaagaaaagagagaagaatcaaatagatgcaataaaaaatggtaaaggggatatcaccactgatcccacagaaatacaaactaccatcagagaatactataaacacctctatgcaaataaactagaaaatctagaagaaatggataaattcctcgacacatacaccctcccaagactaaaccaggaagaagctgaatctctgaatagaccaataacaggctctgaaattgaggcaataattaatagcttatcaaccaaaaaaagtccaggaccagatggattcacagccgaattctaccagaggtacaaggaggagctggtaccattccttctgaaactattccaatcaacagaaaaagagggaatcctccctaactcattttatgaggccagcatcatcctgataccaaagcctggcagagacacaacaaaaaaagagaattttagaccaatatccttgatgaacattgatgcaaaaatcctcaataaaatactggcaaaccgaatccagcagcacatcaaaaagcttatccaccatgatcaagtgggcttcatccctgggatgcaaggctggttcaacatacgaaaatcaataaacgtaatccagcatataaacagaaccaaacacaaaaaccacatgattatctcaatagatgcagaaaaggcctctgacaaaattcaacaacccttcatgctaaaaactctccgtaaattaggtattgatgagacacaaacagagagccaaatcatgagtgaactcccattcacaattgcttcaaagagaataaaatacctaggaatccaacttacaagggacgtgaaggacctcttcaaggagaactacaaaccactgctcaatgaaataaaagaggatacaaacaaatggaagaactttccatgctcatgggtaggaagaatcaatattgtgaaaatggccatagtgcccaaggtaatttatagattcaatgccagccccatcaagctaccaatgactttcttcacagaattggaaaaaactactttaaagttcatatggaaccaaaaaagagcctgcattgccaagtcaatcctaagccaaaagaacaaagctggaggcatcatgctacctgacttcaaactatactacaaggctacagtaaccaaaacagcatggtactggtaccaaaacagagatatagaccaatggaacagaacagagccctcagaaataacgccgcatatctacaactatctgttctttgacaaacctgacaaaaacaagcaatggggaaaggattccctatttaataaatggtgctgggaaaactggctagccatatgtagaaagctgaaattggatcctgtacttacaccttatacaaaaattaattcaagatggattaaagacttacatgttagacctaaaaccataaaaaccctagaagaaaacctaggcattaccattcaggacataggcatgggcaaggacttcatgtctaaaacaccaaaagcaatggcaacaaaagccaaaattgacaaatgggatctaattaaactaaagagcttctgcacagcaaaagaaactaccatcagagtgaacaggcaacctacagaatgggagaaaatttttgcaacctactcatctgacaaagggctaatatccagaatctacaatgaactcaaacaaatttacaagaaaaaaacaaacaaccccatcaaaaagtgggcgaaggacatgaacagacacttctcaaaagaagacatttatgcagacaaaaagcacatgaaaaaatgctcatcatcactgatcatcagagaaatgcaagtcaaaaccacaatgagataccatctcacaccagttagaatggcgatcattaaaaagtcaggaaacaacagagacagtgttctggctgccttaaacattacttacaagagctgtcagcaaaaccctgtctccagggaccattactttgagggaactctgccaatcgcagcattattgagaaggcgtattttttatgttcctcaaatgcctactgtcaaactaaaccaaagttctgaaaggtcacaaacacttccaagtttggggaaggaaacctactcccagattcaagtgtggcctgaaggccag

SEQ ID NO: 14764 - DNA, 3724 bp, Homo sapiens
  SIMILAR (931)..(1554): 961254mologous to Homo sapiens putative p150,accession number U93574,Smith-Waterman Score=1057.
atggggaaaaaacagaacagaaaaactggaaactctaaaacgcagagcgcctctcctcctccaaaggaacgcagttcctcaccagcaacagaacaaagctggatggagaatgattttgacgagctgagagaagaaggcttcagacgatcaaattactctgagctatgggaggacattcaaaccaaaggcaaagaagttgaaaactttgaaaaaaatttagaagaatgtataactagaataaccaatacagagaagtgcttaaaggagctgatggagctgaaaaccaaggctcgagaactacatgaagaatgcagaagcctcaggagccgatgcgatcaactggaagaaagggtatcagcaatggaagatgaaatgaatgaaatgaagcgagaagggaagtttagagaaaaaagaataaaaagaaatgagcaaagcctccaagaaatatgggactatgtgaaaagaccaaatctacgtctgattggtgtacctgaaagtgatgtggagaatggaaccaagttggaaaacactctgcaggatattatccaggagaacttccccaatctagcaaggcaggccaacgttcagattcaggaaatacagagaatgccacaaagatactcctcgagaagagcaactccaagacacataattgtcagattcaccaaagttgaaatgaaggaaaaaatgttaagggcagccagacagaaagcaccacaccacacctattccaaaattgaccacatagttggaagtaaagctctcctcagcaaatgtaaaagaacagaaattataacaaactatctctcagaccacagtgcaatcaaactagaactcaggattaagaatctcactcaaagccgctcaactacatggaaactgaacaacctgctcctgaatgactactgggtacataacgaaatgaaggcagaaataaagatgttctttgaaaccaacgagaacaaagacaccacataccagaatctctgggacacattcaaagcagtgtgtagagggaaatttatagcactaaatgcctacaagagaaagcaggaaacatccaaaattgacaccataacatcacaattaaaagaactagaaaagcaagagcaaacacattcaaaagctagcagaaggcaagaaataactaaaatcagagcagaactgaaggaaatagagacacaaaaaacccttcaaaaaatcaatgaatccaggagctggttttttgaaaggatcaacaaaattgatagaccgctagcaagactaataaagaaaaaaagagagaagaatcaaatagacacaataaaaaatgataaaggggatatcaccaccgatcccacagaaatacaaactaccatcagagaatactacaaacacctctacgcaaataaactagaaaatctagaagaaatggatacattcctcgacacatacactctcccaagactaaaccaggaagaagttgaatctctgaatagaccaataacaggctctgaaattgtggcaataatcaatagtttaccaaccaaaaagagtccaggaccagatggattcacagccgaattctaccagaggtacaaggaggaactggtaccattccttctgcaactattccaatcaatagaaaaagagggaatcctccctaactcattttatgaggccagcatcattctgataccaaagccgggcagagacacaaccaaaaaagagaattttagaccaatatccttgatgaacattgatgcaaaaatcctcaataaaatactggcaaaccgaatccagcagcacatcaaaaagcttatccaccatgatcaagtgggcttcatccctgggacgcaaggctggttcaatatacgcaaatcaataaatgtaatccagcatataaacagagccaaagacaaaaaccacatgattatctcaatagatgcagaaaaagcctttgacaaaattcaacaacccttcatgctaaaaactctcaataaattaggtattgatgggacatatttcaaaataataagagctatctatgacaaacccacagccaatatcatactgaatgggcaaaaactggaagcattccctttgaaaactggcacaagacagggatgccctctctcaccgctcctattcaacatagtgttggaagttctggccagggcaatcaggcaggagaaggaaataaagggtattcaattaggaaaagaggaagtcaaattgtccctgtttgcagacgacatgattgtttatctagaaaaccccatcgtctcagcccaaaatctccttaagctgataagcaacttcagcaaagtctcaggatacaaaatcaatgtacaaaaatcacaagcattcttatacaccaataacagacaaacagagagccaaatcatgagtgaactcccattcacaattgcttcaaagagaataaaatacctaggaatccaacttacaagggatgtgaaggacctcttcaaggagaactacaaaccactgctcaaggaaataaaagaggacacaaacaaatggaagaacattccatgctcatgggtaggaagaatcaatatcgtgaaaatggccatactgcccaaggtaatttacagattcaatgccatccccatcaagctaccaatgactttcttcacagaattggaaaaaactactttaaagttcatatggaaccaaaaaagagcctgcatctccaagtcaatcctaagccaaaagaacaaagctggaggcatcacactacctgacttcaaactatactacaaggctacagtaaccaaaacagcatggtactggtaccaaaacagagatatagatcaatggaacagaacagagccctcagaaataatgccacatatctacaactatctgatctttgacaaacctgagaaaaacaagcaatggggaaaggattccctatttaataaatggtgctgggaaaactggctagccatatgtagaaagctgaaactggatcccttccttacaccttatacaaaaatcaattcaagatggattaaagatttaaacgttagacctaaaaccataaaaaccctagaagaaaacctaggcattaccattcaggacataggcgtgggcaaggacttcatgtccaaaacaccaaaagcaatggcaacaaaagccaaaattgacaaatgggatctaattaaactaaagagcttctgcacagcaaaagaaactaccatcagagtgaacaggcaacctacaacatgggagaaaattttcacaacctactcatctgacaaagggctaatatccagaatctacaatgaactcaaacaaatttacaagaaaaaaacaaacaaccccatcaaaaagtgggcgaaggacatgaacagacacttctcaaaagaagacatttatgcagccaaaaaacacatgaagaaatgctcatcatcactggccatcagagaaatgcaaatcaaaaccactatgagatatcatctcgcaccagttagaatggcaatcattaaaaagtcaggaaacaacagcactattcacagtagcaaagacatggattcaacccaaatgtgcatcaatgatacactgtatgaagaaagtgtagaacatatacaccatgaaatacaatccagccataaaaaaggagttcacatcctttgcagcaatatggatggagctgaaagccactttcctaagcaaactaatgcaagaacagaaagccaaatactgcatgttctcactt

SEQ ID NO: 14765 - DNA, 2375 bp, Homo sapiens
  SIMILAR (736)..(3006): 961254mologous to Homo sapiens putative p150,accession number U93563,Smith-Waterman Score=3773.
ccaggccatgaccttagagggaagatggcagcaatcccagagaagttctacaaaacagagagatgggacttcttttcccatggtagagcccacaaagactgaagagcccttcatgagctccctgccccctcatcctaaccaggccgcagagtggcaaagtggaagacctagaccaaaaacaggagctgaaattgtggcaataaccaatagcttaccaaccaaaaagagtccaggaccagatggattcacagcagaattctaccagaggtacaaggaggaactggtaccattccttctgaaactattccaatcagtagaaaaagagggaatcctccctaactcattttatgaggccagcatcatcctgctaccaaagccaggcagagacaaaaccaaaaaagagaattttagaccaatatccttgatgaacattgatgcaaaaatcctcaataaaatactggcaaaccgaattcagcagcacatcaaaaagcttatccaccatgatcaagtgggcttcgtccctgggatgcaaggctggttcaatatacgcaaatcaataaatgcaatccagcatataaacagaaccaaagacaaaaaccacatgattatctcaatagatgcagaaaaggcctttgacaaaattcaacaacccttcatgctaaaaactctcaataaattaggtattgatgggaagtatctcaaaataataagagctttctatgacaaacccacagccaatatcatactgaatgggcaaaaactggaagcattccctttgaaaactggcacaagacagggatgccctctctcaccactcctattcaacatagtgttggaagttctggacagggcaattaggcaggagaaggaaataaagggtattcaattaggaaaagaggaagtcaaattgtccctgtttgcagatgacatgattgtatatctagaaaaccccattgtctcagcccaaaatctccttaagctgataagcaacttcagcaaagtctcaggatacaaaatcaatgtacaaaaatcacaagcattcttacacaccaataacagacaaacagagagccaaatcatgagtgaactcccattcacaattgcttcaaagagaataaaatacctaggaatccaaattacaagggacgtgaaggacctcttcaaggagaactacaaaccactgctcaaggaaataaaagaggatacaaacaaatggaagaacattccatgctcatgggtaggaagaatcaatattgtgaaaatagccatactgcccaagataatttacagattaaatgccatccccatcaagctactaatgactttcttcacagaattggaaaaaactactttaaagttcatatggaaccaaaaaagagcccgcatcgccaagtcaatcctaagccaaaagaacaaagctggaggcatcacgctacctgacttcaaactatactacaagcctacagtaaccaaaacagcatggtactggcaccaaaacagagctatagagcaatggaacagaacagagccctcagaaataacgacacatatctacaactatctgacctttgacaaacctgagaaaaacaagcaatggggaaaggattccctatttaataaatggtgctgggaaaactggctagccatatgtagaaagctgaaactggatcccttccttacaccttatacaaaaatcagttcaaaatggattaaagacttaaacgttagacctaaaaccataaaaacccaagaagaaaacctaggcattaccattcaggacataggcatgggcaaggacttcatgtctaaaacacaaaaagcaatggcaacaaaagccaaaattgacaaaggggatctaattaaactaaagagcttctgcacagcaaaagaaactagcagcagtgtgaacaggcaacctacaaaatgggagaaaatttttgcaacctactcatctgacaaagggctaatatccagaatctacaatgaactcaaacaaattcacaagaaaaaaacaaacaaccccatcaaaaagtgggcaaaggatatgaacagacacttctcaaaagaagacatttatgcagccaaaaaacacatgaaaaactgttcaccatcactggccatcagagaaatgcaaatcaaaaccacaatgagataccatctcacaccacttagaatggcaatcattaaaaagtcaggaaacaacagacgcacagcaactttaagtttgctgccagctatacgtcatgaaagggaagcttttcatcaaagggaagaagaaaaggaagggggaagaatcctacttttacaaaacagagtaattctttgctcctgctccctttgcccacatctctcacctgcgtccaaaccaaaacaca

SEQ ID NO: 14766 - DNA, 2376 bp, Homo sapiens
  SIMILAR (958)..(1995): 911254mologous to Homo sapiens putative p150,accession number U93565,Smith-Waterman Score=1698.
atgggagactttaacaccccactgtcaacattagacagatcaacgagacagaaagtcaacaaggatacccaggaattgaactcagctctgcaccaagcggacctaatagacatctacagaaccctccaccccaaatcaacagaatatacatttttttcagcaccacaccacacctattccaaaattgaccacatacttggaagtaaggctctcctcagcaaatgtaaaggaagagaaattataacaaactgtctctcagaccacagtgcaatcaaactagaactcaggattaagaatctcactcaaaaccgctcaactacatggaaactgagcaacctgctcctgaatgactactgggtacataacgaaatgaaggcagaaataaagatgttctttgaaaccaacgagaacaaagacacaacataccagaatctctgggacacattcaaagcagtgtgtagagggaaatttatagcacttaatgcccacaagagaaagcaggaaagatccaaaattgacaccctaacatcacaattaaaagaactagaaaagcaagagcaaacacattcaaaagctagcagaaggcaagaaataactaaaatcagagcagaactgaaggaaatagagacacaaaaaacccttcaaaaaattaatgaatccaggagctggttttttgaaaggatcaacaaaattgatagaccgctaacaagactaataaagaaaaaaagagagacgaatcaaatagatgcaataaaaaatgataaaggggatatcaccgccgatcccacagatagacaaactaccatcagagaatactacaaacacctctacgcaaataaactagaaaatctagaagaaatggatatattcctcgacacatacaccctcccaagactaaaccaggaagaatttgaatctctgaatagaccaataacaagatctgaaattgtggcaataatcaatagcttaccaaccaaaaagagtccaggaccagatggattcacagccgaattctaccagaggtacaaagaggaactgagaataaaatacctaggaatccaacttacaagggatgtgaaggacctcttcaaggagaactacaaaccactactcaaggaaataaaagaggatacaaacaaatggaagaacattccatgctcatgggtaggaagaatcaatatcgtgaaaatggccatactgcccaaggtaatttacagattcaatgccatccccatcaagctaccaatgactttcttcacagaattggaaaaaactactttaaagttcatatggaaccaaaagagagcccgcattgccaagtcaatcctaagccaaaagaacaaagctggaggcatcacactacctgacttcaaactatactacaaggctacagtaaccaaaacagcatggtactggtaccaaaacagagatatagatcaatggtacagaacagagcccttagaaataacgccgcatatctacaactatctgatctttgacaaacctgagaaaaacaagcaatggggaaaggattccctatttaatctatggtgctgggaaaactggctagccatatgtagaaagctgaaactggatcccttccttacaccttatacaaaaatcaattcaagatggattaaagacttaaacgttagacctaaaaccataaaaaccctagaagaaaacctaggcattaccattcaggacataggcatgggcaaggacttcatgtctaaaacaccaaaagcaatggcaacaaaagacaaaattgacaaatgggatctaattaaactaaagagcttctgcacagcaaaagaaactaccatcagagtgaacaggcaacctacaaaatgggagaaaattttcacaacctactcatctgacaaagggctaatatccagaatctacaatgaactcaaacaaatttacaagaaaaaaacaaacaaccccatcaaaaagtgggcgaaggacatgaacagacacttctcaaaagaagatatttatgcagccaaaaaacacatgaaaaaatgctcgtcatcactggccatcagagaaatgcaaatcaaaaccacaatgagataccatctcacaccagttagaatggcaatcattaaaaagtcaggaaacaacagactctgcagggaactgaggataaaagcggctgcaggggagcaagacctggagcgtcatcgagagattgcaaaaacaattcactgccaacagactgtcccagcagggtcccagtgctatggtcgtggccctgattggcatgctgcccctcggatgcccaatcagatggaaccggaagaaatcgaatacagagtcagtccactttatctctgtataaccacccaaatgaacagcatgggaaattga

SEQ ID NO: 14767 - DNA, 1665 bp, Homo sapiens; identical to SEQ ID NO: 5400
  SIMILAR (466)..(1335): 951254mologous to Homo sapiens putative p150,accession number U93572,Smith-Waterman Score=1501.

SEQ ID NO: 14768 - DNA, 1467 bp, Homo sapiens
  SIMILAR (727)..(1167): 871254mologous to Homo sapiens putative p150,accession number U93570,Smith-Waterman Score=671.
cctgctttattaatcttcatggcactcatcagtacctgaaaaatgacctcaacttctttgcttattttggtgtctgtgtcttcctaactacaaaataaactccattcagcactgtgtcactgacgcgcataactccagtgcccgccacagtgcctggcatgaagcaagccctttatcaagatgtgttaaatgaattcaacacactacagtcatcagagggagctgggggagatgcttttagcccagttatggacacactttgagcttaaagatctctacggtctctaggagacaggctggtaaatatctgcactcagtgctgatgacatgcgtttttccagcgcacagctggaacgggaaattaacacagcagccttccatgtttcctctcttactgatatccccacagggagcatgggagaagagggaatagttgaaaggtctgtgagactgagtgtggtacccaaagtgtgttggtacccaaagtgtgtggtcaagactggaggggaccccaggaccttcaagcagaaaaaccaggggaaggaggctggtataatccgagcacaggattccacaggtttaaaatatggtggtatcatggaagccaaaagggatacgcccatggaacagaccagcccatcagattacgctgcattctacacttctgatcttgacaacctgacaacacaagcacaggggaaggatccctatttaatactggtgctggaaaactggctagccatatgtagaaagctgaaactggatccattccttacaccttatacaaaaatacattcaagatggattaaagacttacatgttagacctaaaaccataaaaaccctagaagaaaacctaggcagtaccattcaggacataggcatgggcaaggacttcatgtctaaaacaccaaaagcaatggcaacaaaagccaaaattgacaaatgggatctaattaaactaaagagcttctgcacagcaaaagaaactaccatcagagtgaacaggcaacctacagaatgggagaaaatttttgcaacctactcatctgacaaagggctaatatccagaatctacaatgaactcaaacaaatttacaggaaaaaaacaaacaaccccatgaaatgtgggcaaagggtattagaagataatctaagtcattcagactgggctagtgagcctgagctgctaagtgatgtcagctgtcctccttttcttgaaagtggagcggagtctcagtctgacatccacactcgaaaacctttccccgtcagcaaagcatcacaatcagcccctggtaaccactgccctgatctctgtccttttgaaaagcacatgcctcaggtgtactacactaaccctggggtaacggctgctctagacctgtcccaacgagcccacaaacaagccttgaggagcaaaacatctaccaataatttaactcattgccaaaacaaaattcactaa

SEQ ID NO: 14769 - DNA, 3413 bp, Homo sapiens
  SIMILAR (1)..(1566): 941254mologous to Homo sapiens putative p150,accession number U93563,Smith-Waterman Score=2537.
ctttcccaagtttcaagatagctattcctaaaaatgatcatgggcatgaacaacatttttggggatatagagttccaaataatgccatggaagatacagcttatcaactggtccaccagtaccctacaagaatgcaggcccggagatgcaggatcgcgctgtcacagtggtcctcttcgcatcctctcccggcaaagagagatgctccggttaccagcggcgcgcatccccgcaggcgcctctcctctcgccgatacccacccaggcagtcccgacaggcgcgcctgcctacctggtggccggctgtcagcgaagcggcggtgcctcagccccttctcagctgctacagcgctcccagcgccatgttcccggtctccccgggcgcacgctggggaactactactggctggaagttctttgaaaccaacgagaacaaagacacaacataccagaatctctgggacgcattcaaagcagtgtgtagagggaaatttataccactaaatgcccacaagagaaagcaggaaagatccaaaattgacaccctaacatcacaattaaaagaactagaaaagcaagagcaaacacattcaaaagctagcagaaggcaagaaataactaaaatcagagcagaactgaaggaaatagagacacaaaaaacccttcaaaaaatcaatgaatccaggagctggttttttgaaaggatcaacaaaattgatagaccgctagcaagactaataaagaaaaaaagagagaagaatcaaatagacacaataaaaaatgataaaggggatatcaccaccaatcccacagaaatacaaactaccatcagagaatactacaaacacctctacgcaaaaaaactagaaaatctagaagaaatggatacattcctcgacacatacactctcccaagactaaaccaggaagaagttgaatctctgaatagaccaataacaggagctgaaattgtggcaatattcaatagtttaccaaccaaaaagagtccaggaccagatggattcacagccgaattctaccagaggtacaaggaggaactggtaccattccttctgaaaatattccaatcaatagaaaaagagggaatcctccctaactcattttatgaggccagcatcattctgataccaaagccaggcagagacacaaccaaaaaagagaattttagaccaatatccttgatgaacattgatgcaaaaatcctcaataaaatactggcaaaccgaatccagcagcacatcaaaaagcttatccaccatgatcaggtgggcttcatccctggaatgcaaggctggttcaatatacgcaaatcaataaatgtaatccagcatataaacagagccaaagacaaaaaccacatgattatctcaatagatgcagaaaaagcctttgacaaaattcaacaacccttcatgctaaaaactctcaataaattaggtattgatgggacgtatttcaaaataataagagctatctatgacaaacccacagccaatatcatactgaatgggcaaaaactggaagcattccctttgaaaactggcacaagacagggatgccctctctcaccgctcctattcaacatagtgttggaagttctggccagggcaatcaggcaggagaaggaaataaagggtattcaattaggaaaagaggaagtcaaattgtccctgtttgcagacgacatgattgtttatctagaaaaccccatcatctcagcccaaaatctccttaagctgataagcaacttcagcaaagtctcaggatacaaaatcaatgtacaaaaatcacaagcattcctatacaccaacaacagacaaacagagagccaaatcatgagtgaactcccattcacaattgcttcaaagagaataaaatacctaggaatccaacttacaagggatgtgaaggacctcttcaaggagaactacaaaccactgctcaaggaaataaaagaggatacaaacaaatggaagaacattccatgctcatgggtaggaagaatcaatatcgtgaaaatggccatactgcccaaggtaatttacagattcaatgccatccccatcaagctaccaatgactttcttcacagaattggaaaaaactactttaaagttcatatggaaccaaaaaagagcccgcatcgccaagtcaatcctaagccaaaagaacaaagctggaggcatcacactacctgacttcaaactatactacaaggctacagtaaccaaaacagcatggtactggtaccaaaacagagatatagatcaatggaacagaacagagccctcagaaataacgccacatacctacaactatctgatctttgacaaacctgagaaaaacaagcaatggggaaaggattccctatttaataaatggtgctgggaaaactggctagccatatgtagaaagctgaaactggatcccttccttacaccttatacaaaaatcaattcaagatggattaaagatttaaacgttagacctaaaaccataaaaaccctagaagaaaacctaggcagtaccattcaggacataggcgtgggcaaggacttcatgtccaaaacaccaaaagcaatggcaacaaaagccaaaattgacaaatgggatctaattaaactaaagagcttctgcacagcaaaagaaactaccatcagagtgaacaggcaacctacaacatgggagaaaattttcgcaacctactcatctgacaaaaggctaatatccagaatctacaatgaactcaaacaaatttacaagaaaaaaacaaacaaccccatcaaaaagtgggcgaaggacatgaacagacacttctcaaaagaagacatttatgcagccaaaaaacacatgaaaaaatgctcatcatcactggccatcagagaaatgcaaatcaaaaccactatgagatatcatctcacaccagttagaatggcaatcattaaaaagtcaggaaacaacagtgaaggttatccggacttgctgaatactgagtatgagcagatttcttttggaaatcaaagaggaactaaggttgtgcctggtgacccaagggaaacaaaaacacatgcagatgcagaagccagaagcagaatttggctagtgctggcgtcagtggtgcaggatagatggaccaatatttatgaggaaatctcccaccttgctccatggaacaaacaggtcactgagcagcagccaaaatctgctgctgcacagagcttaaggcctgggcccagtgatcctgttggcctctcctttcctgggtactgtgaatcaggtgcaccagcagcatttcttcatgccagggctgagacattaaaattaagtagtgcaactatgtctgctacagaaatcaaaggggaagggcagtctcagacaggaaggactcagtaa

SEQ ID NO: 14770 - DNA, 2910 bp, Homo sapiens
  SIMILAR (859)..(1347): 1001254mologous to Escherichia coli dihydropicolinate reductase,accession number M10611,Smith-Waterman Score=816.
atggataaattcctcaacacaaacaccctcccaagactaaaccaggaagaagttgactctctgaatagaccaataacaggatctgaaattgtggcaatagtcaatagcttaccaaccaaaaagagtccaggaccagatggattcacagccgaattctaccagaggtacaaggaggaactgagaataaaatacctaggaatccaacttacaaaggatgtgaaggacctcttcaaggagaactacaaaccactgctcaaggaaataaaagaggataaaaacaaatggaagaacattccatgctcatgggtaggaagaatcaacatcatgaaaatggccatactgcccaaggtaatttatagattcaatgccatccccatcaagctaccaatgactttcttcatagaattggaaaaaactactttaaagttcatatggaaccaaaaaagagccctcatcgccaagtcaatcctaagccaaatgaacagagctggaggcatcatgctccctgacttcaaactatactacatggctacagtaaccaaaacagcatggtactggtaccaaaacagagatatagatcaatggaacagaacagagccctcagaaataacgccgcatatctacaactatctgatctttgacaaaccggagaaaaacaagaaatggggaaaggattccctatttaataaatggtgctgggaaaactggctagccatatgtagaaagctgaaactggatcccttccttacaccttacacaaaaattaattcaagatggattaaagacttaaacgttagacctaaaaccataaaaaccctagaagaaaacctaggcattaccattcaggacacaggcatgggcaaggacttcatgtctaaaacaccaaaagcaatggcaacaaaagccaaaattgacaaatgggatctcattaaactaaagagcttctgcacagcaaaagaaactaccattagagtgaacaggcaacctacaaaatgggagaaaattttcgcaacctactcatctgacaaagggctaatatccagaatctacaatgaactcaaacaaatttacaagaaaaaaacaaacaaccccatcaaaaagtgggcaaaggacatgaacagacacttctcaaaagaagacatttatgcagccaaaaaacacatgaaaaaatgctcaccatcactggccatcagagaaatgcaaatcaaaaccacaatgagataccacctcacgccagttagaatggcaatcattaaaaagtcaggaaacaacagagccggtaggtgccaggaacagtcaggagcccagccccctaccgagttaatggggtgggagccccgtgctcccaagtgcagctgcagccgcctagccctggctcatgacccaagcatcccggcactctcagactttggcactgacaaggagggagaccaagtgttggaagttctggccagggcaatcaggcaggagaaggaaataaagggtattcaattaggaaaagaggaagtcaaattggccctgtttgcagatgacatgattgtatatctagaaaaccccatcatctcagcccaaaagctccttaagctgatagacaacttcagcaaagtctcaggatacaaaatcaatgtgcaaaaatcacaagcattcttatataccaataacagacaaacagagagccaaatcatgagtgaacttccattcataattgcttcaaagagaataaaatacctaggaatccaccttacaagggatgtgaaggacctcttcaagaagaactacaaaccactgctcaatgaaataaaagtggatacaaacaaaatggaagaacattccatgctcatgcgtaggaagaatcaatatcatgaaaatggccatactgcccaagaattggaaaaaactactttaaagttcatatggaaccaaaaaagaacccacattgccaagtcaatcctaagccaaaagaacaaagctggaggcacactacctgagttcaaactatactacaaggctacagtaaccaaaacagcatggtactggtaccaaaacagagatatagaccaatggaacagaacagagccctcagaaataatgccacatatctacaactatctgatctttgacaaacctgacagaaacaagaaatggggaaaggattccctatttaataaatggttctgggaaaactgcctagccatatgtagaaagctgaaactggatcccttccttacaccttatacaaaaattaattcaagatggattaaagacttaaactttagacctaaaaccataaaaaccctagaagataacctaggtaataccattcaggacataggcatgggcaaggacttcatgtctaaaacaccaaaagcaatggcaacaaaagccaaaattgacaaatgggatctaattgaactaaagagcttctgcacagcaaaagaaactaccatcagagtgaacaggcaacctacagaatgggagaaaatttttgcaatctactcatctgacaaagggctaatatccagaatctacaatgaactcaaacaaatttacaagaaaaaaacaaacaaccccatcaaaaagtgggcaaaggatatgaacagacacttctcaaaagaagacatttatgcagccaaaagacacatgaaaaaatgttcatcatcactggccatcagagaaatgcaaatcaaaaccacaatgagataccatctcacaccagttagaacggcgatcattaaaaagtcaggagacaacagggacatggatgaaggtggaaaccatcattctcagcaaactattgcaaggacaaaaaaccaaacactgcatgttctcactcataggtgggaattgaacaatgagaacacatggacacaggaaggggaacatcacacaccggggactgttgtggggtga

SEQ ID NO: 14771 - DNA, 3004 bp, Homo sapiens
  SIMILAR (818)..(1984): 1001254mologous to Escherichia coli, LBB84, plasmid pXT107, IS10L/R-1, Peptide PlasmidTransposonInsertionMutant, 402 aa transposase,accession number S67119,Smith-Waterman Score=2043.
gagcacccagattcataaagcaagtcctgagtgacctacaaagagacttagactcccacacattaataatgggagactttaacaccccactgtcaacattagacagatcaacgagacagaaagtcaacaaggatacccaggaattgaactcagctctgcaccaagtggacctaatagacatctacagaactctccaccccaaatcaacagaatacacatttttttcagcaccacaccacacgtattccaaaattgaccacatacttggaagtaaagctctcctcagcaaatgtaaaagaacagaaattataacaaactatctctcagaccacagtgcaatcaaactagaactcaggattaagaatctcactcaaaaccgctcaactacatggaaactgaacaacctgctcctgaatgactactgggtacataacgaaatgaagctagaaataaagatgttctttgaaaccaacgagaacaaagacacaacataccagaatctctgggacgcattcaaagcagtgtatagagggaaatttatagcactaaatgcccacaagagaaagcaggaaagatccaaaattgacaccctaacatcacaattaaaagaactagaaaagcaagagcaaacacattcaaaagctagcagaaggcaagaaataactaaaatcagagcagaactgaaggaaatagagacacaaaaaacccttcaaaaaattaatgaatccaggagctggttttttgaaaggatcaacaaaatagatagactgctagcaagactaataaagagaaaaagagagaagaatcaaatagatgcaataaaaaatgataaaggggacatcaccaccaatcccacagaaatacaaactaccatcagagaatactacaaacacctctacgcaaataaactagaaaatctagaagaaatggataaattcctcgacacatacactctcccaagactaaaccaggaagaagttgaatctctgaatagaccaataacaggatctgaaattgtggcaataatcaatagcttaccaaccaaaaagagtccaggaccagatggattcacagccgaattctaccagaggtacaagaaggaactggtaccattccttctgaaactattccaatcaatagaaaaagagggaatcctccctaactcattttatgaggccagcatcattctgataccaaagccaggcagagacacaaccaaaaaagagaattttagaccaatatccttgatgaacattgatgcaaaaaccctcaataaaatactggcagaccgaatccagcagcacatcaaaaagcttatccaccatgatcaagtgggcttcatccctgggatgcaaggctggttcaatatacacatatcaataaatgtaatccagcatataaacagagccaaagacaaaaaccacatgattatctgcatagatgcagaaagggcctttgacaaaattcaacaacccttcatgctaaaaactcttaataaattagtgttggaagttctggccagggcaattaggcaggagaaggaaataaagggtattcaagtaggaaaagaggaagtcaaattgtccctgtttgcagatgacatgattgtatatctagaaaaccccattgtctcagcccaaaatctccttaagctgataagcaacttcagcaaagtctcaggatacaaaatcaatgtacaaaagtcacaagcattcttatacaccaataacagacaaacagagagccaaatcatgagtgaactcccattcacaattgcttcaaagagaataaaatacctaggaatccaacttacaagggatgtgaaggacctcttcaaggagaactacaaaccactgctcaacgaaataaaagaggatacaaacaaatggaagaacattctatgctcatgggtaggaagaattaatatcgtgaaaatggccatactgcccaaggtaatttacagattcaatgccatccccatcaagctaccaatgcctttcttcacagaattggaagaaactactttaaagttcatatggaaccaaaaaagagcccgcattgccaaggcaatcctaagccaaaagaaaaaagctggaggcatcacactacctgacttcaaactatactacaaggctacagtaaccaaaacagcatggtactggtaccaaaacacagatatagaacaatggaacagaacagagccctcagaaataatgctgcatatctacaactatctgatctttgaccaacctgagaaaaacaagcaatggggaaaggattccctatttaataaatggtgctgggaaaactggctagccatatgtagaaagctgaaactggatcccttccttacaccttatacaaaaatcaattcaagatggattaaagacttaaacgttagacctaaaaccataaaaaccctagaagaaaacctaggcattaccattcaggacataagcatgggtaaggacttcatgtctaaaacaccaaaagcaaaggcaacaaaagccaaaattgacaaatgggatctaattaaactaaagagtttctgcacagcaaaagaaactaccatcagagtgaacaggcaacctacaaaatgggagaaaattttcgcaacctactcatctgacaaagggctaatatccagaatctacaatgaactcaaacaaatttacaagataaaaacaaacaaccccatcgaaaagtgggtgaaggacatgaacagacacttctcaaaagaagacatttatgcagccaaaaaacacatgaaaaaatgctcatcatcactggccatcagagaaatgcaaatcaaaaccactatgagataccatctcacagcagttagaatggcaatcattaaaaagtcaggaaacaacagtctaattgtcggcgccagcatggacacctccctcctctccgggccgattccgtatgatatacaacactttgatcgtttcggaagcgtgacagttcgacgcgggtgcgcgatcgagttttacaacac

SEQ ID NO: 14772 - DNA, 2928 bp, Homo sapiens
  SIMILAR (940)..(1977): 961254mologous to Homo sapiens putative p150,accession number U93563,Smith-Waterman Score=1793.
atggaggaaactgcccccatgattcaattatctccacctggccctgctcttgacatgtggggaattattacaattcaagatttcaataagtgtatgactcttaaattccggttaaaaaatttttcaaggatcaacaaaattgatacaccgctagcaagactaataaagaagaaaagagagaagaatcgaatagacacaataaaaaatgataaaggggatatcaccagtaatcccacagaaatacaaagtaccatcagagaatactacaaacacctctacacaaataaactagaaaatctagaagaaatggataaattcctcgacacatacaccctcccaagactaaaccaggaagaagttgaatctctgaatagaccaataacaggctctgaaattatggcaataatcaatagcttaccaaccaaaaagagtccaggaccagatggattcacagccaaattctaccagaggtacaaggaggaactggtaccattccttctgaaactattccaatcaatagaaaaagagggaatcctccctaactcattttatgaggccagcatcatcctgataccaaagccgggcagagacacaaccaaaaatgagaattttagaccaatatctttgatgaacattgatgcaaaaatcctcaataaaatactggcaaaccgaatccagcaacacatcaaaaagcttatccaccatgatcaagtgggcttcatccctgggatgcaaggctggttcaatatacgcaaatcaataaatgtaatccagcatataagcagaaccaaagacaaaaaccacatgattatctcaatagatgcagaaaaggcctttgacaaaattcaacaacccttcatgctaaaaactctcaataaattagggaataaaatacctaggaatccaacttacaagggatgtgaaggacctcttcaaggagaggtccttgaaccactgctcaatgaaataaaagaggatacaaacaaatggaagaacattccatgctcatgggtaggaagaatcaatatcgtgaaaatggccatactgcccaaggtaatttatagattcaatgccatccccatcaagctaccaatgactttcttcacagaattggaaaaaactactttaaagttcatatggaaccaaaaaagagccctcatcgccaagtcaatcctaagccaaaagaacaaagctggaggcatcacgctacctgacttcaaactatactacaaggctacagtaaccaaaacagcatggtactggtaccaaaacagagatatagatcaatggaacagaacagagccctcagaaataacgctgcatatctacaactatctcatctttgacaaacctgagaaaaacaagcaatggggaaaggattccctatttaataaatggtgctgggaaaactggctagccatatgtagaaagctgaaactggatcccttccttacaccttatacaaaaattaattcgagatggattaaagacttaaacgttagacctaaaaccataaaaaccctagaagaaaacctaggcattaccattcaggacataggcatgggcaaggactacatgtctaaaacaccaaaagcaatggcaacaaaagccaaaattgacaaatgggatctaattaaactcaagagcttctgcacagcaaaagaaactaccatcagagtgaacaggcaacctacaaaatgggagaaaattttcgcaacctactcatctgacaaagggctaatatccagaatctacaatgaactcaaacaaatttacaagaaaaaaacaaacaaccccatcaaaaagtgggtgaaggacatgaacagacacttctcaaaagaagacatttatgcagccaaaaaacacatgaaaaaatgctcaccatcactggccatcagagaaatgcaaatcaaaaccacaatgagataccatctcacaccagttagaatggcaatcattaaaaagtcaggaaacaacagccccacatgcgtcagtcaggattggaaattgacgcaggctgtggggctctggagtgctgaggcagaagcgccgaagtccgctcagcggcgcccactagcggaaggccacagagcggcggtgcaacgggacggctcagggctccaactgctctgcactgtgaagctgcaagtcctcccttgcatcatcgcacagggaaacggagggagaaaggccaccagctccttagaggcagagttgacctcttggcggccattatgtttagaggacggcactggcttcagaggggaagatacattggaaacagttaatgcagaaggcagggaaaataggaggaaagcaggccacagggcagcaggatcatctgcctcacggcgatgtagaaacacaggaaggagtgtgcaaagactaaggccccagaagacccaggctttcccgacccactgccacttctgcctcatcttagtggtcaaagctacacagctaaacccaaaatcaagggtgaggaaagttccctttgcccccatgaaacatggcaaagcactggcagggccatgggctaatatatgtgctggcaagtcttccaatgagatccggacgtgtgaccgccatggctgtggacagtactctgctcaaagaagtcagaggcctcaccagggtgtggacatcttgtgctctgctggatctactgtgtacgcaccattcactggaatgattgtgggccaggagaaaccttatcaaaacaagaatgctatcaataatggtgttcgaatatctggaagaggtttttgtgtcaaaatgttctacattaagccaattaagtataaaggtcctattaagaagggagaaaaacttggaactctattgcccttgcagaaagtttatcctggcatacaatcgcatgtgcacattgaaaactgtgactcgagtgaccctactgcatacctgtaa

SEQ ID NO: 14773 - DNA, 2580 bp, Homo sapiens
  SIMILAR (687)..(556): 951254mologous to Homo sapiens Amino acid sequence of a human secreted protein,accession number Y30721,Smith-Waterman Score=219.
atgggagactttaacaccccactgtcaacattagacagatcaatgagacagaaagtcaacaaggatacccaggaattgaactcagctctgcaccaagcaaacctaatagacatctacagaactctccaccccaaatcaacagaatatacatttttttcagcaccacaccacacctattccaaaattgaccacatacttggaagtaaagctctcctcagcaaatgtaaaagaacagagattataacaaactatctctcagaccacactgcaatcaaactagaactcaggattaagaatctcactcaaaaccgctcaactacatggaaactgaacaacctgctcctgaatgactactggatacataacgcaatgaaggcagaaataaagatgttctttgaaaccaacgagaacaaagacacaacataccagaatctctgggacacattcaaagcagtgtgtagagggaaatttatagcactaaatgcccacaagagaaagcaggaaagatccaaaattgacaccctaacatcacaattaaaagaactagaaaagcaagagcaaacacattcaaaagatagaagaaggcaagaaataactaaaatcagagcagaactgaaggaaatagagacacaaaaaacccttcaaaaaattaatgaatccaggagctggttttttgaaaggatcaacaaaattgatagaccgctagcaagactaataaagaaaaaaagagagaagaatcaaatagacacaataaaaaatgataaaggggatatcaccaccgatcccacagaaatacaaactaccatcagagaatactacaaacacctctacgcaaataaactagaaaatctagaagaaatggataaattcctcgacacatacactctcccaagactaaaccaggaagaagttgaatctctgaatagaccaataacaggctctgaaattgtggcaataatcaatagtttaccaaccaaaaagagtccaggaccagatggattcacagccgaattctaccagaggtacaaggaggaactggtaccattccttctgaaactattccaatcaatagaaaaagagggaatcctccctaactcattttatgaggccagcatcattctgataccaaagccgggcagagacacaaccaaaaaagagaattttagaccaatatccttgatgaacattgacgcaaaaatcctcaataaaatactggcaaaacgaatccagcagcacatcaaaaagcttatccaccatgatcaagtgggcttcatccctggcatgcaaggctggttcaatatacgcaaatcaataaatataatccagcatataaacagagccaaagacaaaaaccacatgattatctcaatagatgcagaaaaagcctttgacaaaattcaacaacccttcatgctaaaaactctcaataaattagaattggaaaaaactactttaaagttcatatggaaccaaaaaagagcccgcatcgccaaggcaatcctaagccaaaagaacaaagctggaggcatcacactacctgacttcaaactatactacaaggctacagtaaccaaaacagcatggtactggtaccaaaacagagatatagatcaatggaacagaacagagccctcagaaataacgccgcatatctacaactatctgatctttgacaaacctgagaaaaacaagcaatggggaaaggattccctatttaataaatggtgctgggaaaactggctagccatatgtagaaagctgaaactggatcccttccttacaccttatacaaaaatcaattcaagatggattaaagacttaaatgttagacctaaaaccataaaaaccctagaagaaaacctaggcattaccattcaggacataggcatgggcaaggacttcatgtccaaaacaccaaaagcaatggcaacaaaagacaaaattgacaaatgggatctaattaaactaaagagcttctgcacagcaaaagaaactaccatcagagtgaacaggcaacctagaaaatgggagaaaattttcgcaacctactcatctgacaaagggctaatatccagaatctacaatgaactcaaacaaatttacaagaaaaaaacaaacaaccccatcaaaaagtgggcgaaggacatgaacagacacttctcaaaagaagacatttatgcagccaaaagacacatgaaaaaatgctcatcatcactggccatcagagaaatgcaaatcaaaaccacaatgacataccatctcacaccagttagaatggcaatcattaaaaagtcaggaaacaacaggtgccagcagaaggatgggaccctccagattctgcaggagaagggggaggactcctccttgccctggcggcacctccactgctgccaccgaggccgacggtacagcacccacagcttcctacccacgccaggccaggtggctccgcagtgctcctactcccacttcccaggacccccagacttgctgctgctgccaccactaaggccaatgccaatacaaccactgctgctgtcaccctcgatgcaccggcactccctacaaggcccctactag

SEQ ID NO: 14774 - DNA, 5725 bp, Homo sapiens
  SIMILAR (1)..(906): 901254mologous to Homo sapiens CTCF,accession number U25435,Smith-Waterman Score=1392.
tttgaataaagcatctaagagagaacacttgagttcaacagagaagtcacaggaaatactggagacatggaaggagtacaaagagacttagactcccacacattaataatgggagactttaacaccccactgtcaatattagacagatcaacgagacagaaagtcaacaaggatacccaggaattgaactcagctctgcaccaagcggacctaatcgacatctacagaactctccaccccaaatcgacagaatatacatttttttcagcaccacaccatacctattccaaaattgaccacatacttggaagtaaagctctcctcagcaaatgtaaaagaacagaaattataacaaactgtctctcagaccacagtgcaatcaaactagaactcaggattaagactctcactcaaagccactcaactacatggaaactgaacaacctgctcctgaatgactactgggtacataacgaaatgaaggcagaaataaagatgttctttgaaaccaacgagaacaaagacacaacataccagaatctctgggacgcattcaaagcagtgtgtagagggaaatttatagcactaaatgcccacaagagaaagcaggaaagatccaaaattgacaccctaacatcacaattaaaagaactagaaaagcaagagcaaacacattcaaaagctagcagaaggcaagaaataactaaaatcagagcagaactgaaggaaatagagacacaaaaaacccttcaaaaaatcaatgaatccaggagctggttttttgaaaggatcaacaaaattgatagaccgctagcaagactaataaagaaaaaaagagagaagaatcaaatagacacaataaaaaatgataaaggggatatcaccactgatcccacagaaatacaaactaccatcagagaatactacaaacacctctacgcaaataaactagaaaatctagaagaaatggatacattcctcgacacatacactctcccaagactaaaccaggaagaagtcgaatctctgaatagaccaataacaggagctgaaattgaggcaataatcaatagtttaccaaccaaaaagagtccaggaccagatggattcacagccgaattctaccagaggtacaatgaggagctggtaccattccttctgaaactattccaatcaatagaaaaagagggaatcctccctaactcattttatgaggccagcatcattctgataccaaagccaggcagagacacaaccaaaaaagagaattttagaccaatatccttgatgaacattgatgcaaaaatcctcaataaaatactggcaaaccgaatccagcagcacatcaaaaagcttatccaccatgatcaagtgggcttcatccctgggatgcaaggctggttcaatatacgcaaatcaataaatgtaatccagcatataaacaaagccaaagacaaaaaccacattattatctcaaggaagcattccctttgaaaactggcacaagacagggatgccctctctcaccgctcctattccatagtgttggaagttctggccagggcaatcaggcagaagaaggaaataaagggtattcaattaggaaaagaggaagtcaaattgtccctgtttgcagacgacatgattgtttatctagaaaaccccattgtctcagcccaaaatctccttaagctgataagcaacttcagcaaagtctcaggatacaaaatcaatgtacaaaaatcacaagcattcttatacaccaagaacagacaaacagagagccaaatcatgagtgaactcccattcacaattgcttcaaagagaataaaatacctaggaatccaacttacaagggatgtgaaggacctcttcaaggagaactacaaaccactgctcaaggaaataaaagaggacacaaacaaatggaagaacattccatgctcatgggtaggaagaatcaatatcgtgaaaatggccatactgcccaaggtaatttacagattcaatgccatccccatcaagctaccaatgactttcttcacagaattggaaaaaactactttaaagttcatatggaaccaaaaaagagcccgcatcgccaagtcaatcctaagccaaaagaacaaagttggaggcatcacactacctgacttcaaactatactacaaggctacagtaaccaaaacagcatggtactggtaccaaaacagagttatagatcaatggaacagaaaagagccctcagaaataacaccgcatacctacaactatctgatctttgacaaacctgagaaaaacaagcaatggggaaaggattccctatttaataaatggtgctgggaaaactggctagccatatgtagaaagctgaaactggatcccttccttacaccttatacaaaaatcaattcaagatggattaaagatttaaatgttagacctaaaaccataaaaaccctagaagaaaacctaggcattaccattcaggacataggcatgggcaaggacttcatgtccaaaacaccaaaagcaatggcaacaaaagccaaaattgacaaatgggatctaattaaactaaagagcttctgcacagcaaaagaaactaccatcagagtgaacaggcaacctacaacatgggagaaaattttcacaacctactcatctgacaaagggctaatatccagaatctacaatgaactcaaacaaatttacaagaaaaaaacaaacaaccccatcaaaaagtgggtgaaggacatgaacagacacttctcaaaagaagatatttatgcagccaaaaaacacatgaaaaaatgctcatcatcactggccatcagagaaatgcaaatcaaaagcttccagaggaaggatcaggcagcaatatttgctattctgcagcctccactggtgataaccaggcaaacagggtctggagtggacctgaagcaaactccaacagacctgaagctgagggacctaactgttagaagaaaaatgaacaaacagaaagaaagatagagagaaaccagaggagaagttaaaaattctaaaaaccagagcacctctgctcctccaaaggactgcagttccttggccgatcccaaaaaaatacaaactaccatcagagaatactataaacacctctatccaaataaactagaaaatcaagaagaaatggataaatttctggacacatacaccctcccaagattaaaccaggaagaagttgaatctctgaatagaccaataacaggttctgaaattgtggcaataatcaatagcttaccaaccaaaaagagtccaggaccagatggattcacagccgaattctaccagaggtacaaggaggaactggtaccattccttctgaaactattccaatcaatagaaaaagagggaatcctccctaactcattttatgaggccagcatcatcctgataccaaagctgggcagagacacaaccaaaaaagagaattttagaccaatatccgtgatgaacattgatgtaaaaatcctcaataaaatactggcaaaccgaatccagcagcacatcaaaaagcttatccaccatgatcaagtgggcttcatccctgggatgcaaggctggttcaatatacacaaatcaataaatgtaatccagcatataaacagaaccaaagacaaaaaccacatgattatctcaatacatgcagaaaaggcctttgacaaaattcaacaacacttcatgctaaaaactctcaataaattaggtattgatgggacgtatctcaaaataataagagctatctatgacaaacccacagccaatatcatactgaatgggcaaaaactggaagcattccctttgaaaattggcacaagacagggatgccctctctcaccactcctattcaacatagtgttggaagttctggccagggcaattaggcaggagaaggaaataaagggtattcaattaggaaaagaggtagtcaaattgtccctgtttgcagatgacatgattgtatatctagaaaaccccatcgtctcagcccaaaatctccttaagctgataagcaactttggcaaagtctcaggatacaaaatcaatgtacaaaaatcacaagcattcttatacaccaataacagacaaacagagagccaaatcatgagtgaactcccattcacaattgcttcaaagagaataaaatacctaggaatccaacttacaagggatgtgaaggacctcttcaaggagaactacaaaccactgctcaatgaaataaaagaggatacaaacaaatggaagaacattccatgctcatgggtaggaagaatcaatatcgtgaaaatggccgtactgcccaagctaccaatgactttcttcacagaattggaaaaaaactactttaaagttcatatggaaccaaaaaagagcccgcatcgccaagtcaatcctaagccaaaagaacaaagctggaggcatcacgctacctgacttcaaactatactacaaggctacagcaaccaaaacagcatggtactggtaccaaaacagagatctagatcaatggaacagaacagagccctcagaaataacaccacatatctacaactatctgatctttgacaaacctgacaaaaataagcaatggggaaaggattccctatttaataaatggtgctgtgaaaactggctagccatatgtagaaagctgaaactggatcccttccttacaccttatacaaaaattaattcaagatggattaaagacttaaacattagacctaaaaccataaaaaccctagaagaaaacctaggcattaccattcaggacataggcatgggcaaggacttcatgtctaaaacaccaaaagcaatggcaacaaaagccaaaattgacaaatgggatctaattaaacaagagagcttctgcacagcaaaagaaactaccatcagagtgaacaggcaacctacaaaatgggagaaaattttcgcaacctactcatctgacaaagggctaatatccagaatctacagtgaactcaaacaaatttacaagaaaaaaacaaacaaccccatcaaaaagtgggcgaaggacatgaacagacacttctcaaaagaagacatttatgcagccaaaaaacacatgaaaaaatgcccatcatcactggccatcagagaaatgcaaatcaaaaccacaatgagataccatctcacaccagttagaatggccatcattaaaaagtcaggaaacaacaggtgctggagaggatgtggagaaataggaacacttttacactgttggtgggactgtaaactagttcaaccattgtggaagtcagtgtggcgattcctcagggatctagaactagaaataccatttgacccagccatcccattactgggcatacacccaaaggactataaatcatgctgctataacgacacatgcacacctgttatctctggtctgaaggtacttaagaaagtagctgagcccctcagtccaggccatggtctcatggtcagtcttgcagtcttgtccccatttctgcttcctggggcaacggaaagtaagaccgccataggaatgttggaatttctggttctggaagtggggccatcggcaatgaaaatctgcatgaagcagggaggaatttgtgctggagtagtgccccaaatccaaggtatactggacttaaaagtccttgaaatttctctgcaacttgcttcagcttct

SEQ ID NO: 14775 - DNA, 6142 bp, Homo sapiens
  SIMILAR (607)..(1695): 921254mologous to Homo sapiens putative p150,accession number U93563,Smith-Waterman Score=1804.
ctaccgccacagctcgcagtccgcagagcagccggagtcgctgaggttgtttctgaggctattcaggcagcccgggctgcctgtgctgcctgtgtcgccgctggcactgccactctgcgcactctgtttggcttgccttcctctttgccgcgcgggcagctgagtgcagctactgctcacggctcctcccgccccgacagttcgccgactgcaaggagccagtgccgagccagccctgttctttcctgactttttaatgattgccattctaactggtgtgagatggtatctcattgtggttttgatttgcatttctctgatggccagtgaagatgagaattttttcatgtgttttttggctgcataaatgtcttcttttgagaagtgtctgttcatgtcctttgcccactttttgatggggttgtttgtttttttcttgtaaatttgtttgagttcattgtagattctggagattagccctttgtcagatgagtagattgcaaaaattttctcccattctgtaggttgcctgttcactctgatggtagtttcttttgctgtgcagaagctctttagtttaattagatcccatttgtcaattttggcttttgttgccattgcttttggtgttttagacatgaagtccttgcccatgcctatgtcctgaatggtaatgcctaggttttcttctagggtttttatggttttaggtctaatgtttaagtctttaatccatcttgaattgatttttgtataaggtgtaaggaagggatccagtttcagctttctacatatggctagccagttttcccagcaccatttattaaatagggaatcctttccccattgcttgtttttctcagggttgtcaaagatcagatagtcgtagatatgcggcgttatttctgagggcactgttctgttccattgatctatatctctgttttggtaccagtaccatgctgttttggaaactgtagccttgtagtatagtttgaagtctggtagtgtgatgcctccagctttgttcttttggcttaggattgacttggcgatgtgggctcttttttggttccatatgaactttaaagtagttttttccaattcttgggcagtatggccattttcacgatattgattcttcctacccatgagcatggaatgtttttccatttgtttgtattctcttttatttccttgatcagtggtttgtagttctccttgaagaggtccttcacatcccttgtaagttagattcctaggtattttattctcctttatttccttctcctgcctaattgccctggccagaacttccaacactatgttgaataggagtggtgagaaagggcatccatgtcttgtgcccgttttcaaagggaatgcttccagtttttgcccattcagtatgatattggctgtgggtttgtcatagatagctcttattattttgaaatatgtcccatcgataactaatttattgagagtttttagcatgaagcattgttgaattttgtcaaagggcttttctgcatctattgagataatcaggtggtttttgtctttggctctgtttatatgctggattacatttattgatttgcgtatattgaaccagccttgcatcccagggatgaagcccacttgatcatggtggataagctttttgatgtgctgctggattcggtttgccagtattttattgaggatttttgcatcaatgttcatcaaggatattggcctaaaattctcttttttgcttgtgtctctgtcaggctttggtatcagaatgatgctggcctcataaaatgagttagggaggattccctctttttctattgattggaatagtttcagaaggaatggtaccagttcctccttgtacctctggtagaattcagctgtgaatccatctggtcctggactctttttggttgtgttggaagttctggccagggcaattaggcaggagaaggaaataaagggtattcaattaggaaaagaggaagtcaaattgtccgtgtctgcagatgacatgattgtatatctagaaaaccccattgtctcagcccaaaatctccttaagctgataagcaacttcagcaaagtctcaggatacaaaatcaatgtgcaaaaatcacaagcattcctatacaccaacaacagacagagagccaaatcaataaaatacctaggaatccaacttacaagggatgtgaaggacctcttcaaggagaactacaaaccactgctcaaggaaataaaagaggatacaaacaaatggaagaacattccatgctcatgggtaggaagaatcaatatcgtgaaaatggccatactgcccaaggtaatttacagattcaatgccatccccatcaagctaccaatgcctttcttcacagaattggaaaaaactactttaaagttcatatggaaccaaaaaagagcccgcatcgccaagtcaatcctaagccaaaagaacaaagctggaggcatcacactacctgacttcaaactatactacaaggctacaataaccaaaacagcgtggtactggtaccaaaacagagatatagatcaatggaacagaacagagccctcagaaataacaccgcatatctacaactatctgatctttgacaaacctgagaaaaacaagcaatggggaaaggattccctatttaataaatggtgctgggaaaactggctagccgtatgtagaaagctgaaactggatcccttccttacaccttatacaaaaatcaattcaagatggattaaagacttaaatgttagacctaaaaccataaaaaccctagaagaaaacctaggcattaccattcaggacataggcatgggcaaggacttcatgtctaaaacaccaaaagcaatggcaacaaaagccaaaattgacaaatgggatctaattaaactaaagagcttctgcacagcaaaagaaactaccatcagagtgaacaggcaacctacaaaatgggagaaaattttcgcaacctactcatctgacaaagcactaatatccagaatctacaatgaactcaaacaaatttacaagaaaaaaacaaacaaccccatcaaaaagagggcgaaggacatgaacagacacttctcaaaagaagacatttatgcagccagaaaacacatgaaaaaatgctcaccgtcactggccatcagagaaatgcaaatcaaaaccacaatgagataccatctcacaccagttagaatggcaatcattaaaaagtcaggaaacaacagtcataccccagcagcaactggctgcatggcatggagagagaatctgtgcatttgggagaggaacagcacagtgattgtgagacgtagcattggacacagtgctgccctgtcacagcagaaagcaacaccaggcttaactcaactgaatactgcccatagagggaccatttggaccagccctacacagaggggaaccactaatccctgcgattggaaagagagctctggctggcatcaggtgaatgccgctctgggacgaagcttccagaggaaggaattggcagcaatctttgctgttctgcagcctttgctagtgatacccaggaaaacagggtctagagtggacatccagcaaactccagcagacctgcagcagagaggcctgactgttagaaggaaaactaatgaacagagaggaatagcatcaacatcaacaaaaaggatttccacacagaaaccccatccaaaggtcaccaacatcaaagagcaaagtgaatactataaatacctctatgcaaataaactagaaaatctagaagaaattgttaaattcctggacacatacacccccccaagactaaaccaggaagaagtcaaatccctgactagaccaataacaagttctgaagttgaggcagtaattaatagcataccaaccaaaaaaagcccagaaccagacagattcacagctgaattctaccagaagtacaaacaggagctggtaccatttgttctgaaactattccaaacaacagaaaaagagggaatcctccttaacttactctacgaggccagcatcatcctgataccgaaacctgagagagacacaaccaaaaaagagaattttagaccaatatccttgatgaacattgatgcaaaaatcctcaataaaatactggcaaaccgaatccagcagtacatcaaaaagcttattcaccatgatcaagtgggcttcatccctgggatgcaaggctggttcaacatacgcaaatcaataaatgtaatccagcatataaacagaaccaaagacaaaaaccacatgattatctcaatagatgtagaaaaggcctttgacaaaattcaacaacccttcatgctaaaaactctcaataaattagagaataaaataactaggaatccaacttacaagggatgtgaagcacctcttcaaggagaactacaaaccactgctcaaggaaataaaagaggatacaaacaaatggaagaacattccatgctcatgggtaggaagaatcaatatcgtgaaaatggccatactgcccaagaattggaaaaaacgactttaaagttcatatggaaccaaaaaagagcctgcatcaccaagtcaatcctaagccaaatgaacaaagctggaggcatcacactacctgacttcaaactatcttacaaggctacagtaaccaaaacagcatggtactggtaccaaaatagagatatagatcaatggaacagaacagagccctcagaaataacgccacatatctacaactatctgatatttgacaaacctgagaaaaacaagcaatggggaaaggattccctatttaataaatggtgctgggaaaactggctagccatatgtagaaagctgaaactggatcccttccttacaccttatacaaaaatcaattcaagatggattaaagacttaaacattctacctaaaaccataaaaaccctagaagaaaacctaggcattaccattcaggacatagacatgggcaaggacttcatgtctaaaacaccaaaagcaatggcaacaaaagccaaaattgacaaatgggatctaattaaactaaagagcttctgcacagcaaaagaaactaccatcagagtgaacaggcaacctacaaaatgggagaaaattttcacaacctactcatctgacaaagggctaatatccagaatctacaatgaactcaaacaaatttacaagaaaaaaacaaacaaccccatcaaaaagtgggcaaaggacataaacagacacttctcaaaagaagacatctatgcagccaaaaaacacatgaaaaaatgttcatcatcactggccatcagagaaatgcaaatcaaaaccacaatgagataccatctcacaccagttagaatggcaatcattaaaaagtcaggaaacaacagaatcaaagttgtaaaactacaaattgttcttcaaatgaagccccagatgcagtccatgactaagatccaccgcggacccctggacaggcctgctagcccatgttccgatgctagtgacatcgaaggcacccctcccgaggaaatctcaactgcacgacccctactatgcgccagttcagcaggaaacaattttagcacaggtcatggggcctgtccacccactggccgagaggtgccagtagtagcattagatgcttctccccctacaactgtggctgcaacaaggggaaggtacgctgtttacttcctgctcccaaaaatatgcaagctttgtttcctgctgctaagatgccctgagaaaccaatgcatattagtaatcatagcccctctggaccatgtgagggaggttcagaggccagctgtatcctctgccccaaaggaccacctttgcagacagaggcactgaagactgtggaaccaaacgaaaccatcatcctaggtggctctgttggacttaatataggccattatatttctaaccaatataaacagaattcttctttaaaggatttaccccacacaatatcgccagaagcagggtcatcaacaagtcttatggttagaacagactggtgttctcatcctttcagtcacttggcaaatatggccacccttccaccttcaacttcacatgataaaggagcaggttga

SEQ ID NO: 14776 - DNA, 2876 bp, Homo sapiens
  SIMILAR (369)..(175): 981254mologous to Cloning vector pZC320 SopA,accession number U26464,Smith-Waterman Score=335.
atgaaggcagaaataaaggtgttctttgaaaccaacgagaacaaagacacaacataccagaatctctgggacacattcaaagcagtgtgtagagggaaatttatagcactaaatgcccacaagagaaagcaggaaagatccaaaattgacaccctaacatcacaattaaaagaactagaaaagcaagagcaaacacattcaaaagctagcagaaggcaagaaataactaaaatcagagcagaactgaaggaaatacagacacaaaaaacccttcaaaaaatcaatgaatccaggagctggttttttgaaaggatcaacaaaattgatagatcgctagcaagactaataaagaaaaaaagagagaagaatcaaatagacacaataaaaaatgataaaggggatatcaccaccgatcccacagaaatacaaactaccatcagagaatactacaaacacctctatgcaaataaactagaaaatctagaagaaatggataaattcctcgacacatacactctcccaagactaaaccaggaagaagttgaatctctgaatagaccaataacaggagctgaaattgtggcaataatcaatagtttaccaaccaaaaagagtccaggaccagatggattcacagccgaattctaccagagctgggcagagacacaaccaaaaaaagagaattttagaccaatatccttgatgaacattgatgcaaaaatcctcaataaaatactggcaaaacgaatccagcagcacatcaaaaagcttatccaccatgatcaagtgggcttcatccctgggatgcaaggctggttcaatatacgcaaatcaataaatgtaacacagcatataaacagagccaaagacaaaaaccacatgattatctcaatagatgcagaaaaagcctttgacaaaattcaacaacccttcatgctaaaaactctcaataaattaggtattgatgggacgtatttcaaaataataagagctatctatgacaaccccacagccaatatcatactgaatgggcaaaaactggaagcattccctttgaaaactggcacaagacagggatgccctctctcaccactcctattcaacatagtgttggaagttctggccagggcaattaggcaggagaaggaaataaagggtattcaattaggaaaagaggaagtcaaattgtccctgtttgcagacaacatgattgtatatctagaaaaccccattgtctcagcccaaaatctccttaagctgataagcaacttcagcaaagtctcaggatacaaaatcaatgtacaaaaatcacaagcattcttatacaccaacaacagacaaacagagagccaaatcatgagtcaactcccattcacaattgcttcaaagagaataaaatacctaggaatccaacttacaagggatgtgaaggacctcttcaaggagaactacaaaccactgctcaaggaaataaaagaggatacaaacaaatggaaaaacattccatgctcagggggaaggaagaatcaatatcgtgaaaatggccataactgcccaagaattggaaaaaaactactttaaagttcatatggaaccaaaaaagagcctgcatcgccaagtcaatcctaagccaaaagaacaaagctggaggcatcacactacctgacttcaaactatactacaaggctacagtaaccaaaacagcatggtactggtaccaaaacagagatatagatcaatggaacagaacagagccctcagaaataatgccacttatactacaactatctgatctttgacaaacctgagaaaaacaagcaaaggggaaaggattccctatttaataaatggtgctgggaaaactggctagccatatgtagaaagctgaaactggatcccttccttacaccttatacaaaaattaattcacgatggcttaaagacttaaatgttagaactaaaaccataaaaaccctagaagaaaaactaggcataaccattcaggacataggcctgggcaaggacttcatgtctaaaataccaaaagcaatggcaacaaaagcccaaaattgacaaatgggatctaattcaactaaagagcttctgcacagcaaaagaaactaccatcagagtgaacaggcaacctacaaaatgagagaaaatattcgcaacctactcatctgacaaagggctaatatccagaatctacaatgaactcaaacaaatttacaagaaaaaaaacaaacaaccccatcaaaaaatgggcaaaggacatgaacagacactcctcaaaagaagacatttatgcagccaagaaacacatgaaaaagtgctcatcatcactggccatcagagaaatgcaaatcaaaaccacaatgagataccatctcacaccagttagaatggtgatcattaaaatgtcaggaaacaacaggtgctggagaggatgtggagaaacaggaacgcttttacactgttggtgggactgtaaactagctcaaccattgtggaagtcagtgtggcgattcctcagggatctagaactagaaataccatttgacccagccatcccattactgggtatatacccaaatgactataaatcatgctgctataaagacacatgcacacgtatgtttattgcggcattattcacaatagcaaagacttggaaccaacccaaatgtccaacaattatagactggattaagaaaatgtggcacatatacaccatggaatactatgcagccataaaaaatgatgagttcgtgtcctttgtagggacatggatgaaattggaaatcatcattctcagtaaactatcacaagaacaaaaaaccacacaccgcatattctcactcataggtgggaattga

SEQ ID NO: 14777 - DNA, 4462 bp, Homo sapiens
  SIMILAR (1666)..(2580): 931254mologous to Homo sapiens putative p150,accession number U93563,Smith-Waterman Score=1454.
atgggagactttaacaccccactgtcaacattagacagatcaatgagacagaaagtcaaaaaggatacccaggaattgaactcagctctgcaccaagcagacctaatagacatctacagaactctccaccccaaatcaacagaatatacatttttttcagcaccacaccacacctattccaaaattgaccacatacttggaagtaaagctctcctcagcaaatgtaaaagaacagaaattataacaaactatctctcagacggcagtgcaatcaaactagaactcaggattaagaatctcactcaaaaccgctcaactacatggaaactgaacaacctgctcctgaatgactactgggtacctaacgaaatgaaggcagaaataaagatgttctttgaaaccaacgagaacaaagacacaacataccagaatctctgggacgcattcaaagcagtgtgtagagggaaatttatagcactaaatgcccacaagagaaagcaggaaagatccaaaattgacaccctaacatcacaattaaaagaactagaaaagcaagagcaaacacattcaaaagctagcagaaggcaagaaataactaaaatcagagcagaactgaaggaaatagagacacaaaaaacccttcaaaaaattaatgaatccaggagctggttttttgaaaggatcaacaaaatagatagaccgctagcaagactaataaagaaaaaaagagagaagaatcaaatagatacaataaaaaatgataaaggggatatcaccaccaatcccacagaaatacaaactaccatcagagaatactacaaacacctctacgccaataaactagaaaatctagaagaaatggataaattccttgacacatacactctcccaagactaaaccaggaagaagttgaatctctgaatagaccaataacaggatctgaaattgtggcaataatcaatagcttaccaaccaaaaagagtccaggaccagatggattcacagccaaattctaccagaggtacaaggaggaactgcatataaacagagccaaagacaaaaaccacatgattatctcaatagatgcagaaaaggcctttgacaaaattcaacaacgcttcatgctaaaaactctcaataaattagtgttggaagttctggccagggcaattaggcaggagaaggaaataaagggtattcaattaggaaaagaggaagtcaaattttccctgtttgcagacgacatgattgtatatctagaaaaccccattgtctcagcccaaaatctccttaagctgataagcaacttcagcaaagtctcaggatacaaaatcaatgtacaaaaatcacaagcattcttatacaccaacaacagacaaacagagagccaaatcatgagtgaactcccattcataattgcttcaaagagaataaaatacctaggaatccaacttacaagggatgtgaaggacctcttcaaggagaactacaaaccactgctcaaggaaataaaagaggatacaaacaaatgcaagaacattccatgctcatgggtaggaagaatcaatatcgtgaaaatggccatactgcccaaggtaatttacagattcaatgccatccccatcaagctaccaatgcctttcttcacagaattggaaaaaactactttaaagttcatatggaaccaaaaaagagcccgcatcgccaagtcaatcctaagccaaaagaacaaagctggaggcatcatgctacctgacttcaaaccatactacaaggctacagtaaccaaaacagcatggtactggtaccaaaagagagatatagatcagtggaacagaacagagccctcagaaataacgccgcatatctacaactatctgatctttgacaaacctgagaaaaacaagcaatggggaaaggattccctatttaataaatggtgctgggaaaactggctggccatatgtagaaagctgaaactggatcccttccttacaccttatacaaaaatcaattcaagatggattaaagacttaaacgttagacctaaaaccataaaaaccctagaagaaaacctaggcaataccattcaggacataggcatgggcaaggacttcatgtctaaaacaccaaaagcaatggcaacaaaagacaaaattgacaaatgggatctaattaaacttaagagcttctgtacagcaaaagaaactaccatcagagtgaacaggcaacctacaaaatgggagaaaattttcacaacatactcatctgacaaagggctaatatccagaatctacaatgaactcaaacaaatttacaagaaaaaaacaaacaaccccatcaaaaagtgggcaaaggatatgaacagacacttctcaaaagaagacatttatacagccaaaagacacatgaaaaaatgctcatcatcactagccatcagagaaattcaaatcaaacccacaatgagatactatctcacaccagttagaatggcgatcattaaaaagtcaggaaacaacaggtcacagcttcaaaatattgttcagagaacttgcagtgaaagcaacataaaaaggagagcagggatagaaaaaggaatccagtgggcaaaagatgccaactgttcccaagagagtccagtgcgaccatcgcaacaggtgggtgcccctctgggacgaagcttccagaggaaggatcaggcagcaatatttgctgttctgcagcctctgctggtgatacccaggcaaacaaggtctggagtggacctccagcacattccagcaggcctgcagcagaggggcctgactgttagaagaaaaactaacaaacagaaaggaatagcatcaacatcaacaaaagccacatccacacagaaaccccatccaaaagtcaccaacatcaaagaccaaagtattggaagttctggccagggcaatcaggcaagagaaacaaagcgtattcaaataggaagccaggaagtcaaattgtctttgcttgaagatgacatgattgtacatttagaaaaccccatcatctcagccaaaaatctccttcagctgataagcaacttcaccaaagtctcaggatacaaaatcaatgtgcaaaaatcacaagcattcccatacaccaataaaacacaaatagagaaccaaatcatgagtgaactcccattcacaattgctacaaagagaataaaatacctaggaatcaaacttacaagggatgtgaaggacctcttcaagaataactacaaaccgctgttcaaggaaataagagaggacacaaataaatggaaaaacattccatgctcatgggtaggaagaatcaatatcgtgaaaatggccatactgcccaaggtaatttacagattcaatgccatccccatcaagctaccaatgactttcttcacagaattggaagaaactactttaaagttcatatggaaccaaaaaagagcccgcatcgccaagtcaatcctaagccaaaagaacaaagctggaggcatcacgctacctgacttcaaactatactacaaggctacagtaaccaaaacagcatggtactggtaccaaaacagagatagagaccaatggaacagaacagagccctcagaaataatgccacatatctacaactatctgatctttgacaagcctgagaaaaacaagcaatggggaaaggattcccatatttaataaatggtgctaggaaaactggctaaccatatgtaaaaggctgaaactggatcccttccttacaccttataccaaaatcaattcaagatggattaaagacttaaacgttagacctaaaaccataaaaaccctagaagaaaacctaggcattaccattcaggacataggcattggcaaggacttcatgtgtaaaacaccgaaagcaatggcaacaaaagccaaaattgacaaatgggatctaattaaactaaagagcttctgcacagcaaaagaaactaccattagagtgaacaggcaacctacaaaatgggagaaaattttcgcaacctactcatctgacaaagggctaatatccagaatctacaatgaactcaaacaaatttacaagaaaaagacaaacaaccccatcaaaaagtgggcgaaggatatgaacagacacttctcaaaagaagacatttatgcagccaaaaaacacatgaaaaaatgctcatcatcactggccatcagagaaatgcaaatcaaaaccacaatgagataccatctcacaccagttagaatggcgatcattaaaaagtcaggaaacaacaggtgctggagaagatgtggagaaataggaacacttttacactgttggtgggactgtaaaccagttcaaccattgtggaagtcagtgtggcgattcctcagggatctagaactagaaataccatttgacccagccatcccattactgggtatatacccaaagggttataaatcatgctga

SEQ ID NO: 14778 - DNA, 8335 bp, Homo sapiens
  SIMILAR (325)..(492): 781254mologous to Homo sapiens Human secreted protein, SEQ ID NO: 6705,accession number G02624,Smith-Waterman Score=230.
atggggaaaaaacagaacagaaaaactggaaactctaaaatgcagagcgcctctcctcctccaaaggaacgcagttcctcaccagcaacggatcaaagctggatggagaatgactttgacgagctgagagaagaaggtttcagacgatcaaattactctgagctacgggaggacattcaaaccaaaggcaaagaagttgaaaactttgaaaaaaatttagaagaatgtataactagaataaccaatacagagaagtgcttaaaggagctgatggagctgaaaaccaaggctcgagaactacgtgaagaatgcagaagcctcaggagccgatgcgatcaactggaagaaagggtatcagcaatggaagatgaaatgaatgaaatgaagcaagaagggaagatcaaaagagacaaagaaggccattacataatggtaaagggatcaattcaacaagaagagctaactatcctaaatatatatgcacccaatacaggagcacccagattcataaagcaagttctgagtgacctacaaagagacttagactcccacacattaataatgggagactttaacacctcactgttaacattagacagatcaatgagacagaaagtcaacaaggatacccaggaattgaactcatctctgcaccaagcggacctaatagacatctacagaactctccaccccaaatcaatagaatatacatttttttcagcaccacaccacacctattccaaaattgaccacatagttggaagtaaagctctcctcagcaaatgtaaaagaacagaaattataacaaactatctctcagaccacagtgcaatcaaactagaactcaggattaagaatctcactcaaagccgctcaactacatggaaactgaacaacctgctcctgaatgactactgggtacataacgaaatgaaggcagaaataaagatgttctttgaaaccaacgagaacaaagacacaacataccagaatctctgggacgcattcaaagcagtgtgtagagggaaatttatagcactaaatgcccacaagagaaagcaggaaagatccaaaattgacaccctaacatcacaattaaaagaactagaaaagcaagagcaaacacattcaaaagctagcagaaggcaagaaataactaaaatcagagcagaactgaaggaaatagagacacaaaaaacccttcaaaaaatcaatgaatccaggagctggttttttgaaaggatcaacaaaattgatagaccgctagcaagactaataaagaaaaaaagagaggagaatcaaatagacacaataaaaaatgataaaggggatatcaccaccgatcccacagaaatacaaactaccatcagagaatactataaacacctctacgcaaataaaccagaaaatctagaagaaatggataaattcctcgacacatacactctcccaagactaaagcaggaagaagttgaatctctgaatagaccaataacaggagctgaaattgtggcaataatcaatagtttaccaaccaaaaagagtccaggaccagatggattcacagccgaattctaccagaggtacaaggaggaactggtaccattccttctgaaactattccaatcaatagaaaaagagggaatcctccctaactcattttatgaggccagcatcattctgataccaaagccgggcagagacacaaccaaaaaagagaattttagaccaatatccttgatgaacattgatgcaaaaatcctcaataaaatactggcaaaccgaatccagcagcacatcaaaaagcttatccaccatgatcaagtgggcttcatccctgggatgcaaggctgccaatatcatactgaatgggcaaaaactggaagcattcctttgaaaactggcacaagacagggatgccctctctcaccactcctattcaacacagtgttggaagttctggccagggcaatcaggcaggagaaggaaataaagggtattcaattaggaaaagaggaagtcaaattgtccctttttgcagacgacatgattgtttatctagaaaaccccatcgtctcagcccaaaatctccttaagctgataagcaacttcagcaaagtctcaggatacaaaatcaatgtacaaaaatcacaagcattcttatacaccaacaacagacaaacagagagccaaatcatgagtgaactcccattcacaattgcttcaaagagaataaaatacctaggaatccaatttacaagggatgtgaaggacctcttcaaggagaactacaaaccactgctcaaggaaataaaagaggatacaaacaaatggaagaacattccatgctcatgggtaggaagaatcaatatcgtgaaaatggccatactgcccaaggtaatttacagattcaatgccatccccatcaagctaccaatgactttcttcacagaattggaaaaaactactttaaatttcatatggaaccaaaaaagagcccgcatcgccaagtcaatcctaagccaaaagaacaaagctggaggcatcacactacctgacttcaaactatactacaaggctacagtaactaaaacagcatggtactggtaccaaaacagagatatagatcaatggaacagaacagagccctcagaaataacgccgcatacctacaattatctgatctttgacaaacctgagaaaaacaagcaacggggaaaggattccctatttaataaatggtgctgggaaaactggctagccatatgtagaaagctgaaactggatcccttccttacaccttatacaaaaatcaattcaagatggattaaagatttaaacgttagacctaaaaccataaaaatcctagaagaaaacctaggcattaccattcaggacataggcgtgggcaaggacttcatgtccaaaacaccaaaagcaatggcaacaaaagccaaaattgacaaatgggatctaattaaactaaagagcttctgcacagcaaaagaaactaccatcagagtgaacaggcaacctacaacatgggagaaaattttcgcaacctactcatctgacaaagggctaatatccagaatctacaatgaactcaaacaaatttacaagaaaaaaacaaacaaccccatcaaaaagtgggcgaaggacatgaacagacacttctcaaaagaagacatttatgcagccaaaaaatacatgaaaaaatgctcatcatcactggccatcagagaaatgcaaatcaaaaccacaatgagataccatctcacaccagttagaatggcaatcattaaaaagtcaggaaacaacagagacgttggcaatgtggttgaagccatgtatggggaccttcctcctccaattatgctgattggacatagcatgggtggtgctattgcagtccacacagcatcatccaacctggtaccaagcctcttgggtctgtgcatgattgatgttgtagaaggtacagctatggatgcacttaatagcatgcagaatttcttacggggtcgtcctaaaaccttcaagtctctggagaatgctattgaatggagaaatatcaaagatctatcttgggcagatagcatcaagaatgtagctgctgccagcttggcttgtatctcaggtgccctgcctgcttccgcagtaacaacaagcccagataataagaggatggccaggaatgtcttgaaatatgaaaggctcttggcagagagccccaaccacgtggtagctgaggctgtcatccagaggcccaatataccccacctgcagaccagagacacctacgaggggctatgtcagaccctgggttcccagcccactctctaccagatccctagcctctactgttcctatgagaccaattccaacgcctacctgctgctccagcccatccggaaggaggtcatccacctggagccctacattgctctctaccatgacttcgtcagtgactcagaggctcagaaaattagagaacttgcagaaccatgggaacagagctcctcaccagcaacggaacaaagctggatggagaatgactttgatgagttgagagaagaaggcttcagacgatcaaactactccgagctacaggaggaaattcgaaccaatggcaaagaagttaaaagctttgaaaaaaaattagacgaatggataactagaataaccaatgcagagaagtccttaaaggacctgatggagctgaaaaccaaggcacgagagctacgtgacgaatgcagaagcctcagtagccgatgcaatcaactggaagaaagggtatcagtgatggaagacgaaatgaatgaaacgaagcgaggagagaagtttagagaaaaaagaataaaaagaaacgaacaaagcctccaagaaatatgggactatatgaaaagaccaaatctacgtctgattggtgtacctgaaagtgacggggagaatggaaccaagttggaaaacactctgcaggatattatccaggagaacttccccaatctagcaaggcaggccaacattcaaattcaggaaatacagagaacgccacaaagatactccttgagaagagcaaccccaagacacataattgtcagattcaccaaagttgaaatgaaggaaaaaatgttaagggtagccagagagaagggtcgggttacccacaaagggaagcctgtcagactaacagctgatctcttggcagaaactctacaagccagaagacaagacacacataggctcaaaataaagggatggaggaagatttaccaagcaaatggaaaacagaaaaaggcaggggttgcaatcctagtctcagataaaacagaatttaaaccaacaaagatcaaaagagacaaagaaggccattacataatggtaaagggatcaattcaacaagaagagctaactatcctaaatatatatgcacccaatacaggagcacccagattcacaaagcaagtccttagagacctacaaagagacttagactccaacacaataataacgggagactttaacaccccactgtcaacattagacagatcaatgagacagaaagttaacaaggatatccaggaattgaactcagctctgcaccaagcagacctaatagacatctacagaactctccaccccaaatcaacagaaaatacattcttttcggcaccacaccacacctattccaaaattgaccacatagtgggaagtaaagcactcctcagcaaatgtaaaagaaaagaaattataacaaactgtctctcagaccacagtgcaatcaaactagaactcaggattaagaaactccctcaaaactgctcaactatatggaaactgaacaacctgctcctgaatgactactgggtacataacgaaatgaaggcagaaataaagatgttgtttgaaaccaatgagaacaaagacacaacataccagaatctctgggacacattgaaagcagtgtgtagagggaaatttatagcactaaatgcccacgggagaaaacaggaaagatctaaaattgacaccctaacatcacaattaaaagaactagcaaagcaagagcaaacacattcaaaagctagcagaaggcaagaaataactaagatcagagcagaactgaaggaaatagagacacaaaaaacccttcaaaaaattaatgaatccaggagctggtttttaccactagcaagactaataaagaagaaaacagagaagaatcaaatagacgcaataaaaaatgacaaaggggatatcaccaccaatcccacagacatacaaactgccatcagagaatactataaacacctctatgcaaataaactagaaaatctagaagaaatggataaactcctcaacacatataccatcccaagactaaaccaggaagaagttgaacctcggaatagaccaataacaggctctgaaattgaggcaataatcaatagattaccaaccaaaaaatgtccaggaccagatggattcacagccgaattctaccagaggtacaagcaggtaccattccttctgaaactattccaatcaacagaaaaagggggaatcctccctaagtcattttatgaggccagcatcatcctgataccaaagcctggcaaagacacaacaaaaaaagagaattttagaccaatatccctgatgaacattgatgtaaaaatcctcaataaaatactggcaaagcaaatccagcagcacatcaaaaagcttatccaccatgatcaagtgggcttcatccctgggatgcaacgctggttcaacatacgcaaatcaataaatgtaatccagcatataaacagaaccaaagacaaaaaccgcatgattatctcaatagatgcagaaaaggcctttgacaaaattcaacaacgcttcatgctaaaaactctcaataaattaggtattgatgggacgtatctcaaaacaataagagctatctatgacaaacccacagccaatatcatactgaatgggcaaaaactggaagcattccctttgaaaactggcacaagacagggatgccctctctcaccactcctattcaacatggtgttggaagttctggccagggcaattagtcaggagaaggaaataaaggatattcaattaggaaaagaggaagtcaaattgtccctgtttgcagatgacatgattgtatatctagaaaaccccattgtctcagcccaaaatcgccttaagctgataagcaacttcagaaaagtctcaggatacaaaatcaatgtacagaaatcacaagcattcttatacaccaataacagccaaacagagagccaaatcatgagtgaactcccgttcacaactgcttcaaagagaataaaatacctaggaatccaacttacaagggatgtgaaggacctcttcaaggagaactacaaaccactgctcagtgaaataaaagaggatacaaacaaatgcaagaacgttccatgctcatgggtaggaagaatcaatatcatgaaaatggccatactgcccaaggtaatttatagattcaatgccatccccatcaagctaccaatgactttcttcacagaattggaaaaaactactttaaagttcatatggaaccaaaaaagagcctgcatagccaagtcaatcctaagccaaaagaacaaagctggaggcatcacgctacctgacttcaaactatactacaaggccacagtaaccaaaacaacatggtactggtaccaacacagagctgtagaccaatggaacagaacagggccctcagaaataatgccgcatatctacaactatctgatctttgacaaacctgacaaaaacaagcaatggggaaaggattccctatttaataaatggtgctgggaaaactggctagccatatgtagaaagctgaaactgaatcccttccttacaccttatacaaaaattaattcaagatggattaaagacttacatgttagacctaaaaccataaaaaccttagaagaaaacctaggcaataccattcaggtcataggcatgggcaaggacttcatgtctaaaacaccaaaagcaatggcaacaaaagccaaaattgacaaatgggatctaattaaactaaagagcttcttctgcacagcaaaagaaactaccatcagagtgaacaggcaacctacagaatgggagaaaatttttgcaacctactcatctgacaaagggctaatatctagaatctacaatgaactcaaacaaatttacaagaaaaaaacaaacaaccccatcaaaaagtggacaaacgatatgaacagacacttctcaaaagaagacatttatgcagccaaaaaacacatgaaaaaatgctcatcattaccggccatcagagaaatgcaaatcaaaaccacaatgagataccatctcacaccagttagaatcgcgatcattaaaaagtcaggaaacaacagcaaagtggatgatatccatgctatctgtagccttcttaaagactttcttcgaaacttcaaagaacctcttctgacctttcgcctaaacaaagcctttatggaagcagcagaaatcacagatgaagacaacagcatatctgccatgtaccaggctgttggtgaactgccccaggccaacagggacacattggttttcctcatgattcacttgcagagagtggctcagagtccatatactaaaatgaatgttgccaatctggctgaagtctttggctctacaatagtggcccatgctgtgcccaatccagaaccagtgacgatgttacaggacatcaagtgtcaacccaaggtggtcgagcgcctgccttccttgcccctggagtactgga

SEQ ID NO: 14779 - DNA, 3166 bp, Homo sapiens
  SIMILAR (1452)..(484): 901254mologous to Homo sapiens putative p150,accession number U93563,Smith-Waterman Score=1471.
atggtaaagggatcaattcaacaagaggagctaactatcctaaatatttatgcacccaatacaggagcacccagattcataaagcaagtcctgagtgacctacaaagagacttagactcccacacattaataatgggagactttaacaccccactgtcaacattagacagatcaatgagacagaaagtcaacaaggatacccaggaattgaactcagctctgcaccaagcagacctaatagacatctccagaactctccaccccaaatcaacagaatatacatttttttcagcaccacaccacacctattccaaaattgaccacatagttggaagtaaagctctcctcagcaaatgtaaaagaacagaaattataacaaactatctctcagaccacagtgcaatcaaactagaactcaggattaagaatctcactcaaagccgctcaactacatggaaactgaacaacctgctcctgaatgactactgggtacataacgaaatgaaggcagaaataaagatgttctttgaaaccaacgagaacaaagacaccacataccagaatctctgggacgcattcaaagcagtgtgtagagagaagtttatagcactaaatgcctacaagagaaagcaggaaagatccaaaattgacaccctaacatcacaattaaaagaactagaaaagcaagagcaaacacattcaaaagctagcagaaggcaagaaataactaaaatcagagcagaactgaaggaaatagagacacaaaaaacccttcaaaaaatcaatgaatccaggagctggttttttgaaaggatcaacaaaattgatagaccgctagcaagactaataaagaaaaaaagagagaagaatcaaatagacacaataaaaaatgataaaggggatatcaccaccgatcccacagaaatacaaactaccatcagacaatactacaaacacctctatgcaaataaactagaaaatctagaagaaatggatacattcctcgacacatacactctcccaagactaaaccaggaagaagttgaatctctgaatagaccaataacaggctctgaaattgtggcaataatcaatagtttaccaaccaaaaagagtccaggaccagatggattcacagccgaattctaccagaggtacaaggaggaactgccgggcagagacacaaccaaaaaagagaattttagaccaatatccttgatgaacattgatgcaaaaatcctcaataaaatactggcaaaccgaatccagcagcacatcaaaaagcttatccaccatgatcaagtgggcttcatccctgggatgcaaggctggttcaatatacacaaatcaataaatgtaatccagcatataaacagagccaaagacaaaaaccacatgattatctcaatagatgcagaaaaagcctttgacaaaattcaacaacccttcatgctaaaaactctcaataaattaggtattgatgggacatatttcaaaataataagagctatctatgacaaacccacagccaatatcattctgaatgggcaaaaactggaaacattccctttgaaaactggcacaagacagggatgccctctctcacaactcctattcaacatagtgttggaagttctggccagggcaatcaggcaggagaaggaaataaagggtattcaattaggaaaagaggaagtcaaattgtccctgtttgcagacgacatgattgtttatctagaaaaccccatcgtctcagcccaaaatctccttaagctgataagcaacttcagcaaagtctcaggatacaaaatcaatgtacaaaaatcacaagcattcttatacaccaacaacagacaaacagagagccaaatcatgagtgaactcccattcacaattgcttcaaagagaataaaatacctaggaatccaacttacaagggatgtgaaggacctcttcaaggagaactacaaaccactgctcaaggaaataaaagaggacacaaacaaatggaagaacattccatgctcatgggtaggaagaatcaatatcgtgaaaatggccatactgcccaaggtaatttacagattcaatgccatccccatcaagctaccaatgactttcttcacagaattggaaaaaactactttaaagttcatatggaaccaaaaaagagcccacattgccaagtcaatcctaagccaaaagaacaaagctggaggcatcacactacctgacttcaaactatactacaagggctacagtaaccaaaacagcatggtactggtaccaaaacagagatatagatcaatggaacagaacagggccctcagaaataatgccacatatctacaactatctgatctttgacaaacctgagaaaaacaagcaatggggaaaagattccctatttaataaatggtgctgagaaaactggctagccatatgtacaaagctgaaacttgatcccttccttacaccttatacaaaaattaattcaagatggattaaagacttaaacgttagacctaaaaccataaaaaccctagaagaaaacctaggcattaccattcaggacataggcgtgggcaaggacttcatgtccaaaacaccaaaagcaatggcaacaaaagccaaaattgacaaatgggatctaattaaactaaagagcttctgcacagcaaaagaaactaccatcagagtgaacaggcaacctacaacatgggagaaaattttcgcaacctactcatctgacaaagggctaatatccagaatctacaatgaactcaaacaaatttacaagaaaaaaacaaacaaccccatcaaaaagtgggcaaaggacatgaacagacacttctcaaaagaagacatttatgcagccaaaaaacacatgaagaaatgctcatcatcactggccatcagagaaatgcaaatcaaaaccactatgagatatcatctcacaccagttagaatggcaattattaaaaagtcaggaaacaacaggtgttggagaggatgtggagaaataggaacacttttacactgttggtgtgataaactggatgaagaaaacatggcacatatacacaatggaatactatgcatccataaaaaagaatgagttcatgtcctttgcaggggcatagatgaagctggaaaccatcattct

SEQ ID NO: 14780 - DNA, 3915 bp, Homo sapiens
  SIMILAR (449)..(1366): 811254mologous to Homo sapiens melanoma-associated chondroitin sulfate proteoglycan (MCSP),accession number X96753,Smith-Waterman Score=1242.
atgggaaaaaaacagaacagaaaaactggaaactctaaaaagcagagggcctctcctcctccaaaggaacacagctcctcaccagcaacggaacaaagctggatggagaatgactttgatgagctgagagaagaaggcttcagacgatcaaattactctgagctacgggaggacattcaaaccaaaggcaaagaagttgaaaactttgaaaaaaatttagaagaatgtataactagaataactgatatagagaagtgcttaaaggagctgatggagctgaaaaccaaggctcgagaactacatgaagaatgcagaagcctcaggagccgatgtgatcaactggaagaaagggtatcagcaatggaagatgaaatgaatgaaatgaaaaacacacataggctcaaaataaaaggagcaccaagattcataaagcaagtcctgagtgacctacaaagagacttagactcccacacattaataatgggagactttaacaccccactgtcaacattagacagatcaacaagacaaaaaatcaacaaggatacccaggaattgaactcagctctgcaccaagcagacctaatagacatctacagaactctccactccaaatcaacagaatatacatttttttcagcaccacaccacacctattccaaaattgaccacatacttggaagtaaagctctcctcagcaaatgtaaaagaacagaaattataacaaactatctctcagaccacagtgcaatcaaactagaactcaggattaagaatctcactcaaaaccgctcaactacatggaaactgaacaacctgctcctgaatgactactgggtacataacgaaatgaaggcagaaataaagatgttctttgaaaccaacgagaacaaagacacaacataccagaatatctgggacgcattcaaagcagtgtgtagagggaaatttatagcactaaatgcccacaagagaaaacaggaaagatccaaaattgacaccctaacatcacaattaaaagaactagaaaagcaagagcaaacacattcaaaagctagcagaaggcaagaaataactaaaatcagagcagaactgaaggaaatagagacacaaaaaacccttcaaaaaattaatgaatccaggagctggttttttgaagggatcaacaaaattgatagaccgctagcaagaataataaagaaaaaaagagagaagaatcaaatagacgcaataaaaaatgataaaggggatatcaccaccgatcccacagaaatacaaactaccatcagggaatactacaaacacctctacgcaaataaactagaaaatctagaagaaatggataaattcctcgacacatacaccctcccaagactaaaccaggaagaagttgaatctctgaatacaccaataacaggctctgaaattgtggcaataatcaatagcttaccaaccaaaagagtccaggaccagatggattcacagccgaattctaccagagaaaaagagggaatcctctctaactcattttatgaggccagcatcattctgataccaaagccaggcagagacacaacaaaaaaagagaattttagaccaatatccttgatgaacattgatgcaaaaatcctcagtaaaatactggcaaaacgaatccagcagcacatcaaaaagcttatccaccatgatcaagtgggcttcatccctgggatgcaaggctgggtcaatatacacaaatcaataaatgtaatccagcatataaacagagccaaagacaaaaaccacatgattatctcaacagatgcagaaaaagcctttgacataattcaacaacccttcatgctaaaaactctcaataagttaggtattgatgggatgtatttcaaaataataagagctatctatgacaaacccacagctaatatcatactgaatgggcaaaaactggaagcattccctttgaaaactggcacaagacagggatgccctctctcaccactcctattcaacatagtgttggaagttctggccagggcaattaggcaggagaaggaaataaagggtattcaattaggaaaagaggaagtcaaattgtccctgtttgcagatgacatgactgtatatctagaaaaccccattgtctcagcccaaaatctccttaagctgataagcaacttcagcaaagtctcaggatacaaaatcaatgtgcaaaaatcacaaggattcttatacaccaacaacagacaaacagagagccaaatcatgagtgaactcccattcacaattgcttcaaagagaataaaatacctaggaatccaacttacaagggatgtgaaggacctcttcaaggagaactacaaaccactgctcaaggaaataaaagaggatacaaagaaatggaagaacattccatgctcatgggtaggaagaatcaatatcgtgaaaatggccatactgcccaaggtaatttacagtttcaatgccatccccatcaagctaccaatgcctttcttcacagaattggaaaaaactactttaaagttcatatggaaccaaaaaagagcccgcatcaccaagtcaatcctaagccaaaagaacaaagctggaggcatcacactacctgacttcaaactatactacaaggctacagtaaccaaaacagcatggtactggtaccaaaacagagatatagatcaatggaacagaacagagccctcagaaataacgccgcatatctacaactatctgatctttgacaaacctgagaaaaacaagcaatggggaaaggattccctatttaataaatggtgctgggaaaactggctagctatatgtagaaagctgaaactggatcccttccttacaccttatacaaaaatcaattcaagatggattaaagacttaaacgttagacctaaaaccataaaaaccctagaagaaaacctaggcaataccattcaggacataggcatgggcaaggacttcatgtctaaaacaccaaaagcaatggcaacaaaagccaaaattgacaaatgggatctaattaaactaaagagcttctgcacagcaaaagaaactaccatcagagtgaacaggcaacctacaaaatgggagaaaatttttgcaacctactcatctgacaaagggctaatatccagaatctacaatgaactcaaacaaatttacaagaaaaaaacaaacaaccccatcaaaaagtgggtgaaggacatgaacagacacttctcaaaagaagacatttatgcagccaaaaaacacatgaaaaaatgctcatcatcactggccatcagagaaatgcaaatcaaaaccacaatgagataccatctcacaccagttagagtggcaatcattaaaaagtcaggaaacaacaggtgctggagaggatgtggagaaataggaacacttttacactgttggtgggactgtaaactagttcaaccattgtggaagtcagtgtggcgattcctcagggatctagaactagaaataccatttgacccagccatcccattactgggtatatacccgaatgactataaatcatgctgctataaagacacatgcacacctgggcaccctagaaagcagcccaccctgggttctataccccagaagtcacaggatcattgcgctgaagtgctaaaggacatcctgtttctagcagggactggaggagcccaggctcttctggccagtttctccttatctcaggatgttgaattcccagcaccttctgcagttattcttgagaactacaagcaaaagactgaaatgagcaccacctactggcagagcctaacagggccagccggcaaacaagaaaactgttcacagtcccagccccaagatcccaagtatacagtatggatgtgggggtttagatccaagaaacaatag

SEQ ID NO: 14781 - DNA, 2832 bp, Homo sapiens
  SIMILAR (595)..(272): 391254mologous to Homo sapiens Np70 protein carboxy terminal region,accession number Y67470,Smith-Waterman Score=147.
atgggagactttaacaccccactgtcaacattagacagatcaacgagacagaaagtcaacaaggatacccaggaattgaactcagctctgcaccaagcggacctaatacacatctacagaactctccaccccaaatcaacagaatatacatttttttcagcaccacaccacacctattccaaaattgaccacatagttggaagtaaagctctcctcagcaaatgtaaaagaacagaaattataacaaactatctctcagaccacagtgcaatcaaactagaactcaggattaagaatctcactcaaagccgctcaactacatggaaactgaacaacctgctcctgaatgactactgggtacataacgaaatgaaggcagaaataaagatgttctttgaaaccaatgagaacaaagacacaacataccagaatctctgggacgcattcaaagcagtgtgtagagggaaatttatagcactaaatgcccacaagagaaagcaggaaagatccaaaattgacaccctaacatcacaattaaaagaactagaaaagcaagagcaaacacattcaaaagctagcagaaggcaagaaataatgaaaatcagagcagaactgaaggaaatagagacacagaaaacccttcaaaaaatcaatgaatccaggagctggttttttgaaaggatcatcaaaattgatagaccgctagcaagactaataaagaaaaaaagagaggagaatcaaatagacacaataaaaaatgataaaggggatatcaccaccgatcccacagaaatacaaactaccatcagagaatactacaaacacctctacgcaaataaactagaaaatctagaagaaatggataaattcctcgacacgtacactctcccaagactaaaccaggaagaagttgaatctctgaatagaccaataacaggagctgaaattgtggcaataatcaatagtttaccaaccaaaaagagtccaggaccagatggattcacagccgaattctaccagagatacaaggaggaactgcatataaacagagccaaagacaaaaaccacatgattatctcaatagatgcagaaaaagcctttgacaaaattcaacaacccttcatgctaaaaactctcaataaattaggtattgatgggacgtatttcaaaataataagagctatctatgacaaacccacagccaatatcatactgaatgggcaaaaactggaagcattccctttgaaaactggcacaagacagggatgccctctctcaccgctcctattcaacatagtgttggaagttctggccagggcgatcaggcaggagaaggaaataaagggtattcaattaggaaaagaggaagtcaaattgtccctgtttgcagacgacatgattgtttatctagaaaaccccattgtctcagcccaaaatctccttaagctgataagcaacttcagcaaagtctcaggatacaaaatcaatttacaaaaatcacaagcattcttatacgccaacaacagacaaacagagagccaaatcatgagtgaactcccattcacaattgcttcaaagagaataaaatacctaggaatccaacttacaagggatgtgaaggacctcttcaaggagaactacaaaccactgctcaaggaaataaaagaggatacaaacaaatggaagaacattccatgctcgtgggtaggaagaatcaatatcgtgaaaatggccatactgcccaaggtaatttacagattcaatgccatccccatcaagctaccaatgcctttcttcacagaattggaaaaaactactttaaagttcatatggaaccaaaaaagagcccgcatcgccaagtcaatcctaagccaaaaggacaaagctggaagcatcacactacctgacttcaaactatactacaaggctacagtaacccaaacagcatggtactggtaccaaaacagagatatagatcaatggaacagaacagagccctcagaaataacgctgcatacctacaactatctgatctttgacaaacctgagaaaaacaagcaatggggaaaggattccctatttaataaatggtgctgggaaaactggctagccatatgtagaaagctgaaactggatcccttccttacaccttatacaaaaatcaattcaagatggattaaagatttaaacgttagacctaaaaccataaaaaccctagaagaaaacctaggcattaccattcaggacataggcgtgggcaaggacttcatgtccaaaacaccaaaagcaatggcaacagaagccaaaattgacaaatgggatctaattaaactaaagagcttctgcacagcaaaagaaactaccatcagagtgaacaggcaacctacaacatgggagaaaattttcgcaacctactcatctgacaaagggctaatatccagaatctacaatgaactcaaacaaatttacaagaaaaaaacaaacaaccccatcaaaaagtgggcgaaggacatgaacagacacttctcaaaagaagacatttatgcagccaaaaaatacatgaaaaaatgctcatcatcactggccatcagagaaatgcaaatcaaaaccactatgagataccatctcacaccagttagaatggcaatcattaaaaagtcaggaaacagcagagtatactccttccacttaaatataaaagttaactgtaagacagcctcaggaggtgttccaaaaggcattgttaatataggagatgacagttccatgcatgttattgcccctgaagaccttctagtgggacaggctgtggagatggaagacagatactag

SEQ ID NO: 14782 - DNA, 3531 bp, Homo sapiens
  SIMILAR (2023)..(3402): 961254mologous to Homo sapiens putative p150,accession number U93563,Smith-Waterman Score=2329.
tcactgtggttttgatttgcatttctctgatggccagtgatgatgagcatttttcatgtgatttttggctgcataaatgtcttcttttgagaagtgtctgttcatgtccttcacccactttttgttggggttgtttgtttttttcttgtaaatttgtttgagttcattgtagattctggatattagccctttgtcagatgagtaggttgtgaaaattttctcccattttgtaggttgcctgttcactctgatggtagtttcttttgctgtgcagaagctctttagtttaattagatcccatttgtcaattttggcttttgttgccattgcttttggtgttttagacatgaagtccttgcccatgcctatgtcctgaatggtaatgcctaggttttcttctagggtttttatggttttaggtctaacgtttaagtctttaatccatcttgaatttgattttttgtataaggtgtaaggaagggatccagtttcagctttctacatatggctatccagttttcccagcaccatttattaaatagggaatcctttccccattgcttgtttttctcaggtttgtcaaagatcagatagttgtagatatgcggcgttatttctgagggctctgttctgttccattgatctatatccctgttttggtaccagtaccatgctgttttggttactgtagccttgtagtatagtttgaagtcaggtagtgtgatgcctccagctttgttcttttggcttagaattgacttggcaatgcaggctcttttttggttccatatgaactttaaagtagttttttccaattctgagaggtgacaggttctaactgcattttccaccagcttccggaacactaggaggaccttggcaggcacaatgtctccgtcgatgttcacatctgtctcatgccactgccacaggctcttcataaactgttccacctccagccactgctgcagaccctcagggtcccgcaacgggcagggcagcctggtgccctgcagtgtgtagtaccgccagtgctgctccctggcctccctgtacccggccaggccttttattgggactgtgacgaggaactgactgggagccaaaacctcctgaacatggtggcagctggcaccagggaactccatagtcagaacactttttgtctgtattcctgcaagctctaggtctgacacagatgtcataagacaagtaagaccatcacattcccactgagcattgttcgaagtgccggagatataatacaacagtgaataagacaagccctctcccggcatagagtttatatttattctaataggagaaccagcaaaccataatgtgccaggctgtgtcctcagctctaaagatacaaccctgaaaatgcagataaagccccttctcgtggagccttcaccttgggggtcaggttgacccttgttttgttggaactgcttgtgaagcatcaggtggtggcatttcataggaaccgcctgcagtgcacaggaaggccggactggagctctacatgtgagcatatttggaatgtggatagtactggaaaccacaggagtggctaaaattgctaggctgagtgagtagagtcgcggggcagggctcaggacctgcagcccgccatgcccgagcctctccgcctcccccctgtgggctcctgggcagccgggagcctccccagtgggagctgtcccctgctctgtggtgcccagtcccatcgaccgcccaggggctgagcagtgcaggcctgcccgcaaagccagcaaggctcctgagtcgggaggagacttggagaacttttatgtctggctggaggattgtatatgcaccaatcagcactctgtgtctagctctgggttcatgtatgcaccaatcagcactctgtgtctagctaatctggtggggacttggagaacttttgtgtctaactcagggattgtaaacgcattaatcagcaccccgtcaaaacggaccaatcagctttctgtaaaatggaccaatcagcaggatgtggtgttggaagttctggccagggcaattaggcaggagaaggaaataaagggtattcaattaggaaaagaggaagtcaaattgtccctgtttgcagacgacatgattgtatatctagaaaaccccattgtctcagcccaaaatctccttaagctgataagcaacttcagcaaagtctcaggatacaaaatcaatgcacaaaaatcacaagcattcttatacaccaacaacagacaaacagagagccaaatcatgagtgaactcccattcacaattgcttcaaagagaataaaatacctaggaatccaacttacaagggatgtgaaggacctcttcaaggagaactacaaaccactgctcaaggaaataacagaggatacaaacaaatggaagaacattccatgctcatgggtaggaagaatcaatatcgtgaaaatggccatactgcccaaggtaatttacagattcaatgctatccccatcaagctaccaatgactttcttcacagaattggaaaaaactactttaaagttcatatggaaccaaaaaagagcccgcatggccaagtcaatcctaagccaaaagaacaaagctggaggcatcacactacctgacttcaaactatactacaaggctacagtaaccaaaacagcatggtactggtaccaaaacagagatgtagatcaatggaacagaacagagccctcagaaataacgccgcatatctacaactatctgatctttgacaaacctgacaaaaacaagcaatggggaaaggattccctatttaataaatggggctgggaaaactggctagccatatgtagaaagctgaaactggatcccttccttacaccttatacaagaattaattcaagatggattaaagatttaaacgttagacctaaaaccataaaaaccctagaagaaaacctagacattaccattcaggacataggcatgggcaaggacttcatgtctaaaacaccaaaagcaatggcaacaaaagccaaaattgacaaatgggatctaattaaactaaagagcttctgcatagcaaaagaaactaccatcagagtgaacaggcaacctacaaaatgggagaaaatttttgcaacctactcacctgacaaagggctaatatccagaatctacaatgaactcaaacaaatttacaagaaaaaaacaaacaaccccatcaaaaagtgggcgaaagacatgaacagacacttctcaaaagaagacatttatgcagccaaaaaacacatgaaaagatgctcatcatcactggccatcagagaaatacaaatcaaaaccacaatgagataccatctcacaccagttagaatggcaatcattaaaaagtcaggaaacaacagttttctgatggcagaagcctggcccatctggttaagctctccgttcctggaaggaggacatagcagggacttcatacgtggggatgaatcaatgtcaaatgaggaaaaatacaaagaccttaattag

SEQ ID NO: 14783 - DNA, 4167 bp, Homo sapiens
  SIMILAR (946)..(1653): 641254mologous to Homo sapiens dJ1119D9.3 (novel protein),accession number AL031652,Smith-Waterman Score=621.
atgacaggatcaaattcacacataacaatattaactttaaatataaatggactaaattctgcaattaaaagacacagacgggcaagttggataaagagtcaagacccatcagtgtgctgtattcaggaaacccatctcacgtgcagagacacacataggctcaaaataaaaggatggaggaagatctaccaagcaaatggaaaacaaaaaaaggcaggggttgcaatcctagtctctgataaaacagactttaaaccaacaaagatcaaaagagacaaagaaggccattacataatggtaaagggatcaattcaacaagaggagctaactatcctaaatatttatgcacccaatacaggagcacccagattcataaagcaagtcctgagtgacctacaaagagacttagactcccacacattaataatgggagactttaacaccccactgtcaacattagacagatcaacgagacagaaagtcaacaaggatacccaggaattgaactcagctctgcaccaagcggacctaatagacatctacagaactctccaccccaaatcaacagaatatacattttttttagcaccacaccacacctattccaaaattgaccacatagttggaagtaaagctctcctcagcaaatgtaaaagaacagaaattataacaaactatctctcagaccacagtgcaatcaaactagaactcaggattaagaatctcactcaaagccgctcaactacatggaaactgaacaacctgctcctgaatgactactgggtacataatgaaatgaaggcagaaataaagatgttctttgaaaccaacgagaacaaagacaccacataccagaatctctgggacgcattcaaagcagtgtgtagagggaaatttatagcactaaatgcctacaagagaaagcaggaaaagatccaaaattgacactctaacatcacaattaaaagaactagaaaagcaagagcaaacacattcaaaagctagcagaaggcaagaaataactaaaatcagagcagaactgaaggaaatagagacacaaaaaacccttcaaaatatcaatgaatccaggagctggttttttgaaaggatcaacaaaattgatagaccgctagcaagactaataaagaaaaaaagagagaagaatcaaatagacacaataaaaaatgataaaggggatatccaccaccgatctcacagaaatacaaactaccatcagggaatactacaaacacctctacgcaaataaactagaaaatctagaagaaatggataaattcctcgacacatacactctcccaagactaaaccaggaagaagttgaatctctgaatagaccgataacaggagctgaaattgtggcaataatcaatagcttaccaaccaaaaggagtgcaggaccagatggattcacagctgaattctaccagaggtacaaggaggaactggtaccattccttctgaaactattccaatcaatagaaaaagagggaatcctccctaactcattttgtgaggccagcatcattctgataccaaagccaggcagagacacaacaaaaaaagagaattttagaccaatatccttgatgaacattgatgcaaaaatcctcaataaaatactggcaaaacgaatccagcagcacatcaaaaagcttatccaccatgatcaagtgggcttcatccctgggatgcaaggctggttcaatatacgcaaatcaataaatgtaatccagcatatcaacagagccaaagacaaaaaccacatgattatctcaatagatgcagaaaaggcctttgacaaaattcaacaacacttcatgctaaaaactctcaatagattaggtattgatgggacgtatttcaaaataataagagctatctatgacaaacccacagccaatatcatactgaatgggcaaaaactggaagcattccctttgaaaactggcacaagacaaggatgccctctctcaccactcctattcaacatatgcaaatcaaaaaaactgttggaagccagggcaattaggcaggagaaggaaataaagggtattcaattaggaaaagaggaagtcaaattgtccctgtttgcagatgacatgattgtatatctagaaaaccccatcgtctcagcccaaaatgtccttaagctgataagcaacttcagcaaagtctcaggatacaaaatcaatgtacaaaaatcacaagcattcttatacaccaataacacagacaaacaagagagccaaatcatgagtgaactcccattcacaactgcttcaaagagaataaaatacctaggaatccaacttacaagggatgtgaaggacctcttcaaggagaactacaaaccactgctcaatgaaataaaagaggatacaaacaaatggaagaacattttcattccatgcttatgggtaggaagaatcagttatcatgaaaatggccatattgcccaaggtaatttacagattcaatgccatccccatcaagctaccaatgactttcttcacagaactggaaaaaactactttaaagttcatatggaaccaaaaaagagcccgcatcaccaaggcaatcctaagccaaaagcacaaagctggaggcatcacactacctgactgcaaactatactacaaggctacagtaaccaaaacagcatggtactgggtacccaaaacagaggatatagatcaattggaacaggatcaaagccctcaagaaataaggcccacatatatctacaactatctaatctttgacaaaccctgggaaaaaccaagcaatgggggaaaggattcccttatttaataaatggtgctgggaaaaactggcttagccatatgtagaaagctgaaacttggatccccttcccttacaccttatacaaaagttaattcaagatggattaaagacttaaaatgttagacctaaaaaccataaaaaaccctagaaggaaaacctaggcaatacccatttcaggacataggcatgggcaaggacttcatggctaaaacacccgaaagcaatggccaacaaaagacaaaattgacaaatgggatcttaactaaaactcaagagcttcctgcacagcaaaagagaaactaccatcagagtgaacaggccaacctacaaaaatgggagaaaaaatttttgcaatctacatcatctgacaaaagggctaatatccagaatctacaaagaactcaaacaaaaatttaccagaaaaaaacaaacaaccccatcgaaaagtgggcaaaggatatgaacagacacttctcaaaagaagacatttatgcagccaaaagacaaaatgaaaaaaatgctcaaccatcactggccatcagagtaatgcaaatcaaaaccacaatgagataccatctcacaccagttagaatggcaatcatgaaaaaagtcaggaaacaacaggtgctggagaggatgtggagaaataggaacacttttacactgttggtgggagtgtaaactagttcaaccattgtggaagtcagtgtggcgattcctcagggatctagaactagaaataccatttgacccagccatcccattactgggtatatacccaaatgactataaatcatgctgctataaagacacatgcacacgtatgtttattgcggcattattcacaatagcaaagacttggaaccaacccaaatgtccaacaatgatagactggattaagaaaatgtggcacatatacaccatggaatactatgcaagccataaaaaaatgatgagtttatgtcctctgtcgggacgtggatgaagctggaaaccatcattctcagcaaactatcgcaaggacaaaaaaccaaacagtgcatgttctcactcataggtgggaattgaacaatgagaacacatggacacaggaaggggaatgtcacacaccagggcctgttgtggggtggagggaggcggggagggatagcattaggagagatacctaatattaaatgatgagttcatgggtgtagcacaccagcatggcacatgtatacatatgtaacaaacctgcacgttgtgcacatgtaccctaaaacttaaaagtataatataaaaaataaattcttacttgaattgtgcaatttgtagaactttaataaaaaaatgatacatctt

SEQ ID NO: 14784 - DNA, 1161 bp, Homo sapiens
  SIMILAR (1012)..(1101): 901254mologous to Homo sapiens ribosomal protein L10,accession number AB007170,Smith-Waterman Score=131.
ctaaatgttattaggaggggacaaatcccgcaggtagctgccaccttgcccacaatggcagttgttcagaaagccaggctcctgctgcgaggggccacgccaccctgggagggaaatgaccaaggtcaatgttggggatgcagcatctgcagtgaagcatttgcccattctcctcctgtggtcattgttacattccactgaccagctgcctgcaggctccaggcacagccgccattcatcagagattaatgcctgaaatgagccacacctctgaacaattgcttccatttgctgattctcctcccctccatgaacaacttctagcttccttttgatggcagcagtgggctgtccagagcaaccactgcactgactgcagtggggaggtgtgagaggtggtgacaggagcagctgtgggaacagcaatggtggcggtgggccccctgtgccccatgtccctgaggcagctgactgtgcagcccccaccctggcacagcagccaggtgggacctgcccccagggccttagccttcgtaactccagacctggctccgagttgctgctctcatctgccaccacctcaggggtgtctgctcctgctgcctggcctctcccagctcccagcacctgctctgatcttggagcggggttggagtccagcatgggcactgtcacagcccagccaggtacgcgcacacttggggcagtactggcacaccagacacaccagccccctgctgcctcagcctcctctagacattgggcaggcaatatagttatttgcaccagtgcaataagaatccattttcttttgcaacaatattcaattggagaaactggttgttctgccaaggctttgactggaatgatgtactttcctgctggagggggagaggatgtcctcaggagagacagaggacagacttcgcagaggggctggtgaagggcagctgtgtcagcctctggtggctccggtagaaccctcgtagtttttgatgcaccagcacggttatcatgtccatctgcaccaagctgcagaacaaggagcatgtgattgaggccctgcgcagggccaagttcaagttccctggccaccccaaagatccacatctcaaagaagtgagacttcaccaagttcaatgcagatgaatttgaagacat

SEQ ID NO: 14785 - DNA, 1461 bp, Homo sapiens
  SIMILAR (1)..(1458): 1001254mologous to Homo sapiens keratin protein Hb6,accession number AJ000263,Smith-Waterman Score=2518.
atgacttgtggatcttactgtggtggccgcgccttcagctgcatctcggcctgcgggccgcgccccggccgctgctgcatcaccgccgccccctaccgtggcatctcctgctaccgcggcctcaccgggggcttcggcagccacagcgtgtgcggaggctttcgggccggctcctgcggacgcagcttcggctaccgctccgggggcgtgtgcgggcccagtcccccatgcatcaccaccgtgtcggtcaacgagagcctcctcacgcccctcaacctggagatcgaccccaacgcgcagtgcgtgaagcaggaggagaaggagcagatcaagtccctcaacagcaggttcgcggccttcatcgacaaggtgcgcttcctggagcagcagaacaaactgctggagacaaagctgcagttctaccagaaccgcgagtgttgccagagcaacctggagcccctgtttgagggctacatcgagactctgcggcgggaggccgagtgcgtggaggccgacagcgggaggctggcctcagagcttaaccacgtgcaggaggtgctggagggctacaagaagaagtatgaggaggaggtttctctgagagcaacagctgagaacgagtttgtggctctgaagaaggatgtggactgcgcctacctccgcaaatcagacctggaggccaatgtggaggccctgatccaggagatcgacttcctgaggcggctgtatgaggaggagatccgcgttctccagtcccacatctcagacacctccgtggttgtcaagctggacaacagccgggacctgaacatggactgcatcattgccgagatcaaggcacagtacgatgacattgtcacccgtagccgggctgaggccgagtcctggtaccgcagcaagtgtgaggagatgaaggccacggtgatcaggcacggggagaccctgcgccgcaccaaggaggagatcaacgagctgaaccgcatgatccagaggctgacggctgaggtggagaatgccaagtgccagaattccaagctggaggctgcggtggctcagtctgagcagcagggtgaggcggccctcagcgatgcccgctgcaagttggccgagctggagggtgccctgcagaaggccaagcaggacatggcctgcctgatcagggagtaccaggaggtgatgaactccaagctgggcctggacatcgagatcgccacctacaggcgcctgctggagggcgaggagcagaggctgtgcgaaggcgtcggctcggtgaatgtctgtgtcagcagctcccgcggtggcgttgtctgtggcgatctctgcgcctccactactgcccctgttgtctccaccagagtcagtagcgtccccagcaacagcaacgtggtggtgggcactactaacgcctgcgccccctccgcccgggttggcgtctgcggcggcagctgtaagaggtgctaa

SEQ ID NO: 14786 - DNA, 1953 bp, Homo sapiens
  SIMILAR (201)..(401): 481254mologous to Bovine leukemia virus gag,accession number D00647,Smith-Waterman Score=170.
gttccatcctctgccatctactccactgttcagacacctcctaacctccgtcatgacctgtggcttcaactccataggctgtgggttccgccctggaaacttcagctgtgtctctgcctgcgggccccggccaagccgctgctgcatcaccgccgccccctaccgcggcatctcctgctaccgcggcctcaccgggggctttggcagccacagcgtgtgcgggggcttccgcgccggctcctgcggacgcgacttcggctaccgctccgggggcgtgtgcggacccagccccccatgcatcaccaccgtgtcggtcaacgagagcctcctcacgcccctcaacctggagatagaccccaacgcgcagtgcgtgaagcaggaggagaaggagcagatcaagtccctcaacagcagattcgcggccttcatcgacaaggtgcgcttcctggagcagcagaacaagctgctggagacaaagctgcagttctaccaaaactgcgagtgctgccagagtaacctggagcccctgtttgctggctacatcgagactctgcggcgggaggccgagtgcgtggaggctgacagtgggaggctggcctcagagctcaaccacgtgcaggaggtgctggagggctacaagaagaagtatgaagaagaagtagcacttcgagccacagcagagaacgagtttgtggctctaaagaaggatgtggactgtgcctacctccgcaagtcagacctggaggccaacgtggaggccctgatccaggagattgacttcctgaggcggctgtacgaggaggagatccgcattctccaatcccacatctcagacacctccgtggttgtcaagctggacaacagccgggacctgaacatggactgcatggttgctgagatcaaggcacagtatgatgacattgccacccgtagccgggctgaggccgagtcctggtatcgcagcaagtgtgaggagatgaaggccacagtgatcaggcacggggagaccctgcgccgcaccaaggaggagatcaatgagctgaaccgcatgatccagaggctgacggccgacggtggagaatgccaagtgccagaactccaagctggaggccgcggtggctcagtctgagcaagcagggtgaggcagccctcagtgattgcccgcttgcaaacttggcccgagcttggaggggcgcccttgcagaagggcaaagccaggacattggccttgccttgattcagggagtaccaggaggtgatgaactccaagctaggcctggatatcgagatcgccacctacaggcgcctgctggagggcgaggagcagaggctgtgtgaaggtgttgaagctgtgaatgtctgtgtcagcagctcccggggtggggttgtgtgcggggatctctgcgtgtcgggctcccggccggtgacgggcagcgtctgcagtgccccctgcaacgggaacctggtggtgagcactggtttgtgcaagccctgtggccagctgaacagccacctgtggagggggctcctgcggcgtgggctcctgtggtatcagctcccctggggtgtggggggtccttgcggcagcagctgccggaaatgttaggcaccccaaactcaagtcccaggccccaaggcaatctttcctgccctgccttgcttggcccatccagtccaggcgccttggagcaagtgctcagctacttctcctgcactttgaaagacccctcccactcctggcctcacatttctctgtgtgatcccccactacctggctctgccaccccaccgtgggaaaggccaccctagaaagaagtccgctggcacccataggaaggggcctcaggagcaggaaggaccaggaccagaacattacacaaggcaactgccttcctgcctctccccttcctcctcttgctctttgatctgtgtttcaataaattaatgtagcca

SEQ ID NO: 14787 - DNA, 2787 bp, Homo sapiens
  SIMILAR (443)..(1960): 961254mologous to Homo sapiens anthracycline-associated resistance ARX,accession number U35832,Smith-Waterman Score=2509.
ctaataagccttgacagtagcgagatcaatgcctccacaaatcttaggtttttcttgttctgtataaagctcattctgaagccatctcggtggctgcacgttagtacatggattccagaggagagagaacacagcaggtttcctggaggctgaaaggagtatatggcttaccgcttccatcaggcccttcactgtgggagacttcaacatcaatgcatcgaacacatcgtcagtctccttcctcacgtacaagagcactcgctttgtcccttcttctttcatctgctttgaaggcactggaccaaactcctcttccatgggccggaacatccgtttaacaaggacactgccaccttctcgttcatcatccgtgttgtaatacacctgtccggtcctctgcaggtttgcaaagtgaacatcaggtatgaagagaactggctgtgagtggagatcaggcatggttttgaagtaggtgatgtcactcttcttctgtaaaggtatggcagccaacttcccatcagaggagctgttgcattgagtttgggaggcctggcctttccctttcttcctgttctgcttccgctcttcatctcggatttttctttctgctcccttgatgttaatagctgctgactgatcagggtgagggttgctgaaggttggggtggctgtaacaattttttgcccagaaccatcagtggaatccctatctacaccagcaacagccttacaaaacatatttcttaaataaaaagactggaaaatcagaattattcctcgatccatgggtttgtcacagaagaccttgatctggcaataagctctatgaatgggtttattgctacgattgttataactgtatgtgtcaatctgaatcatcaaaggaagtcctttcacccctttttgggaggagaaatctgtgctcaagcaattcacggtgatgaaaatccagccttccccctgctcgcagacaataaagcatcgaccaagagcagtgtacattgaccttttcattagtttgaagacaaactcttctaacaccctcctagatggtccagaaccaaagcaaaaaacaagcttaggtttcatctggcaccttcccatgagtgcaaaataagaatcaaggatcagaagcttcgcctcttcattcacgtcccaggtaaaggaaacagcattatatgcaatctcttcaatgtttccaatcgtattaaagctctccttgtaatcggcctttgtgttcagtctccacaggtggtacaatagctctgctcccacttcacgactctcaaagtcttccaagggactaaacagctgatgcacaccaatgtggcttcttccacatgcatagttgtccgacaaataaaatggtaacagatgtgcctctggtttctgaaagctgggtgaatgtctgtcactgtcacctaaacgcacaaaaccacacatggcagtgtgctcatcgattatgcaacatcggttgagcatctgttctctgccaggttctgtaccagcaatgtcaaggaccctctgcttcgccgtatgctgccgagagtgccagtatttccagtatttgagctgttcatctctgtttttgtcttcactgaagaccaccatcaccacactcctgactttgctgatggggtgtcggaagcatttgttgtctccggtctcgctgagtgttatggcatagaactgtcctttgttgaggtaggtcatggggccctccccctgcttctgacggagagatttggtggcttccagggtgtactgaaatgtgccacttgatgtctgatcatacatgtactcctcagccccaactgaagcactccgaaatttcctggccacggcatgacgtttgtccacaataattgcaaggtgttcagattttgcaaatctaaatgtcataaaaactttaaaaagaagcacaatcctccaaagctctgtggctgcgtccttgaagctctcgctgtatgtgctgtccggagtgctgcgctggtcgtctttgagataggcgctgtgggtggccagcgagggcacgtcatactgagtctgttcaaagataaccactcgttgctcttccccatctccccggggatagtgcacaggtggggccatgaaaactggtgtgaaatcttcagctttcaccaccgtgattcccgacaccgggatgatggcagagctctcggggaagctgatgctgtactgttcccgcttggaattctccaggtgatcttgatttagggaaaggttcactggaacagtctttaggacttgcactcggttttctcctccactcaaattactctgggcttcactggtgccaaggcagtttcttttctcctggtcttcttggctgtcacttgctttgcttacagacagcagcctcttgtctcgaggaacccaaatctcatcttgaattgtactcccataattcccatgtgttgtgggagggacactgtggcagataatttgaattgtgggagcagtttcccccatactgttctcgtgatagcgaataagtctcacaagatctgatggttttatcaggggtttccacttttgcatcttcttcattttctgtttccacttgtagtagtcatagagcaggccgagggcagcagcactgtcctcatcaccattaatgctcatcatggccttggtggctgctgtcaggggattctccaagtatgacttccaggcttcatcctcactggtgtaggctcttcgggtattgaatggagggtcactgggcatgggcactaaggccactagtcttttattaccttccat

SEQ ID NO: 14788 - DNA, 1615 bp, Homo sapiens
  SIMILAR (130)..(1626): 961254mologous to Homo sapiens GTP-binding protein NGB,accession number AF120334,Smith-Waterman Score=2518.
ttgtggataagagtgttaaaaattcaattacgcaacagaccaaactttgtgcttctttcccccctctcagcacaaagtaactttaatcccgtcctcttctgccactgtcaaacagccctgttactgtgggcattaaaatccttgtggcgtactgcgcatttgattctggttgacttgggatacctgagctcggctctcattagctcttccgctcgacccacaatccctagtgtttgcaggtgttgcattcccccaacccctttcttctcttcaaccagtagcctccaccttcccatccctgctttggagaaggaggaaaacgcagcttgagatctactcgaagaactgaccctcagctctcacaggctgccgccgagctgcaagcatgccgccgctccactcaggtaaacttcggagtgagttacctgcacttggagaagggccttacctgagcgcgcctctgccaatggcagctcacctgagggagctccccagccaatcatcgcgcagctcgtccctcgggcttgtaccctttagtgaaagaattcagctccttgcgagaaagttacctgtggccgcccaagtccgccactttctgctctgtgtctgcccattgccacgatccaggaggactccgcgccgcccggccgcctccgagctcgggccccatgtgaggggcccccccttatcccacctttccggctaggtgagggcgcgagcgggcgagcgagcgagagtggtgagggagaacggaaaagcagaattacctgtagctcttgttctgccatctcgggcgctctcacacaccttcacctgcacagacttgaaagtccagtttcaccagaggctgaggctccaggaaaaggggagcaagttcattggatcaaacatgtcacaagagtcggacaataataaaagactagtggccttagtgcccatgcccagtgaccctccattcaatacccgaagagcctacaccagtgaggatgaagcctggaagtcatacttggagaatcccctgacagcagccaccaaggccatgatgagcattaatggtgatgaggacagtgctgctgccctcggcctgctctatgactactacaagagaatcaatcagagcctattcccagggagggtgtggggtggggttgaggggaggaaaggagagagaatgacagaagaggaacaggaaggagaaggaggaggaggaggaaggggaggaggagaaggagaagaagaagaggaagaagaagaagacgtagaagaagaagaggaggaagaagaagaagaagaaaaagaagaggaggagaagggaggagaaaaagaggaagagaatgaggaaaaggagaagcagagagaggggagaagaggaaaggagacaagcaatggccagatggtgagaccaagactgctgccaccacatcaggaacattccagaaactacttggtgttcatcatggactccaatatgatagaaatttgctttagagaagcctcaatttcacctaaagctcaggcttatgtccttatccctgactttaaaaactgtatttacggatgggaagaagatagcatcgaaatcctgtggggcctgcctgggtcacatgtgctatga

SEQ ID NO: 14789 - DNA, 365 bp, Homo sapiens
  SIMILAR (12)..(98): 411254mologous to Chironomus pallidivittatus giant secretory protein,accession number X13030,Smith-Waterman Score=53.
tccagcgttcgaaatcctgcaaggtcccaggactgggaaagcccctcacgttacctcccaagccagagaaatcctcagggtcagaaggatcgtcgcccaactggcttcaagccctgaaactgaagaagaagaaggtctgagaagtcactgaggttcttcccacctggcagtctcaggcagtgcccattcctgtggggttttcttttgataccaatttatagcattttttataaaagcctttgatttttataatgggtgggactgtatccctgcctcaccccaggtctccgtctgccccgccaggtaccccacagagaccaatgacattttgccacttgaaacaataaataaagttttttgggaaa

SEQ ID NO: 14790 - DNA, 4339 bp, Homo sapiens
  SIMILAR (405)..(476): 451254mologous to Homo sapiens Ig kappa L-chain V-region (DPK14),accession number Z27499,Smith-Waterman Score=80.
ggactgaaactgctgggctgtgggtctcctgtgatcccaaattcactctgcagatctttctgggaccagccaaggagtccctcagagcaggtacttggggactgtgtgtccttcagctcagctccagctccccgccttgcaccgccaccactgggtggtggtgaagccaggaggtcgtccagccagcgggagctgctttcagggcctggaggctcgggggatgccctacacaagtcttgagcctctgtcctggcttgggtggtctcagcccgggctagggtcacggcctcctcctcaacaggcagtgcctgtccaggctcaggggcatcagcaaagagaacacagggctggtcaggggctgctggctgctcctgccccaggactggctccaggatgggcaaggctgcctccctggtagccagggggagaggggactcctgtccagccaagggctcctgcgactcgtatctctcctctgcctgctgcaaaggtaatccaggtgtgccctcagttgtaggcaggggctcaaggggaacagctgggaattgaggttgactctccccatcgcccttctgggtgagggacatgcttggatcatccccctgcacccaggaacttcctgacccacttggagctgacccagccccttgcccctgctgagacactccttcttccctgctggaaacggccaagttgccagcctcagcagcctcggcggcctcactggcttcagtgatgggggagggaggcggggagtccagccgccacacgcccagacccgagggcctcgtggggaaggtccattcgaaggactgtgataagctccagttggactctgccccaaagggacgatccagggccaactggctcccctggccttggggcagggcagccagcgagccccccagcttctcctggtcctgactgggtgactggagcacaccttcagagaatcggcgatcagcaggtagctccgagctggctgccttagccaggtccccgttgaaggccaggtcggaaggaaggctccctacaaagtaggagatgatcagaagctgaactactcggttgatgatcccgatggtccagctcttcacaaccaccgacttggtggtctcataggtgaagaagtcggatatgcagttcatgcagccagttgactggacctcagaagggttttgagcagttaagtgaagccatccagtgggaaccatggaaataaactcttgcaggagaatggcgatggcttggaagcagatgatgcctctgtgagagatgatgagtgtccagcccctgaggttgcctccaatccagacctgggcttggttgactgtgctagtgcagcactgaatgcgatagttgaagttgaagtcatggatagagacaaggttgcctccgtagcatctgctgcagacattctgagcttctgcaaaagttttaggagtccgcaccaataggtagcggcagatcttgcaccttggacttccctgcacttcaacaatgtcttcttccctggggcactggaagtccttgtctaaggcagctgggtccgactccatggcttcctcatcctcaaagttgtcttgacaggcagaagccttgacctcctctccctctgcctgaatcacctcctccgtcagagccaagtctctctcctgctcctttgaactatccagatcctggcctaggtctgcctgtgtctctaggctctccagatggggggcatcattctctctgtgaagcgagtgctgaacctctcttagccctgacttgctgaaatgctgggactctgtacagaggctgacattaagcagggatctgtcgtggggtgctgcaatgttcctccagatgcttgctccgaagctgagggcttctcctgtctccattccagggtctgcagggtgtggctccaaggaagacgaggagtaatcttcaccctgggtctctggcccacttgtctcaccaacccccagctccctggcctccaaggggtctctggcctccaggccaggagacaagctgccattgtgcctcaggccgggctctgggcactggctcaccccgcccaccccatgctccctggcttcacttggagccccaaagagctccacattctggggcgccaagtcctgggtccagtccatctgccccactccacatccccgtagcccctgagaacctccagagtctgggtcacaggtcacctccaaatccctcaggcccagattgttaccccagtccatctggcccaccccaagctctttggactctccaggactgcagactgcccctggggccatgtttctcagcccaaggtcaggtgtccagtctgcctgtccaactccacgctcccttgatttaaggaactctccggcctccacacctgaccagtcagtctgccccacgccactctctctggcctggctgtggcctcctccctccccgacctcagccaaatctttgctcttcacattaacatcagaagtccagtccttctccccaactccgattccccccggctcttcagaccctccactttccaaacagccggtcaggttcatgtctctcaagctcaggccacctgaccagcccatctgtcccacggcactctccctggcctcgctcgagcccccagaacccacacagctggacacttccaagttcctgagacccagctggtcagtccagtccaccgagccagctgtggtcttcccaggaggcacaaagtgaccaccttccatcttgctagaagggctaaagccagcaccactcactctgtcgttgccaatgatgccaaactgatagctcctctcactggcctcgatgcagaagtcccggctccagtcctgctgccctgggctaaatgctgcctctcgctgggggccaacactgaggctaaactcaccgacccagcctcgctttcccatctccccatcttccaggtcagcactgccagggccctgagcccctgcctgctgtctctcctgatgccctcccacctcctggctagcatcactgttttgccagctgctctggtctctctgcccgagtgccccatccggcacgtgggcagtgctaggactgaacaagcccccggatcctctctctcctggccggccagcatccctgctgccctctccaaggctgtcttccacacttggaatcttcttctcaaattcctcatcctgttgctgggcttcctcggggctgaacccagagctcaggggtctcgttccaaagcttctgtcctgggcgtcaagggtcctggagctgccaccactgctgtagtcccttatccaagcgctcttcccaaactcctgttcctgtggctccgcagcccggctgccataggtgccgagtgacacatctctcttctgaaactcccagtcctgctcatcggcatcctggctgctgtacctaccatggtggtccctcttccccaaatcttggccctgctcgttggcatcttggctggcataagcacccagagaatctctcttcccaaattcccagtccccaaggcttacatctcgactactgtaggtacccagtgaatctctctttccgaattcctggtcctggagttctgcatcccggctggagtaagtgccctgggaatccctctttctgaactcccagtcctgaacatctgcctcctggctccgctgagtgccaagctgggctggctttccaactacccggtcctgggctgtgagcacccctggggcagacactttactctggtcttggctgctgctggcctccatctcctcctggccgatgccacacctgctggcccactccctggtgctcccttcccctgctccttgcccatacttgctggtccagtccctctctccgagacctgggtctcctctagggcttgcacccccaaggccatagtcctgagaagcaccttgacaccagctggaaggactgaaactgctgggctgtgggtctcctgtgatcccaaattcactctgcagatctttccacagtgggcagtcttccgtggtggttaactgaccaatgggttgacagtactgggtttctctactgtcttcataccctctcccatctttgaaacacaggcggtcggggctggcaaggacctccttccgaggctgctccatcttggccaggatctcttccaccgtggtggccgcgaagcgctctgaggctggctcagagccagtaggcaccagctcctcctccatctcccggggcagtggggaagccatggctgagctttccctgagagtagacactttcatcacatgcggcagaccctccttgagagcggggaggcagagaggtatgagctggggtggctgcagac

SEQ ID NO: 14791 - DNA, 1528 bp, Homo sapiens
  SIMILAR (2647)..(4827): 1001254mologous to Homo sapiens ha0946 protein is Kruppel- related,accession number D31763,Smith-Waterman Score=4096.
gcggccgcctactactactactactactactaattcgcggccgctcgacttttttttttttttttttttttcccaaaaaactttagtttatatgtattcaagtgggcaaaatagtcattgggtctctgttggggtacctggcggggcagacggagacctggggtgaggcagggatacagtccccacccattataaaaatcaaaaggctttttataaaaaatgctaataaattgttatcaaaagaaaaacccaaaggaaggctggaagaaggaagcagagagggagagggaaggaggagaggaagggacaaaaccttcaaccactaggtgatgaaatccaggggaagggaaggtttggggggatttccggagggtgatacaaagtgcataaatgtgcctccccagacgctcctcagaggtggaggggaacaagaagctgcaaccctgggggcatggttggggctccagccgtctcctcaccccagggaccccacaggaatgggcactgccttgaaaactgccaagttgggaaaaaacctcagtgaacttctcaaaaccttcttcttcttcaagtttcaagggcttgaaagccagttgggcgaacgaatcctttctgaaccctgaaggaatttctctggctttgggaaggtaaacttgaaggggctttcccaagtccctgggaccttgcaggatttcgaaacgctggaccgcggactccttctggctcgacttgctctcagccagctctccctcctcagctgagcgattcccgggggcgcagcttggcctttcagggctgaaggggctcaaggcccaggaaagaggttgactttcaagccccttggtgcccaacgacaatctgtgtccggcggctctgaggttcctccactacctcttcatctgaagatggcacccgagatgcccgtggctctgtagagtcctggaacaggtgtgcatccgagtctgctgcctccgacaggcccaaggtacccccaggccgaattgaccggggcccggtgcccacgcttgcgccccaagttggcacggctccgatacaatggcactgtcgaggatctcggtgtccatcaggctgcggcctccaggagggtggagagtccctgccaggctccagcacctcctcttgggcagcacctgccccggctccttcctcctccaacaggcccccaaggcccgaggccgctgactccctccgagccaccgccttggagctgctggctgccagcatctcctccagcaggccctgggagccggagggtggggggcgggccgggcacctgccagggcttgctccgaagctgagggcttctcctgtctccattccagggtctgcagggtgtggctccaaggaagacgaggagtaatcttcaccctgggtctctggcccacttgtctcaccaacccccagctccctggcctccaaggggtctctggcctccaggccaggagacaagctgccattgtgcctcaggccgggctgtgggcactggctctcgccgcccacgcgcttt

SEQ ID NO: 14792 - DNA, 963 bp, Homo sapiens
  SIMILAR (1)..(165): 1001254mologous to Homo sapiens Human secreted protein, SEQ ID NO: 6388,accession number G02307,Smith-Waterman Score=289.
atggctcgcaaagactgctgttccccaccgggcgattcgagcccaggccgtttgcctctggttctgcccgctcaatgccttgtactgctgaggctgcagataacggccttcagttccatccacgttgctgcaaatgacatgatgtcattcttccttatggccaagcaggattccattgcgtataagtaccgcattttctttatccattcatctgtggatggacacgcccggcctctgagtccatccctggtggtggaaaacggctgtggcaaacaggttttcctgctttgttctgacaatgcctcacctgaagtgtcaactgtggccctggcttcctgcccagggaccttcccccgacattgtggtgctgccgaaagcactcatatctgtgcaactggcctaggggagctcactccccagggccatggtcacatcccaaataaactgtgtgcatgctgtgcaactggcctagaggagctcgtgccccgggaccatggtaaattagggatttcttggtttggattcattgctggggcttaccttaatcttgctagggtggtaggagagtgtcagggaagttatggctacctctccctccaccactactgctactgccactattaccattactgccactaccactaccattgctgctacatactaaaatcactactaccattactaccaccccataacaactcttaccaccaccattcctactatcattactcctaccatttctatcactactactacaactgttaccaccaccactaccactgtcgccactattaccatcctcatgactactaccactaccatgctgccactactccctctactactgccattacctttgccactactactaccgttgttaccatgatcactcctcacaccagcacaaccaccacgagtgtttgccgtgagtcagacactctgctgaacatttacagtatctga

SEQ ID NO: 14793 - DNA, 1450 bp, Homo sapiens
  SIMILAR (951)..(1385): 311254mologous to Mus musculus pro-alpha-1 type I collagen,accession number M14423,Smith-Waterman Score=88.
atgtgcctgtggcgggcctctgaggtcactgtcctggtgaagacgaaggctaccgtccccgctttctggcagtgtctgcgagggcctgcgcagcgcgcatctgatgtcatcagcccccagcaagcccgttttccagaagagaacccggaggctccgagaagcccccggaacgcggctgcccggcttgggagcctgcggcacagggccctgtgcagccccttggggaagacggccccaggctctgccagcccccgccaccctctccagaccatgctctgggggccctatggccaccagcgctctggacgccccactctgccaggcccccgcaaacaccgccaaaaagcggggacggtagccttcgtcttcaacaggacagtgatctcacaggcccaccacgggcacacctgggggccaggccgggggttctggatgagtcacagcaggagggcagtgaccaccgcaaaacctttaagcaaagatctcatgccccgaaatgccagggccgtcaccagggatgcagcagggagtgaaacacccatctcttttctcacaccaaaccgtagccaagggattcaccacgagatggaactgtcgccaagtgtgtccccatcgtggggagaggaagtggatcagcagcgtcaggccttgcggaggtgcactcgcaccctcctgcgctacggtctcagaggcaggaggacgctttcagggagccagccgctgtggcacctgcagcagtttcagcagttgggcagctccagccgccctgccacaccctcactcctcatccactccaaaattcaacgcagcatgccgagccccagagagggtctgtctactcgttgtaagagggaacaagtccacattgcagctgtaccctttgccccccatattgaaaagcgtcctttttcaacctttccagctggagatgcgtgaccttcggaagcccacgctcgggacccgcgtgctgccacagccccgggggcctggagggtcccgtgagccgagcgggacccgggacaagcgcgggacgccgcggggaacggacgggaacgcgcgtggccgccccacagcgggccttcgacacctcctgacacgtcctgcgggtgcccggtcctcagttggctcgagccggatcccggcgcgccaacggctcgaccttgccccccacgaggcagggcttcctgcccggcaggaaggactcggccggcgcctgcgggcaaccgatgagctgaaggcgccgcggctgggccgtcccgctctcccgccgccgagcgcgctgtcctcccgctgcccagagcgtcgccggaagtgccgagggggcgggccaggggtggagactggcgtttccggcgcgcgacggggcggggaccgtagcgggtgcagtccagctgctctggacgctgaggccccggcttctcttgctggggtgtcgattcgggagggctga

SEQ ID NO: 14794 - DNA, 2424 bp, Homo sapiens
  SIMILAR (2520)..(1006): 601254mologous to Sus scrofa domestica submaxillary apomucin,accession number AF005273,Smith-Waterman Score=1481.
ccttgttcacgaacttgtggaaaaggaatgcagagcagacaagtggcctgtacccaacaactgagcaatggaacactgattagagcccgagagagggactgcattgggcccaagcccgcctctgcccagcgctgtgagggccaggactgcatgaccgtgtgggaggcgggagtgtggtctgagtgttcagtcaagtgtggcaaaggcatacgtcatcggaccgttagatgtaccaacccaagaaagaagtgtgtcctctctaccagacccagggaggctgaagactgtgaggattattcaaaatgctatgtgtggcgaatgggtgactggtctaagtgctcaattacctgtggcaaaggaatgcagtcccgtgtaatccaatgcatgcataagatcacaggaagacatggaaatgaatgtttttcctcagaaaaacctgcagcatacaggccatgccatcttcaaccctgcaatgagaaaattaatgtaaataccataacatcacccagactgggttcacagccaacatctggtagtgaatctgacttttctgttggtcaacaggaccaacagttgggaagaaaaaacgggtctggagttcaagagagcaaagtgaagggagacatggatctctctgttttgccaaataacaaccatcctgacaaattcctgcagcttgacgtaaagtctttaacgaggagctcagccctccttcaggccagcctggtgaggtttccgggtggaaattatcctgctgcacaacactggcaaaaccttgtctactcacagggcttaatcagcacaattaatcacttgtattcctttggaagttcttcactcatttgtcaagatacccgtatattgacacaactgaaataccgccctcaaaataggcaagctgtggtttggcatcctggtacacacctgccctctggtgtgaaacaaaacttctttttattgtataaagtaataaccattcttaatatcaaacttctactcaaggttgaagaagaaataaagaagcacggaagtaataacatgggattatcagaaaacctgactgattgtgctgctgctggcaatggtgatgatggactaattccacaaagagcagaaaacctgaaaatcagcaatttcctaggacggagaatgaagagtatcataggtgatgaacatcaaaaaccaaaggtagataaaaccacaaagaggtggagaaaccagtgcagaaaggctgaaaattcccaaaaccagaatgcctcttctccaaaagatcacaactccttgccatcaagggaacaaaactggtcagagaatgagtttgatggcttgattgaagtaggcttcagaaggtgggtaataacaaactcctgtgagctaaaggagtgtgttttaacccaacctcaggtggacatcacggtcctaccgatatgtgatgtcacccccagaggcctagctgtaaaattcctctctttgtactctttctctttatttctcaaccggccgacacttatggaaaatagaacctacgttgaaatattgggggtgggttcccccagtacttatccaccacgatcaagtcagcttcatccgtgggatgcaaggctggttcaacatatgcatatcaataaagcgttggaagttctggccagggcaatcaggaaagagaaagaaataaagggtattcaaataggaagagaggaagtcaacttgtctctgtttgcagatgacatgattgtatatttagaatacctcatcgtctcagcccaaattctccttgaggtgataagcaacttcagcaatgtctcaggatacaaaatcaacatgcaaaaatcacaagcattcctatacaccaataacacacaaatagagacccaaatcatgaatgaattcccattcacaattgctactaagagaataaaatacctagtaatacagcttacaaaggatgtgaaggacctcttcaaggagaactataaaccacttctcaaggaaataagagaggacacaaacaaatgggaaaacattccatgcttttggataggaagaatcaatatcgtgaaaatggccatactgccaaaagtaatttatagactcaatgtgatccccatcaagctaccactgactttcttcacagaattggagaaaactactttaaacttcatatggaaccaaaaaagagcccacatagccaagacaatattaagcaaaaagaacaaagctggaggcatcatgctacctgacttcaaactatattacaaggctacagtaaccaaaacagcatggtactggtaccaaaacagatatgcagaccaatggaacagaacagagccctcagaaataacatcacacatctacaaccatctgatctttgacaaacctgacacaaacaagcaatggggaaaagattccctatttaataaatga

SEQ ID NO: 14795 - DNA, 2571 bp, Homo sapiens
  SIMILAR (121)..(528): 851254mologous to Homo sapiens gag,accession number AF156961,Smith-Waterman Score=625.
tttgtctaacgcaggctagcttaataaaatatgcttttcaatataatagagaaagtatatgcatttcatatttactaaatcagtgccaggaaagaggaatatttatttactgattgaattattttgttttgctaacacagtgttttattttattttatttattttattttattattattatacttgataagttttagggtacatgtgcacaacgtgcaggttttgttacatatgtatacatgtgccatgttggtgtgctgcacccattaaactcgtcatttagcattaggtatatctcctaatgctatccctccccccctccccccaccccacaacagtcccccagagtgtgatatccccccttcctgtgtcccatgtgatctcattgttccaattcccacctatgaagtgagaatatgcgggtgtttggttttcttgttcttgcggatagtttactgagaatggatgggtttccaatttccatcccatgtccctacaaaggacatgaactcatcatttttttatggcttgcatagtattccatgggtgtatatgtggccacattttcttaatccagtctatcattgttggacatttgggttggctccaagtctttgctattgtgtgaataatggccgcaataaacataccgtgtgcatgtgtcttaatagcagcatgatttatagtccttttgggtatatacccagtaaatgggattggctgggtcaaatggtatttctagttctagatccctgaggaatcgccacactgacttccacaatggttgaactagtttacatgtcccaccaaacagtgtaaaagtgttcctatttcttccacatcctctccaagcacctgttgttttcccgacttttttaatgaccgccattcctaactggtgtgagatggtatctcatttgtggttttgattttgcatttctctgatggacagtgatgatgagcattttttcatgtgttttttggctgcataaatgtcttctttttgagaagcatctgttcatatccttcgcccacttcttgatgggggttgtttgtttttttcttgtaaatttgtttgagttcattgtagattctggatattagccctttgtcagatgagtagattgcaaaaatcaccactcctattcaacatagtgttggaagttctggccaaggcaatcaagcaggagaaggaaataaagggtattcaattaggaaaagaggaagtcaaattgtccctgtttgcagatgacatgattgtatatctagaaaaccccatcgtctagcccaaaatctccttaacctgataagcaacttcagcagagtctcaggatacaaaatcaatgtgcaaaaatcacaagcattcttatacactaataacagacaaacagagagccaaatcatgagtgaactcccattcacaattgcttcaaagagaataaaatacctaggaatccaacttacaagggatgtgaaggacctcttcaaggagaattacaaaccactgctcaacgaaataaaagaggatacaaagaaatggaagaacattccatgctcatgggtaggaggaagaatcaatatcatgaaaatggccatactgcccaaagtaatttatagattcaatgctattcccatcaagctaccactgactttcttcacagatttagaaagaactactttaaatttcatatgcaaccaaaaaagagcccccacattgccccaagtccaatccctaagcccaaaagaacaaagctgggaggcatcacggctacctgacttcaaactatacctacaaggcctacagtaacccaaaacagcatggtactggtacccaaaacagagatatagatcaatggaacagaacagagccctcagagataatgccgcatatctacaactatctgatctttgacaaaccctgggaaaaaccaagcaatggggaaaagattccctatttaataaatggtgctgggaaaaactggctagccatatgtagaaagctgaaactggatccctttcttacaccttatacaaaaattaattcaagatggattaatgacttaaatgttaggacctaaaaccattaaaaaccctagaagaaaacctaggcattaccatgccaggaccataggcatgggcaaggacttcatgtctaataaaacaccaaaagccaatggccaacaaaagccaaaattgacaaatgggatctaatttaaactcaagagcttcctgcacagcaaaagaaactaccatcagagtaaacaggccaacctacaaaatggaagaaaattttcacaacctactcatctgacaaagggctaatatccagaatctacaatgaactcaaacaaatttacaagaaaaaaacaaacaaccccatcaaaaagtgggcaaaggacatgaacagacacttctcaaaagaagacatttatgcagccaaaaaacacatgaaaaaatgctcaaccatcactggccatcagagaaatgcaaatcaaaaccacaatgagataccatctcacaccagttagaatggcaatcattaaaaagtcagaaaacagcaggtgctggaga

SEQ ID NO: 14796 - DNA, 420 bp, Homo sapiens; identical to SEQ ID NO: 3913
  SIMILAR (85)..(978): 821254mologous to multiple sclerosis associated retrovirus polyprotein,accession number AF009668,Smith-Waterman Score=1247.
  misc_feature (1)...(420): n = a,t,c or g

SEQ ID NO: 14797 - DNA, 1197 bp, Homo sapiens
  SIMILAR (94)..(366): 811254mologous to Homo sapiens replication protein A 14kDa subunit,accession number L07493,Smith-Waterman Score=382.
atgggcctcagcgtgctccctctgcaccccaacgcaagctccggccgcttcttgtccccctcctcctgccgcatcacagcccacctcagcctctttgtaggttccatgcgacgctgtaccatggctgggagtcttccaggcgccgtgctggcgccttctgtgcatggactccaagtcgccataatcgtacgggttacccccattatcagtcccctcttatacatcaggctagtgagacagtatcttatcacagtcctacagctggcaggagtagattcaaaccctagcagcaccaatagtgaagccagtcgctacatctcccccacactaaagggaggtggtcgcaccgtggggtccactggaagttgcctaccagaccaggtcatcccaaacacaccctctagccatttggtgtggcatcggaaagaaactaaggccagcctcgggggccggggccttctgtttgagtccatcgaagtctttccggaaacatccgccagttcctccgccacggccagcacagagaatcctgttgtggtcgatggccttgatgagctgaaagtcccacctggggcgctgatccggacatctgcggggactgggagaagaagaagccggtgcccgtcctcctgggagtttgctgaagaggaagatgttacccagggcagccttgctggtcacacgcggcccagggcactgagggacctccagctcctggcgcagcagccgactacgatcttcgctctcttcgcctctggacagatttctgtctctcttcagctcaaacagcaacctcaagtttctggaagtgaaacaaacttcctgagtgactcttctgtgcggattctttgtgaccacgtaacccgtgcacctgtcatctgcagaaagtggagttgggaggtcactgtgccaccccggagcagtgggctgaatcttctatgtcctcaaagccaaccagtccctgaagcacctgcgtctctcgccaatgtgctcctggatgagggtgccatgttgctgtacaagaccatgaacgcccaaaacacttcctgcagatgttgtcgttggaaaactgtcgtcttaagaagccagttgcaaggaccttgctgctgtcttggttgtcagcaagaagtgacacacctgtgcttggccaagaaccccattggggatacaggggtgaatttctgtgtgagggcttga

SEQ ID NO: 14798 - DNA, 627 bp, Homo sapiens
  SIMILAR (502)..(876): 871254mologous to Homo sapiens gag,accession number AF156961,Smith-Waterman Score=578.
atggcgcgggaacagacggaggtcggactcctgcaccccgagcctttccagatcctctcggtgaagcacggacgtctgcgcccacaggccctgcgcggccaggaggctcagcgtccgcagcgcgccccgcagctgtgcgccctgcggaaccggctgcagaggaaacgcaggaacagccccgtgcgggaaagagagccatccatgaatacagatacgtttatgtgcagcagcgacgaaaaacagacccgcagcccgctgtcgctgtattcggaataccagcggatggagattgagtttcgcgcaccgcatatcatgcccaccagccactggcatggtcaggtcgaagtgaatgtgcctttcgatggcgatgtggaatacctgatcaacaatgaaaaagtgaatatcaatcagggtcatatcacgctgttctgggcctgtacaccgcaccaactaacagataccggaacctgtcagagcatggcgatttttaatctgccgatgcatctgtttctctcctggccgctggataaagacctgattaaccacgtcactcacggcatggtgatcaaatcactggccacacagcaacttagcccgtttgaagtgcgccgctggagcaggaattaa

SEQ ID NO: 14799 - DNA, 2767 bp, Homo sapiens
  SIMILAR (1)..(1011): 991254mologous to Homo sapiens G protein coupled receptor OGR1,accession number U48405,Smith-Waterman Score=1775.
atgagaacatttcacaactccaacctgctcagtgatgtccacatgctagggtactcagcttcgcccttcctgttcatcccctgccctctgtcctgtgggagtcatcatggcacaaaagagcaggaaggcgagaaggccaagatgcagcggtccacctggaccatcacaggacacagccccagaactaaaccagagctgcccatgggaagaggagcttacgacaacatctgcaggaagtgttttgggcgtgtcatggtcttatcccccagcaacacggtgcagtggactccaggtgcggggagagccgtgaccgtgagacccacctcagtgagagtttctgcaagtcttgacaatgcttcaggctgaaggaacaatgcatcacttcagaagtatttgtcaggtgaatagaaatttccttgaacggggccaccaccaccttcgccagctcctcctcctgagactcatacaggcagcccaagacctccttcaggtcggtcacggataagggcttatttgcatgaagatgtgctttgcattgcagcaattcctgtttgatgtccggtgacatccggcagccaaaagtggcctccaactccttggctctctctcggcgtagacagggcagtgagaaactgctggaagctgaggtggatgaaggagtagcacctttggagactctgtcctggcggaggatgtctccgtccaggaacagacgaggtcggactcctgcaccccgagcctttccaggtcctctcggtggaaccggacatctgcgcccacaggccctgcgcggccaggaggctcagcgtccgagcgcgccccgcagctgtgcgccctgcgggaaccggctgcagaggaaaccaggaacagccccgtgcgggagctggaggtccctcagtgccctgggccgcgtggtgaccagcaaggtgccctgggtaacatcttcctcttcagcaaactccccaggaggacgggcccggcttcttcttctcccagtccccgcagatgtcctggatcagcgccccgggatttggctgaattgggcttcagtgggctttggagaattacggcttgctgaatctccccggataggcaactggcgcggcagtgaagagctgggcttccggaagctgacagctgtttgtgatttcaagacctcagacaggttttctaaatatgccttgccttcattttctcaggaaagtgaaaaatggctcccacgtgggacaagatggtgtcttcggcgcagatgggcttcaacctgcaggctctcctggagcagctcagccaggatgagttgagcaagttcaagtatctgatcacgaccttctccctggcacacgagctccagaagatcccccacaaggaggtagacaaggctgatgggaagcaactggtagaaatcctcaccacccattgtgacagctactgggtggagatggcgagcctccaggtctttgaaaagatgcaccgaatggatctgtctgagagagcaaaggatgaagtcagagaagcagctttgaaatcctttaataaaaggaaacctctatcattagggataacacggaaagaacgaccacctctagacgtggacgaaatgctggagcgcttcaaaacagaagcacaagcgtttacagaaacgaaaggaaatgtcatctgcctgggtaaagaagtctttaaaggaaaaaagccagacaaagacaataggtgcaggtatatattgaagacgaagttccgggagatgtggaagagctggcctggagatagcaaagaggtccaggttatggctgagagatacaagatgctgatcccattcagcaaccccagggtgcttcccgggcccttctcatacacggtggtgctgtatggtcctgcaggccttgggaaaaccacgctggcccagaaactaatgctagactgggcagaggacaacctcatccacaaattcaaatatgcgttctacctcagctgcagggagctcagccgcctgggcccgtgcagttttgcagagctggtcttcagggactggcctgaattgcaggatgacattccacacatcctagcccaagcacggaaaatcttgttcgtgattgacggctttgatgagctgggagccgcacctggggcgctgatcgaggacatctgcggggactgggagaagaagaagccggtgcccgtcctcctggggagtttgctgaacagggtccctctgtgcatcgagaacaagctgggggttggtggtgaggattggggggaccagctaagagtctactggtggaatccaagcaagagagagggtggctctggctggagccatgggagtgaagatgccaaccagtccctgaagcacctgcgtctctcagccaatgtgctcctggatgagggtgccatgttgctgtacaagaccatgacacgcccaaaacacttcctgcagatgttgtcgccttgggaaaccacgctggcccagataataatgctagactgggcagaggaaacctcatcggacaaattgaaatatgcgttctactgcagctgcagagagctcagccgcctgtgcccgtgcaattttgaagagctggtcttcagggactggcctgaattgcaggatgacattccacacatcctagcccaagcacggaaaatcttgttcgtgattgacggctttgatccgctgggaggccgcaccttgtggacgctgactcgaggacatctgcgggaacttgggaacagaagaaagcggtgcccatcctcctggggagtttgctga

SEQ ID NO: 14800 - DNA, 760 bp, Homo sapiens
  SIMILAR (287)..(415): 971254mologous to Homo sapiens Human secreted protein, SEQ ID NO: 6388,accession number G02307,Smith-Waterman Score=217.
ttatttagtcctcaggacaattctgctgtagtgaccccggtctccactttccgggtaaggaaatcgagtcatggagaggccaggggacttgtctggattcccagctcttcccagctggaagtgatggcctatggttaactgagcaactacagtctgctcaatgaacctggcaaccaaccaagtacttcctggtgaacctgagcttgtggtaagagcctgggatcgatacttcatgcctgtgcgctgggcggtgcagccgtccagggaaaggccgtgcatgcggaggaagctctccatgttcctggcctgggcagccgcccgcacctcccgcagccgctgcagttccagcgtgtccgtctggcggacggggtgcagggcccattcagagtggcacctgctgctcacgctccgcagactctcgctgtacgtcatggacagcatggtgccgcctggcttgggagctgccactgtccagacggtgatgagttagacagtgtgccaatgccccacgtgccccaggctggatggctggccctggggcagggggcagctgcagcgaaacatcctttaactagtgccaccaccaggtcttggtgtctaggagtgggacccggcccctggatgtaaacacctcttggcatgagattctcagtccgcaaagcagtgcttgccaggaactctggctaagctgcccttttctgtcccctgcatctgtgagacaagcacaggcaaagctgcattccaggcaggacagctgcac

SEQ ID NO: 14801 - DNA, 378 bp, Homo sapiens
  SIMILAR (374)..(213): 831254mologous to Homo sapiens Human secreted protein, SEQ ID NO: 4473,accession number G00392,Smith-Waterman Score=235.
atgtgtaatgcacaagtcctggaatacatggggaaatcatcatcactactgaccagcgacttgcagcttgttcgagatgctctccgcagcctgcgcaacagcttcagtggccacgatcctcagcaccacactattgacagcttggagcagggcatttctagcctcatggagcgcctgcatgttatggagacgcagaagaaacaagaaagaaagcctccactggtgatacccaggcaaacagggtctggagtggacctccagcaaactccaacagacctgcagctgagggacctgactgttagaaggaaaactaacgaacagaaaggaatagcatcagcatccacaaaaaggacatccacaccaaaacctcatctctag

SEQ ID NO: 14802 - DNA, 753 bp, Homo sapiens; identical to SEQ ID NO: 2578
  SIMILAR (217)..(351): 861254mologous to Homo sapiens Human secreted protein sequence SEQ ID NO:103,accession number Y87064,Smith-Waterman Score =195.

SEQ ID NO: 14803 - DNA, 489 bp, Homo sapiens; identical to SEQ ID NO: 6972
  SIMILAR (247)..(486): 561254mologous to Homo sapiens PRO2221,accession number AF116695,Smith-Waterman Score=229.

SEQ ID NO: 14804 - DNA, 1071 bp, Homo sapiens
  SIMILAR (376)..(618): 811254mologous to multiple sclerosis associated retrovirus polyprotein,accession number AF009668,Smith-Waterman Score=316.
atggtggtgtatgcctgtagtcccagctatctggaggctgaggtgggaggatcattgagcctggaagttgaggccacaaaccctaaaaactcatccaaaaagttcctagatctgatcagcgaattctgtaaagtctcaggatacaaaatcagtgtacacaaatcagtagcactgctgtacaccaaaaatgaccaagctgcgacccaaatcaagaacttaatcccttttacaacagctgcaaaacaattcaaatactttggaatatacttaaccaaggaggaggagcgactcaagccttcgcgaaagaaaataaccaaaaagcatacaaagaaacgtacggcgtctctcatattacacgccatgatatgctcgcagatccctaaacagcagcaaaacgaaaaataccaagtgcctcaattcgatcaatcaacgattaaaaatattgagtctgcaaaaggacttgatgtgtgggacagctggccgctgcaaaacgctgacggaacacctccgctggtgatacccaggcaaacagggtctggagtggacctccagcaaactccaacagacctgcagctgagggacctgactgtcagaaggaaaactaacaaacagaaaggaacagcatcaacatcaagaaaaaggacatccacaccaaaaccccattgtgtatctgaaagtgacggggagaatggaaccaagttggaaaacactctgcaggatattatccaggagaactcccccaacctagtaaggcaggccaacattgaaattcaggaaataaagagaacaccacaaagatactcctcaagaagagcaaccccaagacacataattgtcagattcaccaaggttcaaatgaaggaaaaaatgttaagggcagccagagagaaagtattggaagttctggccagggcaatcaggcaagagaaagaaataaagggcattcaaacaggaagagaggaagtcaaattgtctctgtttgcagatgacatgattgtatatttagaaaatcacatcatctcagcccaaaatcgacttaagctgataagcaacttcagcaaagcctcatga

SEQ ID NO: 14805 - DNA, 1161 bp, Homo sapiens
  SIMILAR (195)..(317): 851254mologous to Homo sapiens Human secreted protein sequence SEQ ID NO:103,accession number Y87064,Smith-Waterman Score =173.
ttaaaatctcaatttcctcatctgtaatatggagacaataggatgctgactctgtagggttgtcatgaatattaaatgaaagtttatgttattaagtgcaaaaaccttaacacacttctgagcacaaagtagaaactcagtaaatgcaaaagcatcctggtcatcatcatcatcatcatcatcatcaaagcaaaggttgctgcacgtttgctggaggtccacttcagaccctgtttgcctgggtatcaccagtggaggctgcagaacagcaaagattgctgcctgttccttcttctggaagatttgtcccagaggggcacccgccagatgccagccagagctctcctgtatgaggtgtctgctgacccctgcgggaaggtgtctcccttctctcctggagaccctctgtttgttcttccgtccctctccacccttctgcatcctactgtgtcctagatggactgcatcaaccagttctctctcattgatcggcaggcttccagttgtcaatcctggggcaggtgcttgcaggccagaggctatacgcagctctctctggtggggtgggctgactttaggccaactgtcaggcaggggggtgggtgcctgtgggcctgatatctgctcatggacttcccactgctgcacagttggcttgtgtccctgggtgataaggtgcctcatgaattttggcgtgggtgtcccagttgttcctttgggcctaggttctgggtagctggggtactggtattgtaggcaccaaaactgtgactgagacaagtgcgtagtgcaggaaagaggtgtggacagaagtggtaaataaaataatggataggctgtgtgtggactaaaataagtgtcagattctgacttaaagcctgccaccagttgcagcttaattgtcacttgccactcactgttagggttttgatatgagtctgcaagcaattgatgtattatggtctctgtgcagacctctctgctaatgttaatctgtatttgcacctgctccccagtgcgtgcatcactgccccagctccacctcagatcatcaggcattagattctcataaggagcatgcagcctagatcccttgtatgtacagttcacaataggggtcacactcctatgagaatcgaatgccaccgctagacataccat

SEQ ID NO: 14806 - DNA, 753 bp, Homo sapiens
  SIMILAR (1)..(381): 981254mologous to Homo sapiens Human secreted protein, SEQ ID NO: 6096,accession number G02015,Smith-Waterman Score=640.
atggagtccatgcttaataaattgaagagtactgttacaaaagtaacagctgatgtcactagtgctgtaatgggaaatcctgtcactagagaatttgatgttggtcgacacattgccagtggtggcaatgggctagcttggaagatttttaatggcacaaaaaagtcaacaaagcaggaagtggcagtttttgtctttgataaaaaactgattgacaagtatcaaaaatttgaaaaggatcaaatcattgattctctaaaacgaggagtccaacagttaactcggcttcgacaccctcgacttcttactgtccagcatcctttagaagaatccagggattgcttggcattttgtacagaaccagtttttgccagtttagccaatgttcttggtaactgggaaaatctaccttcccctatatctccagacattaaggattataaactttatgatgtagaaaccaaatatggtttgcttcagtcaggcccctctgctgcatgtctgttggagtttgctggaggtccactccagaccctgtttgcctgggtatcaccagcggacgctgcagaacagcaaagattgctgcctaatccttcctctggaagctttgtcctagagaggcacctgccagatgccagccagagctctccttgcacaggtgactgtcaggacaagagtggaagcagggagaccagtgcagaacctattgtaataactcaggcaaaagacaatctgattgtagcagtggaggtg

SEQ ID NO: 14807 - DNA, 1054 bp, Homo sapiens
  SIMILAR (394)..(1053): 811254mologous to Homo sapiens putative p150,accession number U93572,Smith-Waterman Score=885.
atgaaacttactgatggtggttcagaagtcaatgggaatgcatatagctatgttcaatcaagaaaccagagaagtctctcctctgctggtgatacccaggaaacagggtctggagtggacctccagcaaaatccaacagacctgcagctgagggacctgattgttagaaggaaaactaacaaacagaaaggaatagcatcaacatcaacaaaaaggacatccacaccaaaaccccatctgaaggtcaccaacatcaaagaccaaagactaaaccaggaagaatttgaatgtctgaatagaccaataacaggttctgaaattgaggcaataattaatgtcctaccaaccaaaaaaagtccaggagcagatggatttacagctgaattctaccaaagaaccaaagacaaaaaccacatgattatctcgatagatgcagaaaaggccttcaacaaaattcaacagcccttcatgctaaaaactctcggggaactaggtattgatggaatgcatctcaaaataataagagctatttatgacaaaccctcagcgaatatcattctaaatgggcaaaaactggaagcattccctttgaaaactgacacacgacagggatgtcctctctcaccactcctattcaacatagttttggaagttctggccggggatttccgtcaagagaaagaaataaagggtattcaattaggaaaagaggaagtcaaattgtctctgtttgcagatgacatgattgtgtatttagaaaaccccatcgtctcagcccaaaatctccttaggctggtaagcaacttcagcaaagtctcaggatacaaagtcaatgtgcaaaaatcacaagctttcctacacaccaataacagacaagcagaaagtcaaatcatgagtgaactctcactcacaattgctacaaggagaataaaatacctaggaatccaacttacaagggatgtgaaggacggacctcttcatggagaactacaaaccacggctcaaggaaataagagaggacacaaatagaaaaacatcccatgctcatggatag

SEQ ID NO: 14808 - DNA, 1247 bp, Homo sapiens
  SIMILAR (710)..(958): 631254mologous to Homo sapiens Human secreted protein, SEQ ID NO: 4473,accession number G00392,Smith-Waterman Score=269.
ttaaatgtggtctctcaggcgttgctttgtttttttatctgtcttctctttgtaagagaggaaatttctttttccttgctcatactctgtgtgtaaagccagccctatcttttcagctcgaaccatttttgaccttaggctttctcctgcctctttaaatgtgattccttttattcctaagcttgtggaaatggcattaacatacagaaaatctcctaagccagaaatctgggacaatttcttcttcattatcaccacatcatataccatgaggctctcaggccatagagccttgggtttttccaaaattattgctgctatcattccggttgttagagtttcccattccaagacgttgactttcaccaccacctcgccatgcatactaagtcttctcttcaccatcattctgggagctctcttcacatcttccatattgcataaattcctacatattccttctttataaattaatgccttggagtgtgacaccagaagcttcctccttttaattctggcaaacctgctttctccaaataactcctctctgtttccttctctttcagtagagtcaaactcttgatgacggtatttagcagttggtaaatgcctagtgtgctgagtctgtgcagatctgatactcttcacagtccctgaccaaagccccggatcctgaatcttacaaaatgcaatggaatctttgtctatgatgctggtgaccttcggatggggtttttgtgtggatgtcctttttgttgatgttgacgctattcctttctgtttgttagttttccttataacagtcaggcccctctgctgcaggtctgctggattttgctggaggtccactccagaccctgtttgcccgggtatcaccagcggaggcagcagaacagcaaagattgctgccttttccttcctctgggaagcttcgtcccagaggggcacccgccagatgccagccagagctctcctgtatgaggtgtctgttgatccctactgggaggtgtctcccagtcaggatacatgggggtcagggacccatttgaggaggcagcttgtcccttatcagagctcgaatgcagtgctgggagatctgctgctctcttaagaatggtcaggcagggacacttaggtctgctgaagctgcgcccatagccatcccttcccccaggtgctctgtcccagggagatgggggttttatctgtaagtccctgacgggggctggtgcctttttttcagacat

SEQ ID NO: 14809 - DNA, 2433 bp, Homo sapiens
  SIMILAR (418)..(1038): 911254mologous to unidentified cloning vector 29kD protein essential for the replication of mini F plasmid,accession number AB015619,Smith-Waterman Score=970.
atgcctgtctgggtcactgtggtcaagagctggaatacacagattggccggccaggccatgtgtctgctcttgggtttgagctaacaaagaacccctggcccctgacttatgagagtggggacgggcgttccttagggaaacctggggctgtgtccagaagaggtgggagacatggtccccatccccaacaagccgagtgtgacttgccagctggccgcattgctggaccctgtgagcggggcttggagcgccaggagaaattaccaccagctccccagggtggggcctggcatctcaggctttcccgggagaggttcaagtcagaagatgccccaaagatccacgtggccctgggtggcagcctgttcctcctgaatctggccttcttggtcaatgtggggagtggctcaaaggggtctgatgctgcctgctgggcccggggggctgtcttccactacttcctgctctgtgccttcacctggatgggccttgaagccttccacctctacctgctcgctgtcagggtcttcaacacctacttcgggcactacttcctgaagctgagcctggtgggctggggcctgcccgccctgatggtcatcggcactgggagtgccaacagctacggcctctacaccatccgtgatagggagaaccgcacctctctggagctatgctggttccgtgaagggacaaccatgtacgccctctatatcaccgtccacggctacttcctcatcaccttcctctttggcatggtggtcctggccctggtggtctggaagatcttcaccctgtcccgtgctacagcggtcaaggagcgggggaagaaccggaagaaggtgctcaccctgctgggcctctcgagcctggtgggtgtgacatgggggttggccatcttcaccccgttgggcctctccaccgtctacatctttgcacttttcaactccttgcaagcccacaagcagttgaaagacaggaaggtgggccctcactttatgcaaggcgctgtgttcctggaagggaaattctggggcgtggacattgcatcatttgagccacaggagcagttctggtggacaaacttgggcaaggaggatgaggataagagcttcgacatgccccactcgtgggtggagcagattgagatctccccggaagaggaggccatgggcagtgcccagatggtgcggggggtctcaggaccggagaggggcagcaagaagagaccacagctgactgtgtccacagcatttgagacccgctgcccgaacgggaagaaggtgattcagtacaagagggcaaagctggagaagtgggccccgtacctcaatagcaatggccttgtgagccgcctcaccacctatgaggacttgcagtgtaccaatattttggagataaaggagtggtaccagaaccgggaagacatgctggagctgaaacacataaacaagaccacagacctgaagacagactacttcaagcctggccacccccaggctctgcgcgtgcactcgtacaagtccatgcaacctgagatggaccgtgtcattgagttttatgaaacggcccgtgtggatggcctgatgaagcgggaggagacacccaggacaatgacagagtactatcaaggacgcccagacttcctctcctaccgccatgccagcttcggaccccgagtcaagaagctcactctgagcagtgcagagtcaaacccccggcccattgtgcgaagcccgcggaggatgacgtggcaaaagcgcgtgtttctggtcgcggaggagcgcatccagctgcgctaccactgccgtgaggaccacatcacggcctccaagcgcgagttcctgcggcgcaccgaggtggacagcaaaggcaacaagatcatcatgacgcccgacatgtgcatcagcttcgaggtggagcccatggagcacaccaagaagctgctctaccagtacgaggccatgatgcacctgaagagggaggagaagctgtccagacatcaggtctgggagtcagagctggaggtgctggagattctgaagcttcgagaggaagaggaggcggcgcacacactgaccatctccatctatgacaccaagcggaatgagaagagcaaggaatatcgggaggccatggagcgcatgatgcacgaagagcacctgcggcaggtggagacccagctggactacctggccccattcctgggcccagctcccgccaggagagaaactaacatgctggcaggcggtgcgccctcaaggatgagtgcctcagcgacttcaagcagcggctcatcaacaaggccaacctcatccaggcccgctttgagaaggtgccaccagggcctttgttggggagggggggatctcagcatctgcatccaggaaatgggcccacggctgtccgcccactacctcacaggcttgtga

SEQ ID NO: 14810 - DNA, 522 bp, Homo sapiens
  SIMILAR (117)..(332): 1001254mologous to Homo sapiens dJ576H24.4 (novel member of the PTPNS (protein tyrosine phosphatase, non-receptor type substrate) family),accession number AL049634,Smith-Waterman Score= 380.
catgtgcaacaaacggagatttcacggactgtatcaactgggagtccaatcatcttgagttgcagcgtacccgttaccttaccaaatggacctgtcttgtggttcaaagggaaccgggcccaaaccggaaattaatctacaatttcaaacaaggtaactttcccagagtaaaagagattggagacaccaccaagcctggcaacacagacttttccacccgcatccgtgaaatctctcttgctgatgctggcacctattactgcgtgaagttcataaaaggaagagctatcaaggagtaccaatcaggtcggggcactcaggtgtttgttactgtctcttacagttctagaagccagaagtctgaaatctgcatctctggactgaaatcaaggcatcagcagaactgctccttctggaggttctaggagagagcatattccctttctcttatggcttctggtttgctgccagcatccctggcctgtcagcagcatagaataaatcttcaaggccagtgtcaaa

SEQ ID NO: 14811 - DNA, 542 bp, Homo sapiens
  SIMILAR (327)..(1): 961254mologous to Plasmid F Protein A,accession number M12987,Smith-Waterman Score=564.
cgacaaggtaacttccccagagcaaaacagatcggagacaccaccaagcctggcaacacagacttttccacccgcatccgtgaaatctctcttgctgatgttggcacctattactgcgtgaagttcataaaaggaagagctatcaaggagtaccaattcaggtcggggcactcaggtgtttgttactgagcagaatccaagacctcccaagaacagacctgcaggcagagcaggctccagggcccaccatgatgcccatacctgcctttcggccctgcctgagagaaacagcacaaactatttcgtccaaccctgctgctgcctccggctgctgggactcacaggctttgctgtcaaaataatccaaacagggaaggaacgtacaagtaaataacaaaagcccccatactcttctgactccctggagacagctactttttaggagtttcatttgccttcttcaagagagctttcttccactgacataaaatgccagcttgatcgtacaataaatctgtctatttacctgggaaaaaaaaaaa

SEQ ID NO: 14812 - DNA, 1777 bp, Homo sapiens
  SIMILAR (345)..(4): 331254mologous to Homo sapiens Nmi,accession number U32849,Smith-Waterman Score=87.
atggggtcttcactgagtccggtgctgtatgtagctctgcctgtacggcagcctctgctgcgctctgtggtggaggaaaggagcaccaaaatgcgagttgggagcccagggttccaggctaaatttcgattctactcccaaggcctgagctggtcagcgagaggggaagaagggttggtgcccgcgttctggctccagccctatcccagacctctaaacttcaaagcagagatgacagaacagaaagaaaatcagacttatgtcgatgggggttttagaccttatatccacagaagaaagaatttgactgaggggcataaggcagaaaaagagatggagccttgggatggcttctctgatgagtcctgccgcacccattgtcaagttcatgactacgccaaaggtcatggtgaggtccagagggagcgggtggatgagcagaaagaacacttggggggtcgtaggcaggactgccagcagcagcatctgaaccgaaggctgcattgcctgtctcaggggaggcgccgagtgaagcctcgggcagtgttaggggtcatggccgtgcccatggactggctggatctgagagacatggccatgaccatgctgccccagagcaccagctccttcagagtgtggacgctgaccacgtggtcccagttgcctggtaccagttctgggatgatgaaggcagaggaatattgtctcctggggatcacaagccagatagaagaggtgcggctctatattgattggtttgcgtatctaaggcacatcctggctgatccctttgctctctaccattactcatccgtcctcacaaaaaaccctttctcttctgaggttatcctcattcggccaataaaaccaataggctttaaagagaaggtgtcaatttgtctgagctcaaaggatgggaagttcttccagctgaaaaagatgaggggagaggctaaagaaggaatcaggaacagtcagaatctcagtgggaagctatgcagcttccaagtgcagcttgatgagtcagctgtgaagacagggtatgtccagatctctgtggagaggaacagcaacaggtctgaaaagaagagactgtatgtctgtccatcttcagatacctccaccaccaatgaccaactttccttcctgggaaaatggggagccagagagagaacagaaagtgaaatctcttcctctggcagccagccaagccacatcttggagaggctacctggctgtatctggtgggaacaggaaagcaggctacctgtggccctgaagaaagccttcatagggaaagatgtaggaaccctacctggtgctgattcttctgagcaattttcagaggcctcctttgcctgctttcacccaagggaaatttctggccctcagaccacgcgtacttggctctctgacagtgtacctgcacccaccaccctcatggatcacaactcctcgccagcaagggaacaaaactggatggagaatgagtttgatgaattgacagaagtaggcttcagaaggtgggtaataacaaactcctccaagctaaagaagcatgttgtaacccaatgcaaggaagctaagaactttgataaaaggttacaggaactgctaactagaataactagtttagagaagaacataaattaccctattggagcttaaacacgcagcatgagaacttcgtgaagcatacacaaagtatcaatagccaaatccatcaagtggaagaaaggtattatatatggaggtcacccaatgaataaatgtgaag

SEQ ID NO: 14813 - DNA, 1026 bp, Homo sapiens
  SIMILAR (201)..(326): 471254mologous to Homo sapiens Human secreted protein, SEQ ID NO: 5217,accession number G01136,Smith-Waterman Score=66.
actgagtcgagggcatctccaggacaggcattcaggcagagcaagctccaggtttcaccacaatgcccatcccagtgtcagtcaatcccggagatgtcctaaccctggcctgcaatatgtctgctctgtccccagaagggcctgtcttgtggttcaagagcattgggccaggacaacaattaatctttagttgcaatggaagccacttccccagagtaactccagtggaaaacacaatggttgatcaaactgactattcaatcatcttgagttgcagcgtacccaataccttaccaaatggacctgtcttgtggttcaagggaacagggccaaaccggaaattaatctacaatttcaaacaaggtaactttcccagagtaaaagagattggagacaccaccaagcctggcaacacagacttttccacccgcatccgtgaaatctctcttgctgatgctggcacctattactgcgtgaagttcataaaaggaagagctatcaaggagtaccaatcaggtcggggcactcaggtgtttgttactggtgagtatgtctcctataccccataccccctggtgtataatagtgcccctctgggatgaagcttccagaggaaggagcaggcagcaatctttgctgttctgcagtctccactggtgatacccacgaaaacaggatctggagtggacctccagcaaactccagcagacctgcagaagagtggcctgactgtcaaaaggaaaactaacaaacagaaagcaacaggatcaacagctgaaaactccaaaaaccagaatgtctcttctcctccaaagaatgacatctcctcgccagcaaggcaacaaaactggatggagaatgagtttgacgaattgacagaagtaggcttcagatggcgggtaataacaaactcctccatgctaaaagagcatgttctaacccaatgcaagaaagctaagaaacttgataaaaggttgcaggaactgctaactagaataaccagtttagagaagaacataaatgacc

SEQ ID NO: 14814 - DNA, 1524 bp, Homo sapiens
  SIMILAR (1009)..(1257): 401254mologous to Drosophila melanogaster BRCT-domain protein MUS101,accession number AF257463,Smith-Waterman Score=114.
ctagatcagagccacactggccagtacttcaatcaagatgctgaccgtggctctacctgaaaggccaggagaacttccttgtactgaagtatcagggactgtgattttcttggttgcgaagtttttgccattagtgactgggttatggacataacacagatagtccccactattctctgtagtgacttgggggataaagagctcttgtcctgtttgctggttattcccattcagcagccaagaatactctgctgatgggttagagcccatgaggcaggagaggttgaggtttgaccctgcatagtaataggtgtctgaagaataagttgtgggttcatctgggccatgtatttcttgctttaccagctgattgttagctaagagctcccttatttggaatggtgtttctgctatttcttcactttctgtatctccttccttcccttttggtgtattataggagatatgttgctcatctccaaaattctctgctgcttgcagagctgcctgtttttcagggtgtacacggaaatatccagttgcttcttcaatggtaaaatctgtctttatgatttgtagggtatagaatcctgtgtcatcctgggtgactttccgggtcagcagggatgcattggcaaatattacctcctgactactgtatgcaggtcctgagctagatctttgaatgcctgttgcatatcttcttcctttgtgccaattgtagcccatcactttcaggggcagattgtgggcaagtagaaaaaactcctcctcctcctcctctgtggcattgaatggcatggcttcagtagtgactctggcagtggtgggtgggttccagaaggttaaaagtgaggctgtgaacatgagcttctgccagaggatgtgccatcttgctttgggtgggctgagtgctggctggtgagaaggaccctccctctctttcattatgttgaactttgctacagcttccatggttagacattcgatgacccggttgtccaagagggtattttccttcgtggaggtgtgcaggatcaatctcttatgcctctctgcagccaggatgggcttagcccttcttgctatacatcccttggggttcctcttgagggattgaggcagatcaagctcctcgctaagggtgaaggagaaggggttgagtggtacttgccccttccccatgggtgatgccaggaggaagtggggagctgcacaaaaacccttggcagagcaggcaccatgaaggagcaggcacatggcagggaccagaagggtcatttggggcaagggctggaaaccaggctccacctctacctccttagcaaagccaggttcctgtccaggggaatccatttcctgagtgttatctgtgtgtgatgtcgccccctgctgactaaccagtgtacttctgggaattgcaaatgcatgaaatggcacccattctagactagtcacggcagtgttggtgatggtcacagaccgggaacgaccctgacgtttatccatagagaactgggtcat

SEQ ID NO: 14815 - DNA, 1165 bp, Homo sapiens
  SIMILAR (666)..(728): 521254mologous to Homo sapiens Human microtubule associated protein BigTau mutant fragment 4,accession number Y20962,Smith- Waterman Score=59.
tcaggaaatagcatcacttctctgagcttcagtgtcctcatttgaaaatggtaaaaattcctgcctggtccacgtccacttccatcctcccctttctctaacattgcttgtactgagatcagaaacatcctgctttattgctaaacctgccaggaactcacaggttagttttgcatcctttgacactgagggccacttcttttcctggaataatctcttgggacgggtgtctgcaccgggacaacccgccagaaactctcctggtggaacacggtgcatgttctctggctgccctgcagtttttaaatgccaccagtacacatggggaatgttctgccttcccaaggaggaagccagaaatttcattgtcccagcactccttgcaggagggacaccaacacaggtccaggctttccccatcaggtgctcccatgaaagactcaggatccagaacagcaccaggaaacagagtgtgcatggcaccgatttgctttttgtttttaatttttttgagggggatgggggaccaaaggttctggtgcagaagcttctggactccagggctagcctcagcagtgcagggtgtagggtgtggtttctgcctcctgcagtagccagaagatcttggccggagctgtcctgtgcctgtggtttggtccttgccctgggccctgtggcctacaagcctgtggcctccacccaagtttgcatcaccacccattcctccttgagtgaatactgttgtctccctgggtctccctgtctccacagtggccacaagcatctgagccagcttcttctctgtggcagagatgatctttttcaggcctcctccggccatggccctttcctgctcctctttccagagctcccaagtccccgggatgcactccagctgctaagagaggcctcgaagttccctacggataaacgtcaaggtcgttcctggtctgtggccatcaccaacactgccgcgactagtctagaatgggtgccatttcatgcatttgcaattcccagaagtacactggttagtcagcagtctcccactgctaattctccatatgacccatccccaccaccaccatcctcaacagccaccagtgagaattcttactacctgaacttcactgtgacaaaaatcagccttggacctgtgggctaa

SEQ ID NO: 14816 - DNA, 2136 bp, Homo sapiens
  SIMILAR (970)..(1188): 301254mologous to Lycopersicon esculentum proline rich protein,accession number X61395,Smith-Waterman Score=85.
atggctaccacacctgggcgggccctgggctccctcctgcccacccttctgctgggactcacagctggacagcccttcatctctctgactggtccatctcacaggacaagccctggagactcagtgcctttcaactgtactgctgtccccttcaactcccaggacttctcccgggacttcaatgttacgtggttgaaggacagtgatgaacatccagcctcagctcagcgcctggtgcctgacaatggaggcaatgacttcatcaccagcaaggcatgggtgacactgacccgacaggatgtctcatctgagatcacctgcgaagtcacccacagggccctggcagagcccctgaaaacaaccatgaatctctcccaagccaccagaaatccagatgggacatactctctggagcacacgtggcaggcagaggccacgctggaggagcgtgagtttgcttgctgggtggtccacgatgagcagcccccactcaaggccaacgtcaccctgcaagcccaggtgcgcaggcaggggaaagcacggctggggagggtcagagactcagggcggcattggatgatggtgaaggaaggaaggatacccgcagctggtgatacaactctcacacattcgcccccagactccacttctcacgccttcctccacaccctccccaagaagaaaggggatgtggataaagctggaagccatcatcctcagcaaactaatgcaggaagagaaactcaaacactacgtgttctcactcataagtgggagctgaacaatgagaacacatggacacacggaggagaacaacacacaccgaggcctgttgcagcaggccagagtgtccagccttacaagttgcaaggcccccttcagcgatctgagcctggcacaaggatccgattgacctatgcatcctctgggttctcgacacaccaggttactgtgacctggcttaaaaacaaacacgagctcccaaacccccagaccagcgtccagtacagtggacacacctacaatgtgaccagcagtgtgcttgtcccgctgatggatgatgatgtgttctcccacgtcgtttgccatgtggagcacaagttgacgtggtttttccagaaaaccactggcctggaccagtacctccagggaagaagatttgaagagcttgggaaactaaattctagggccaatggtgtctttagacgggttggaccaatgcttggtagatctgtgaattccatgagaacccatgacagttgtgtggagggcaccttaccctgccctcttctccacgggcaccaccccagttaccagggcttcaacacccggagtcttccattctcaggttttgctcttttcttgagattctatccacaaaacgtgcaccttgcctggctagaggactgccatacactcaaaggcactgagcaacccacattaaagaagaataatgataggtcctacaccctggaaaagctgctgctggtgaatgcatcagtgcaggggcctgagcgggtgctcacctgcatgatggaacatgagggacagcctcccaaacgggctaacctcgtactgtccacagcagcccacaccgcttataagcccattgggagcacaggtaagttcacttcttcttctgtgagcacctggggtcacttctgtatcctgagtggatttcagaagagaggactaaatgtggagagaagacatgggtttggaatcagaatcaggtgcaacctgcaagctctagaacttcttgactacatgacctcagagagggcttttaaactcacagagcctccacgtgacggctccttctatcctttggcattgaggcccagagatgcctgcccttgtctttgtggttttcctcctgggcctcagggtgctgctggtgatgagtttcacagtgacctacatctgcaggaggtggaacctgtgacaggtgaacataggataggctttagtcttcggtactgggtgacaggctggcaagaggcctacagggcaagcccaacaaagtcactggggccctcaagagtgatccagcctcaagggaagagctttggagctgagtcagggacgagttttcttcatgaggactccagggatgtcttgaccctgatgtactga

SEQ ID NO: 14817 - DNA, 1314 bp, Homo sapiens
  SIMILAR (970)..(1221): 401254mologous to Homo sapiens dJ576H24.3 (novel member of the PTPNS (protein tyrosine phosphatase, non-receptor type substrate) family),accession number AL049634,Smith-Waterman Score= 164.
atggctaccacacctgggcgggccctgggctccctcctgcccacccttctgctgggactcacagctggacagcccttcatctctctgactggtccatctcacaggacaagccctggagactcagtgcctttcaactgtactgctgtccccttcaactcccaggacttctcccgggacttcaatgttacgtggttgaaggacagtgatgaacatccagcctcagctcagcgcctggtgcctgacaatggaggcaatgacttcatcaccagcaaggcatgggtgacactgacccgacaggatgtctcatctgagatcacctgcgaagtcacccacagggccctggcagagcccctgaaaacaaccatgaatctctcccaagccaccagaaatccagatgggacatactctctggagcacacgtggcaggcagaggccacgctggaggagcgtgagtttgcttgctgggtggtccacgatgagcagcccccactcaaggccaacgtcaccctgcaagcccaggtgcgcaggcaggggaaaggccagagtgtccagccttacaagttgcaaggcccccttcagcgatctgagcctggcacaaggatccgattgacctatgcatcctctgggttctcgacacaccaggttactgtgacctggcttaaaaacaaacacgagctcccaaacccccagaccagcgtccagtacagtggacacacctacaatgtgaccagcagtgtgcttgtcccgctgatggatgatgatgtgttctcccacgtcgtttgccatgtggagcacaagttgacgtggtttttccagaaaaccactggcctggaccagtacctccaggaacccatgacagttgtgtggagggcaccttaccctgccctcttctccacgggcaccaccccagttaccagggcttcaacacccggagtcttccattctcaggttttgctcttttcttgcttggtggctgttacttgcctcgtgcagagattctatccacaaaacgtgcaccttgcctggctagaggactgccatacactcaaaggcactgagcaacccacattaaagaagaataatgataggtcctacaccctggaaaagctgctgctggtgaatgcatcagtgcaggggcctgagcgggtgctcacctgcatgatggaacatgagggacagcctcccaaacgggctaacctcgtactgtccacagcagcccacaccgcttataagcccattgggagcacagagtccataatggtgaccatgatcatcaccatttcacaaatgggaaaactgaggactcgagggtag

SEQ ID NO: 14818 - DNA, 387 bp, Homo sapiens
  SIMILAR (2007)..(664): 221254mologous to Saccharomyces cerevisiae mal5, sta1, len: 1367, CAI: 0.3, AMYH_YEAST P08640 GLUCOAMYLASE S1 (EC 3.2.1.3),accession number Z38061,Smith-Waterman Score=200.
tcaggcgcgcgaccaggccaggcaattgaggcggcagacacaacgcaggccgctcatcagcgaggctcgaaacagggaggccagccatggctcctcaggggcgccctcggcctctggggtgcaggactccccagcatcctgggcactggccttcagcgcccggactcttgcccccagctcccgggcccgttgcaggcatgacgcaagctcagagatggtgtcccgagcccgacgcacatttccttcagtatacgctttacttcgtccggcatatcccacaactgccgaaacaaactcctcaccactatatcgccactcgtctgccgtgtgcgacccagtagtctcgcctgtgtagagagctgggcatcgccgttgctgagtgggcat

SEQ ID NO: 14819 - DNA, 840 bp, Homo sapiens
  SIMILAR (439)..(735): 781254mologous to Homo sapiens PRO2221,accession number AF116695,Smith-Waterman Score=387.
cagactaaatgtcctgtctgacagctccgaagagagcagtgttctcccagcacagtgttgagctctgagaatgacagactgcctcctcaagtggtccctgacccccatgtagcctaactggagacacctcccagtagggggcaacacacacctcatataggcagggtgcccctctgggatgaagtttctagaggaaggatcaggcagcaatatttgctgttctgcagcctccactggtgatacccaggcaaacagagtctggagtgaacctctagcaaactccaacagacctgcagctgagggacctgactcttagaaggagaattaacaaacagaaaagaatagcatcaacatcaacagaaatggacatcaacaccaaaaccccatctgtaggtcaccatcatcaaagaccaaaggtagataaaaccacaaagatcggggagaaaccagagcagaaaagctgaaaattctaaaaatcagagcacctcatctcctccaaaggatcgcagctccttgccagcaacggaacaaagctggacagagaatgactttgacgagttgacagaagtaggcttcagaaggtcggcaataacaaacttctccgagctaaaggagcatgttctaacccgtcgcaaagaagctaaaaaccttgaaaaaaggttagatgaatggcttactagaataaacagtgtagagaagaccttaaatgacctgatggagctgaaaaccatggcacaagaacttcgtgatgcacgcacaagcttcaatagctgattcaatcaagtggaaaaaaggatatcagtaattgaagatcaaattgatgaaataaagtgagaagac

SEQ ID NO: 14820 - DNA, 2586 bp, Homo sapiens
  SIMILAR (1335)..(1733): 361254mologous to Mus musculus zinc finger protein 276 C2H2 type,accession number AF178935,Smith-Waterman Score=209.
atgtgcccgaccctccctgcaggctgcgtcctgaggcttcccgaggcgggtctggcctccccagaagaaaggaatagcatcaacatcaacaaaaaggacatctacgccaaaaccccatctttaggccaccagcatcaaagaccaaaggcagataaaaccacaaagatggggagaaaccagagcagaaaagctgaaaattctaaaaaccagagcacctcttctcctccaaaggatcgcagctcctcgccagcaagggaacaaagctggacagagaatgactctgacgagctgacagaaaaagtccttacaagtacacctaccggccaggacacagctcctctggggttctttaggcgtcagctgccaaacgaccccacaagccacacagtggaggccacagaacaggtgcccagtgacaatgaggaccccgcaatgtgtctgcgggccagtgacaatgaggaccccgcaatgtgtctgcgggccagtgacagtgaggaccccgcaatgtgtctgcgggccagtgacagtgaggaccctgcaatgtgtctgcgggccagtgacaatgaggaccctgcaatgggcggcctcctgtgccaggcaatcctgctcaccttccaggagccaggcctctccccagggcctgcgtcctgtcagggtcagggacggcccctctgccatgctccggagtccctggtcccctcactccgttacgtcctgggtgtcacgggcttcctgggacccccactcagacctgcagctgggccagcgatgcccacccgtttctcctccacgtggtatacagaggtgcccaggctgctgctggggactctggagcccaggaggcatgtgacggcagggagtctctccagtgccgcccaccggattcctatagttagagctcctcgcccaagcccccagggcacctcactggcctcccaggtttccagccccagcacccccgaggccccagacatcccagcctgcccttctccgggccagaagataaagaaatccaccccggcagcaggtcagccgccccacctgacatccgcgcaggaccaggacaccatctctgagcttgcgtcatgcctgcaacgggcccgggagctgggggcaagagtccgggcgctgaaggccagtgcccaggatgctggggagtcctgcaccccagaggccgagggccgccctgaggagccatgtggcgagaaggcgcccgcctaccagcgcttccatgccctggcccagcccggcctgccgggactcgtgctgccctacaagtaccaggtgctggcggagatgttccgcagcatggacaccatcgtgggcatgctccacaaccgctccgagacgcccacctttgccaaggtccagcggggcgtccaggacatgatgcgtaggcgttttgaggagcgcaatgttggccagatcaaaaccgtgtacccggcctcctaccgcttccgccaggagcgcagtgtccccaccttcaaggatggcgccaggaggtcagattaccagctcaccatcgagccactgctggagcaggaggctgacggagcagccccccagctcacggcctcgcgcctcctgcagcgacggcagatcttcagccagaagctggtggagcacgtcaaggagcaccacaaggccttcctggcctccctgagccccgccatggtggtgccggaggaccagctgacccgctggcacccgcgcttcaacgtggatgaagtacccgacatcgagccggccgcgctgccccagccacccgccacggagaagctcaccactgctcaggaggtgctggcccgggcccgcaacctgatttcacccaggatggagaaggccttgagtcaattggccctgcgctctgctgcgcccagcagccccgggtctcccaggccagcactgccggctaccccaccagccaccccgcctgcagcctctcccagtgctctgaagggggtgtcccaggatctgctggagcggatccgagccaaggaggcacagaagcagctggcacagatgacgcggtgcccggagcaggagcagcggctgcagcgcttcagaacggctgcctgagctggcccgcgtgctgcggagcgtctttgtgtccgaacgcaagcctgcgctcagcatggaggtggcctgtgccaggatggtgggcagctgttgtactatcatgagccctggggaaatggagaagcacctgctgctcctctccgagctgctgccggactggctcagcctccaccgcatccgcaccgacacttacgtcaagctggacaaggccgcggacctcgcccacatcactgcacgcctggcccaccagacacgtgctgaggaggggctgtgagcctgggggccactgtggacagacgggggctttcaaaagctcgctggcctgggccccccagcatttttttttatgaacatgaaacactttggccttcctttccccagcgcccctaagggccaaaggcaaatgtgggctgcaggctgcccagcccaagggtctctggctgcgggcggtgggccccttcatggggctcccctggtgagatacacattaaaccggtttatgtgggc

SEQ ID NO: 14821 - DNA, 826 bp, Homo sapiens
  SIMILAR (436)..(651): 401254mologous to Homo sapiens zinc-finger protein,accession number U18543,Smith-Waterman Score=122.
gctttttttacctctaaagtgggattaatgaccatgtacacaactggcaagatcaaaggaaatgaactaggtgaatgtaaattcatgcaaacatactattttggcagtaatgatggcagacaccaaaatgattatattcttaccatccctttgcctttctacaatgctaagatgataagatcagcctgtggtgctgtcctgggaggttctcacacagaaaatgagataaaagacatcgtgcgaccaagatgcagagtcagaccagctggcctcaaccccaatgctgccattgactggctgtatgaagggggggcctccacagaggtagtctgcgagggcaggtttgggtgcctgtttttcgaggtctctgcctgtctggactttgagcacgtgcagcatgtcttccacgaggcagtgcgagaggcacggcgggagctggagaagagccccctgacccggcccctcttcatctccgaggagagggccctgccccaccaggccccgctcaccgcgcggcatgggctggccagctgcaccttcaacacgctctccaccatcaacctgaaggagatgcccactgccgcccaggccaagatggtcaccgtgaagtcatcccgggcccagagcaagcgcaaggcgcctaccctgactctcctgaagggcttcaagatcttctgaggccccctccccaggaagcctaggctcggtggctggacaggactgcagcaggacagggactggcttctcaccaccagcctttccgtctgatggacagcagaccccgcctccagcaccaagcagtgtccctacactcaattcactgggt

SEQ ID NO: 14822 - DNA, 2226 bp, Homo sapiens; identical to SEQ ID NO: 3397
  SIMILAR (393)..(749): 871254mologous to Homo sapiens Human secreted protein sequence encoded by gene 91 SEQ ID NO:360,accession number Y91687,Smith-Waterman Score=506.

SEQ ID NO: 14823 - DNA, 1665 bp, Homo sapiens
  SIMILAR (617)..(874): 521254mologous to Homo sapiens Similar to chromosome 6 open reading frame 32,accession number BC000930,Smith-Waterman Score= 203.
atggctgcgctgacactgaggggtgtccgggagctgctgaagcgtgtggacctcgcgacggtcccgcggagacatcgatataagaagaaatgggaaaggattcagccccttcctcaacctcgagctgcctctggcgaccgggcaaggttacagcgaccaccctgtccatactgccggcccaaaccctggcaaaaggctgccacagagcccaaattccctgctgttcgactggctttgcagaattttgacatgacttacagtgtgcagtttggagatctttggccatcaatccgtgtcagtctcctctcagagcagaagtatggtgcactggtcaataactttgctgcctgggatcatgtgctggtggatgtgccctgtaccacagaccgccactcccttcatgaggaggagaacaacatctttaagcggtcaaggaagaaggagcgacagatattgcctgtgctgcaagtgcagcttcttgcggctggactccttgccaccaaaccaggaggccatgttgtctattctacctgctcactctcacacttacagaacgagtatgtggtgcaaggtgccattgagctcctggccaatcaatacagcatccagaacccagacctggactcagaggcgctgctagccctgcccctgcctcagctggtgcagaagttacacagtagagagctggcccctgaggccgtgctcttcacctatgtgggaaaggcctgggaagtgaacaaagggaccaactgtgtgacctcctatctggctgactgtgagactcagctgtctcaggccacaaggcagggcctgctctatggcgtccctgtgagcctcaaggagtgcttcacctacaagcgccaggcctccatcgtcccctccatccctgccagcctgctctgcatcttgggtcattttgggcccttagaggaggtatcaggtccagaggccttccgaggggacactggtatacctgttttggcctgtgtgacagttgttggagtggacccttggctgcccacgggccctgactcactcccttctggtgcccatccctcctcccagggccaggactccacgctgggcttgagcctgaatgaaggggtgccggcggagtgcgacagcgtagtggtgcatgtgctgaagctgcagggtgccgtgcccttcgtgcacaccaatgttccacagtccatgttcagctatgactgcagtaaccccctctttggccagaccgtgaacccatggaagtcctccaaaagcccagggggctcctcagggggtgaaggggccctcatcgggtctggaggctcccccctgggcttaggcactgatatcggaggcagcatccgcttcccctcctccttctgcggcatctgcggcctcaagcccacagggaaccgcctcagcaagagtggcctgaagggctgtgtctatggacaggaggcagtgcgtctctccgtgggccccatggcccgggacgtggagagcctggcactgtgcctgcgagccctgctgtgcgaggacatgttccgcttggaccccactgtgcctcccttgcccttcagagaagaggctttcaaaggtgcccagcctcagctgctggcaccagggatgcaggaatcatttcccagcctgctgaccttcagcaaacagcagcctttctaa

SEQ ID NO: 14824 - DNA, 286 bp, Homo sapiens; identical to SEQ ID NO: 11981
  SIMILAR (83)..(286): 891254mologous to multiple sclerosis associated retrovirus element gag polyprotein,accession number AF123881,Smith-Waterman Score=321.

SEQ ID NO: 14825 - DNA, 249 bp, Homo sapiens; identical to SEQ ID NO: 9496
  SIMILAR (59)..(247): 591254mologous to multiple sclerosis associated retrovirus element gag polyprotein,accession number AF123881,Smith-Waterman Score=188.

SEQ ID NO: 14826 - DNA, 264 bp, Homo sapiens
  SIMILAR (52)..(261): 651254mologous to Homo sapiens envelope protein,accession number AF072508,Smith-Waterman Score=203.
gaacccgaaaatccagcagacaatgctagctattcctgtgaacctctagaggatctgcgcctgctcttcaggcgacaaccaatcgaagctgtaaaactacaaatggttcttcaaatggagccccagatgcagtccatgactaagatctaccgcggacccctggactggcctgctagcccatgctccaatgttgatgacattgaaggcacccctcccaaggaaatctcaactgcacgacccctactatgccccaattcagcatga

SEQ ID NO: 14827 - DNA, 287 bp, Homo sapiens
  SIMILAR (837)..(1523): 321254mologous to Mus musculus proline-rich protein,accession number M12099,Smith-Waterman Score=130.
gctgccacagagcccaaattccctgctgttcgactggctttgcagaattttgacatgacttacagtgtgcagtttggagatctttggccatcaatccgtgtcagtctcctctcagagcagaagtatggtgcactggtcaataactttgctgcctgggatcatgtgctggtggatgtgccctgtaccacagaccgccactcccttcatgaggaggagaacaacatctttaagcggtcaaggaagaaggagcgacagatattgcctgtgctgcaagtgcagcttcttgc

SEQ ID NO: 14828 - DNA, 4317 bp, Homo sapiens
  SIMILAR (598)..(822): 331254mologous to Plasmodium lophurae histidine-rich protein,accession number M15317,Smith-Waterman Score=156.
tcagatcagaaatttgtctccgacgtaaaggatagccataatgtgatagggaattcccagaagatgctgatgctgctggtccagaaaccacactttaaacaccattgtgtttggaggaaggtgagcaaggtggaggctaggttgaaaatgtttaacatctgccatgcctgaagcaccagtgacggtggggctcactactcctgtcatgcctgcatttccagatgttgagatgatgggaactgaagtttcagtaatgcctgtagtaaaaggttcggtgagaggacctagagttgttcctgtgcttgggccaccggtaaccagtgtaattgctgctccggtgcttaatatggtggtagctgttgtagtggaaacttctaaaagtgaagaaaatttctggccaacgagctgatctttgcatgtttttgcagtcactgtgccacaaggttcataatgccatctgcattccccaggcgcattgtagtaatcacagtagacaggacacagatttggttttctccatgagacacagactccaactgcactacacgcctctgcgtacatagccacggcagtgcagaatcccaggtacttcccctccatgtcacatgcacaggcttcttcaatgcacacatcatggtaagcactggggtcaaccttgttgtggcagtctctgaaggtgctgtctctgaggatctcacatttccgcacagcccaggctttacagtatgggtttgaatcacatgggaaagtctgagccactgtatctgaacattcttggcttgttttccaactattcccaaattccagtgctccagaagctactgaagagtatcttgttgtgaaatcatccttgagatcaccattgttatttccacaaagaccacacactttgccctcaagaaatgaatactggcagagaccgtcaaaactgtaactcttcccatcaaaagttctaacatgaccttccccatagatgtggcagatggtttgacattcattttgggtacaactccaagaccctttaatgcaggtacatttattgtcatcaatatggatgagtttgcctggttgcatgacctcgtcgtttatgtaacagtcacactgagatttcagtacacagtttccttcattattctggtacattgcatcagggcaggtgcatccatcaactggaacatcttctacatcacagctcctatctctttctgacaaggatcggcaagaactattacaggcttttacattgtacttgaacactaggccacttgggcaagaatgttcacataggccagttctccatcccactatgtatgtttccttctcagcacacgctttcacatagttgcctaaaattgtacataggcagtcctgactgttttcacaagtgcaagtatattttttgcattcctcatgatagggtttagggttcacaattgggtggcaggaagccaaaggcccacttgaatcaagaagaattccacagtgcctttcagcaaatttttctttttctatactaatacatgaagaggggtttcctttaggacaggacatcatttcccaagagttagcaaatgcctgagatgtcttctccaatatattctgacttgacatgaaatcatcctctgctttgttgttgtaggaaccacagagtcccacagtgtctgtgaattggttgggtggcatagaaacatacaattgcatcacaggaacaatttgtatttgtagtttcacatgaaagtatgtttctacttgaaggtatgaggaagatgcattgaatatctgtattttatctgaatagtaataaccttgatttctaatcttgtcatttgtgactgttccatcactgttgaatacgtatttgtcaactggaacagagtgaacggccaggaagtggcagtttccaggaaagttgtacttaacaccatcaaaggtggtaagggaacttccttccaccttacatcttccagggcataatgcttcggtgcaagaccactttgcatcttggcatgtgcactgagaaccacaaggaccttctcggacttctcctggctgatacactgttccactggattcacagggacattcagcttttaatacacattttcctttctctccaatgtcatccaacagataaccttctgggcaggtgcagccgctcacacattcactgtcttgaaaaggagccacattagaacaagttgcagggttggagggtccacattctttgtagatatgttgttctggacatctttgtgttccacaaaccacatcggagtcgcttcgccaggattcaaaggtgccaggaccatctgaggcacagaggcgggacagttctgaataagtgtcacatgtagatgttttgtctctagtttggcagtattcatcaatgcagatcattttgtagtcattggatagagcagcaacctttccacatttctcaaagtaggttccaataattttgttacagtgctgtattccatcttcacaaacttcatagcttttaccaacagcattgggacaatcaccaggaattttactattggcaatgtgctcattaatatcttgccctgaaccactaaggccagtttcaccaaattcatttagtccagaagcaccaacaccaagttcatctgcactcttacctcctccaccacttccagaatcagaagaccaagtgtttcctcctgagtcactgacatcagatccaggactcaagtttccagcctcatcagggtcactgcttctctttctattcccaccagttctactgagttcaacttcatgttgatcagatgaccccaatatgactcctgaatcttcagagatgccactagaattttcaaacccatttcttgcacttgaatcacctaaatcactagaactagattctctagtaacttttattccattttcactaagctcattaccaccaaatttccttgaaccagaatacttaaaatcaaatccagctccaactttttttcctccaagtccaaattcaagagactcaagcattcccactgagctacttgaatcagatccaaaacctttgaatccagcctcagcagatacactgccactcattccattccctccaatttcattgattccaaatccctcttgaccagaatcccataaattggatatcgaatttagagagccaccaccaacaaattgattctcacttctgaaactggtatcacctagatcaatggaaacagatcctccagaactactcgtttgatttccttcaactgttttgctactaatgccagtgtcaccaaatgaattcgaatcagaaacttcaaaaccaaatgcagcatcacctttccctgctccaagtttcaaaccagaagaaccagttccaactgcatcaggtccaaagactatggtttcacccccagcagatccactgcctctagtttctctcccatcagctttactgacttccaatcccttttcatcagatatcccccaaccaaatcccacatccagagaggcaccactgctactaaagccagcaccatatcttgtgttggtgctatctgctgggctgtcttctgaccttgaattcccagcatcccagcgttctctggacttgtcttcatcctctcctgtagcaccaaattcaaagctaaagagtggcttttttttgtctgagtcaccagaggatgaactaccataaaaaaagccacctggtggggtgtcttctgactttgaacctccagcatcctgactgtctccggacttgtcttcagcctttcctggagcaccaagtcctaagctaaagaatggctttgtcctgtctgagtcaccggaggatgaactactgttaaaaaagccacctgctggggtgtcttctgactttggactcccagcatcctgacgttgtctggacttgtcttcagtctctcctggagaaccaaattccaagctaaagagtggcttttttctgtccaagtcaccagaggatgaactaccataagagaagccacctgatctgcttgctgctattttaccatctttgaagaagcaccaaagtgccacaaccaagtaccataagatcaacttcatggttgtgatttgggaccctgaatggacccttaagacagctaggcaattatattttctagtccatttgctgtcatattcttctatttcatatcttctctcctctccaacatccaacacctctttcccatcatccctttctgttaataacattatttccagttttacttcgatgtcatcaacattggagcatgggctagcaggctggtccaggggtccacagtacatcttagtcatggactgcat

SEQ ID NO: 14829 - DNA, 333 bp, Homo sapiens
  SIMILAR (213)..(76): 931254mologous to synthetic construct chloramphenicol acetyltransferase,accession number A02739,Smith-Waterman Score=244.
tcaaccaaccacctgatactgtcgctcactttttgcctgataagacagcacgaacaatcgagttcctttggccagtgccccgccctgccactcatcgcagtactgttgtaattcattaagcattctgccgacatggaagccatcacaaacggcatgatgaaccctgatcgccagcggcatcagcaccttgtcgccttgcgtatatatttgccccccctcattaacattggagcatgggctagcaggccggtccaggggtccacggtagatcttattcatggactgcatctggggctccatttgaagaacatttttagttttacagcttcgatt

SEQ ID NO: 14830 - DNA, 1842 bp, Homo sapiens
  SIMILAR (851)..(1651): 781254mologous to multiple sclerosis associated retrovirus polyprotein,accession number AF009668,Smith-Waterman Score=1069.
aaggtagatgctataaaagtaccatggttcaaccatattgctgttatcagtccagcatttctgctttataatgtgagtcaaaataatcctcttttctttataaattacccagtctcaggtattcctttatagcaacgcaaaagagaacacgaggcttgccaccatcttggaagtggcctgccaccattgtggaagtggcccacaacctcaggtgttacgctatctgcggaagggctttctaacaacccccaacccttctgggttggggacgttggtctgcttggagccagcttccactttcaattttcttggggaatccgagggctgactagaggcagaaagcgttgtgtccttaggcacctgggctgtaacccagggagtcttatccctggtgtccctcctgattcaggtatgcagctctcgacatgggcagttatgtgggacccgttccccactacccttgccagggccccaagtacaattccccacaggccagcaggcagttcccagtgtagaccctcattgggacacagaatcagaacatggaaattggtgccgcagacatttgctaacttgtgtgctaggactaaggaaaactaggaagaagcctatgaattatgcaatgatgtccactataacacagggaaaggaagaaaatcctactgcctttctggtgagactaagggaggcattgaggaagcatacctctctgtcacctgactctattgaaggccaactaatcaggcaagcggactttggagtctctggaaaagggaaaagctgggcaaatcgaatgcctaatatggcttgcttccagtgtggtctacaaggacactttaaaaaagattgtccaagtagaagtaagctgccccctcgtccatgccccttatgtcaagggaatcactggaaggcccattgccccaggggactagtaaaaccatgcaatagcccctgcaatactccagttttaggagtacagaaacctaatggacagtggaggttagtgcaagatctcaggattatcaatgaggctgttcttcctctataccctgctatacctaacccttgtactctgctttcccaaaaaccacagaaagcagagtggtttacagtcctggaccttaaggatgcctttttctgcatccctgtacaccctgactctcaattcttgtttgcctttgaagatcctttgaacccaatgtctcaactcacctggactgttttaccccaagggttcaagcatagcgcccatctatttggccaggcattagcccaagacttgagccaattctcatacctggacactcttgtccttcagtacggggatgatttaattttagccacccgatcagaaacctggtgccatcaagccacccaagcactcttaaatttccttgctacctgtggctacaaggtttccaaacaaaatgctcagctctgctcacagcaggttaaaaacttagggctaaaattatccaaaggcacaagggccctcagtgaggaacgtatccagcctatactggcttatcctcatcccaaaaccctaaagcaactaagagggttccttggcataacaagcttctgccgaatatggattcccaggtacagcgaaatagtcaggccattatacacactaaggaaactcagaaagccaatacccatttagtaaggattactattggctgtacagaaacctaaagaggtggcagtcttacactgccagagtcaccagaaaggaaagggaaacagaaaggaactgccaagcggatattgaagccaaaagagcggcaaggcaggaccctctattagaaatgcttatagaaggacccccagtccttctat

SEQ ID NO: 14831 - DNA, 759 bp, Homo sapiens; identical to SEQ ID NO: 12322
  SIMILAR (1624)..(2421): 851254mologous to Homo sapiens putative p150,accession number U93563,Smith-Waterman Score=1189.

SEQ ID NO: 14832 - DNA, 1920 bp, Homo sapiens
  SIMILAR (1286)..(2272): 621254mologous to Homo sapiens putative p150,accession number U93572,Smith-Waterman Score=881.
atgactcatcagtcaaagatctcaccaagcttcctgctccagcagagaacccttccggagtggttcctcctggataagaataagaaaaaaacaggaataactctaggagtccttacacaggtccaaggaacgagcttgcaacccgtggcagacctgagtaaggaaattgatgtagtggcaaagggttggcctcattgtttatgggtaatggtggcagtagcaatcttagtatctgaagcagttaaaataatacaggaaagagatcttactgtgtggacatctcatgatgtgaacagcatactcactgctaaaggagacctgtggctgtcagacagccatttacttaaataccagggtctattacttgaagggccagtgctgcaactgtgcacttgggcaactcttaacccagccacatttcttccagacattgaaaaaaagatagaacgtaactgtcaacaggtgattgctcaaacctatgccgctcgaggaaaccttctagaggttcctttgactgatcctgacctcaacttgtatattgatggaagttcctttgtagaaaaaagacttcgaaaagcagggtatgcagtggtcagtgataatggaatacttgaaaataatcccctcactccaggaactagcgctcagctggcaaaactaatagccattactccggcactaaaattagaaaaagaaaaaagggtaaacatatatacagactctaagtatgcttacctagtcctccatgcccatgcagcaatatggagagaaagggaatacctaacttctgagggaacatctatcaaacatcaggaagccatcaggagattattatcggctgtacagaaacctaaagaggtggcagtcttacactgctggggtcatcagaaaggaaaggaaagggaaatagaagggaaccgccaagcgaatattgaagccaaaagagccacaaggcaggaccctccattaaaaatgcttatagaaggacccctagtatgggcaaggcaatttacctctatagaagggtgtgccctcacagatggagcaatggcctgggaagtgaacaaagggaccaactgtgtgacctcctatctggctgactgtgagactcagctgtctcaggccccaaggcagggcctgctctatggcgtccctgtgagcctcaaggagtgcttcacctacaagcgccaggcctccatcgtcccctccatccctgccagcctgctctgcatcttgggtcattttgggcccttagaggaggtatcaggtccagaggccttccgaggggacactggtatacctgttttggcctgtgtgacagttgttggagtggacccttggctgcccacgggccctgactcactcccttctggtgcccatccctcctcccagggccaggactccacgctgggcttgagcctgaatgaaggggtgccggcggagtgcgacagcgtagtggtgcatgtgctgaagctgcagggtgccgtgcccttcgtgcacaccaatgttccacagtccatgttcagctatgactgcagtaaccccctctttggccagaccgtgaacccatggaagtcctccaaaagcccagggggctcctcagggggtgaaggggccctcatcgggtctggaggctcccccctgggcttaggcactgatatcggaggcagcatccgcttcccctcctccttctgcggcatctgcggcctcaagcccacagggaaccgcctcagcatcttatgtttcttatccagcaagagtggcctgaagggctgtgtctatggacaggaggcagtgcgtctctccgtgggccccatggcccgggacgtggagagcctggcactgtgcctgcgagccctgctgtgtgaggacatgttccgcttggaccccactgtgcctcccttgcccttcagagaagag

SEQ ID NO: 14833 - DNA, 987 bp, Homo sapiens; identical to SEQ ID NO: 11997
  SIMILAR (985)..(1182): 461254mologous to Homo sapiens nucleotide-binding site protein 1,accession number AF298547,Smith-Waterman Score=120.

SEQ ID NO: 14834 - DNA, 1281 bp, Homo sapiens; identical to SEQ ID NO: 8522
  SIMILAR (202)..(621): 981254mologous to Escherichia coli K12 regulator of melibiose operon,accession number AE000484,Smith-Waterman Score=758.

SEQ ID NO: 14835 - DNA, 938 bp, Homo sapiens
  SIMILAR (213)..(935): 781254mologous to Homo sapiens gag,accession number AF156961,Smith-Waterman Score=939.
gcatgcagctctcgacatgggcagttatgtgggacccgttccccaccacccttgccagggccttagaactgataacccagtactttaacaactggaactgggtctacaacataatatatcaagatgaaaatgaattgagtaaattaaagggaggcacatattcctatagcggcaaatgggggcaacaagtgaacgaccctccactgtgtttccaaaatccacctacagagacagagaggagagagacagagagagacagagaggtgggggtggtggatgggaaatgttccccccaaggcaaaaaagctcctaagatatattctggagaatttggcccagtcagagtgcacgtaactctttccctctcagacttgaaacaaattaaaatagacctaggtaaattctcagataaccctgatggctacattgatgttttacaagggttagggcaatcctttgatctgacatggagagatataatgttactgctaaatcagacactaaccccaaatgagagaagtgccgccgtaactgcagcccgagagtttggtgatctctggtatctcagtcaggtcaatgataggatgacaacagagaaaagagaacgattccccacaggccagcaggcagtttccagtgtagaccctcgctgggacacagagtcagaacatggagatgggtgccacagacatttgctaacttgcatgttagaaggactaaggaaaactaagaagaagccgatgaattactcaatgatgtccactataacacagggaaaggaaaaaaatcctaatgcctttctggagagactaaggcaggcattgaggaagcatacctctctgtcacctgactctattgaaggccaactaatcttaaaggataagtgtatcactctgtcagctgcagacattagaaaaaacttcagaagtccaccttag

SEQ ID NO: 14836 - DNA, 612 bp, Homo sapiens
  SIMILAR (351)..(115): 781254mologous to Homo sapiens envelope protein precursor,accession number AF072506,Smith-Waterman Score=289.
caagcttagaaattgttagtcggcctaggaaatccagctagtcctgtctctcagtaccccctctcaacaggaaaacccaagtgctgttggggaggttggccgtcgactgctccaactgcttcctgcttaattggggcatagtaggggttgtgcatttgagatttcctcgggaggagtgccttcgatgtcattaacatcggagcatgggctagcaggctggtccagggatccgcggtagatcttagtcatggactgcatctggggctccatttgaagaacgatgtgttgttttacagctttgattctggaagagacaaacttaacaaggaggttaaagatacagggattgaaatgtatggcctgcagtgcaggggattattcctttggcacactttacaagctttgactatctgcttgacagttttgaaaaggcctggtccagtaaataataatttggccatctgatgggtgctatcaatggttaagtcgaaggtttggtgaagggttttaagtaatttctattggttagctgcaggcaaaagtatttttccttcttcggtggcctgccattctgaggggatgaaactatggccctcgtggggtcccccattc

SEQ ID NO: 14837 - DNA, 753 bp, Homo sapiens
  SIMILAR (1232)..(2212): 991254mologous to Homo sapiens NALP2,accession number AF310106,Smith-Waterman Score=1704.
tttcgtagcacgccgatatggctgcgctgacactgaggggtgtccgggagctgctgaagcgtgtggacctcgcgacggtcccgcggagacatcgatataagaagaaatggcccggtcgccctcacccctcggaaaataccatagcgaccttgcctgcactcctgggtctccgccgccttgcaggaaaggattcagccccttcctcaacctcgagctgcctctggcgaccgggcaaggttacagcgaccaccctgtccatactgccggcccaaaccctgggcaaaaggctgccacagagcccaaattccctgctgttcgactggctttgcagaattttgacatggcttacagtgtgcagtttggagatctttggccatcaatccgtgtcagtctcctctcagagcagaagtatgggggcactggtcaataaactttgctgcctgggatcatgtaagtgctaagctggagcagctgagtgccaaggattttgtgaatgaagccatctcccactgggaactgcagtctgagggtggccaatctgcagccccatcccctgcctcctgggcctgcagtccgaaccttcgatgcttcacttttgacagaggggatatcagtcgcttccctcctgccagacctggcagcctgggtgtcatggagtactacctgatggatgctgcctccttgctgcctgttctggccctcggcctgcagcctggggacatcgtgcttgacctatgtgcagctcctggggga

SEQ ID NO: 14838 - DNA, 1587 bp, Homo sapiens
  SIMILAR (264)..(440): 421254mologous to Homo sapiens Similar to CAAX box 1,accession number BC000393,Smith-Waterman Score=97.
atggctgcgctgacactgaggggtgtccgggagctgctgaagcgtgtggacctcgcgacggtcccgcggagacatcgatataagaagaaatgggctgccacagagcccaaattccctgctgttcgactggctttgcagaattttgacatgacttacagtgtgcagtttggagatctttggccatcaatccgtgtcagtctcctctcagagcagaagtatggtgcactggtcaataactttgctgcctgggatcatcctggggacatcgtgcttgacctatgtgcagctcctgggggaaagacactagcgttgcttcagactggctgttgcctcacctggagccggaagcgctgcgccgccctgtccatgttctccaggcccgctcgctgcctctgtcgcgcccggaccaccgcgccccgcgccgtccggcgcccggaccagcgcagggccacggccgccgccacgaagcagcaggccagggcgaccccggaggcgccaggcagcgcggcccacagctcgtactgcaccatgatcccttcagcctgctgctgcctaccgcgacagttgaagccgccgcacgcgcagcccgcccgctccgccgcaaaacccggactggatcagccgggatcccacgcccgcctgcgcgggaggggcggggaagcgcgccagagcctagaggctatcagaggcggcccgtctggcatcgcccccagcgacatcccgctccccgccaagccgagcaggcgggtgattgctcaaacctatgccgctcgaggaaaccttctagaggttcctttgactgatcctgacctcaacttgtatattgatggaagttcctttgtagaaaaaagacttcgaaaagcaggaatcaaagctgtaaaactacaaattgttcttcaaatggagccccagatgcagcccatgactaagatctactgtggacccctggaccagcctgctagcccacgctccaatgttgatgacatcgaaggtactaatgcttcagactttcctttcctatcccaagtattagagcaagttgtatctccaaagggatctaaggaagctcaatgctgcgtcctcaggcctctaggctgtgaatccaacttgaagcaaattaaaatagacctaggtaaattctcagatacccctgatggctatattgatgttttacaagggttaggacaaccctattatctgacatggagagacataatgttactgctagatcagacactaaccccaaatgagagaagtgccgccataactgcagtccgagagtttggtgatctctggtatctcagtcaggtcaatgataggaagataacagaggaaagagaacaattccccacaggccagcaggcagttcccagtgtagaccctcattgggacacagaatcagaacatggagattggtgccacagatatttgctaactgacgtgctagaaggactaaggaaaactaggaagaagcctaataaattagtcaatgatatccactataacacagggaaaggaagaaaatcctactgcctttctggagagactaagagaggcattgaggaagcatacctcactgtcacctga

SEQ ID NO: 14839 - DNA, 1004 bp, Homo sapiens
  SIMILAR (285)..(124): 881254mologous to Homo sapiens Amino acid sequence of a human phosphorylation effector PHSP-2,accession number Y68770,Smith- Waterman Score=243.
atgttctccaggcccgctcgctgcctctgtcgcgcccggaccaccgcgccccgcgccgtccggcgcccggaccagcgcagggccacggccgccgccacgaagcagcaggccagggcgaccccggaggcgccaggcagcgcggcccacagctcgtactgcaccatgatcccttcagcctgctgctgcctaccgcgacagttgaagccgccgcacgcgcagcccgcccgctccgccgcaaaacccggactggatcagccgggatcccacgcccgcctgcgcgggaggggcggggaagcgcgccagagcctagaggctatcagaggcggcccgtctggcatcgcccccagcgacatcccgctccccgccaagccgagcaggcgggtgattgctcaaacctatgccgctcgaggaaaccttctagaggttcctttgactgatcctgacctcaacttgtatattgatggaagttcctttgtagaaaaaagacttcgaaaggcggcttacgcagtgttcagtgataatggaatacttgaaagtaatcccctcactccaggaactagcactcagctggcagaactaatagccgtcactcaggcactagaattagaaggaaaaagggaacccgaaaatccagcagacaatgctagctattcctgtgaacctctagaggatctgcgcctgctcttcaggcgacaaccaatcgaagctgtaaaactacaaatggttcttcaaatggagccccagatgcagtccatgactaagatctaccgcggacccctggactggcctgctagcccatgctccaatgttgatgacattgaaggcacccctcccaaggaaatctcaactgcacgacccctactatgccccaattcagcaggaagcagttggagcagtcgacggccaacctccccaacagcacttgggttttcctgttgagagggggtactgagagacaggactagctggatttcctaggccgactaacaatttctaagcttagg

SEQ ID NO: 14840 - DNA, 4317 bp, Homo sapiens; identical to SEQ ID NO: 3622
  SIMILAR (355)..(504): 921254mologous to Leishmania major probable levansucrase precursor,accession number AL160371,Smith-Waterman Score=240.

SEQ ID NO: 14841 - DNA, 395 bp, Homo sapiens
  misc_feature (1)...(395): n = a,t,c or g
ggagcttcctattgactgctcccctgccctagtgcgggtnatcaagaccacatctgctgtgaagaacctgcagcagctagcccaagatgcggacctggccttgctgcaggttttccagcttgcagctcatctggtgtactggggcaaggcatcatcatctacccgctgtgtgagaacaacgtctacatgctgtctcccaatgccagcgtatgtctgtactccccgctggccgagcagttctcccaccagttcccatctcatgacctgccgtccgttcttgccaagttctncttgccggtctccttgttagaatttaggaatcccctgggcccccgctgtgcaggagctgcacacctatgtctgtctgatggccttcacccagcgaggaggagccc

SEQ ID NO: 14842 - DNA, 561 bp, Homo sapiens
  SIMILAR (306)..(560): 1001254mologous to Homo sapiens -14,accession number X90857,Smith-Waterman Score=434.
gaagttttcccagcttgcagccaattggtttactgggggaagcccatcacaatctacccgctgtgtgagaacaacgtctacatgctgtctcccaatgccagcgtatgtctgtactcccccgctggccgagcagttctcccaccagttcccatctcatgacctgccgtccgttcttgccaagttctccttgccggtctccttgtcagaatttaggaatcccctggcccccgctgtgcaggagacccagctcatccagatggtggtgtggatgctgcagcgccggcttctcatccagctgcacaccatatgtctgcctgatggcctcacccagcgaggaggagccccgtccgcgagaggacgacgtccccttcactgcccgggtcggcggtcgcagcctcagcacgcccaacgccctcagctttggctccccaaccagcagcgatgacatgaccctcaccagccccagcatggacaactccagcgcagagctacttcccagcggggactcgccactgaaccagaggatgacggagaacctgctggccagcctgtcggagcatg

SEQ ID NO: 14843 - DNA, 2771 bp, Homo sapiens
  SIMILAR (267)..(40): 631254mologous to Homo sapiens PRO2221,accession number AF116695,Smith-Waterman Score=233.
atgccaggggcaccctcacagcctgtgccccacaagccatcccgggcacctctcacaacctgtgccccacaagccatcccggggcaccctcacagcctgtgccccacaagccgtaccgggcacctcttgcagcctgtgccccacaagccatccggggcaccctcacagcttgtgccccacaagccgtcccgggcaccctcccagcctgtgccccacaagccatcccaggcaccctcacagcttgtgccccacaagccgtcccgggcacctctcacaacttgtgccccacaagccgtcccgggcaccctcacaacttgtgccccacaagccatcccgggcacctctcacaacctgtgccccacaagccgtcccaggcacctctcacaacctgtgtcccacaagccgtcccgggcacctctcaaacctgtgccccacaagccgtcccgggcacctctcaaacctgtgccccacaagccgtcccgggcacctctcacaacctgtgccccacaggccatcccgggcaccctcacagcctgtgccccacaagccgtcctgggcatctctcacagcctgtgccccacaagccgtccagggcacctctcacaacctgtgccccacaagccgtcctgggcacctcttgcagcctgtgccccacaagccgtcccaggcaccctcacagcctgtgcccaagccgttggaaataccaagagcttccttgcaccaacagcttttcacctttctttctgcttctggctagtcttgtgtcccgcctccaccccaagcctgtgctgttattttctaataatgtgggtgtggcagctcagcacccatcctgtctacaacatgacattagcctccatctgtgtcctggtgctcccattgatgggtccccgattccaggccacagccgcggcggctgggtgctgtgcaggtaccggctcgcgccgggagggggcgctgttccctaacctgctccgagtcagccccgagccctttaacgccgcccgcagagcacggcaagaaggctgctcctgggagaggctttactcaaacacggggaaggtcgcctggggatcccgcggccacccacccacagtttatcggtactcggaaaccaacgccgagataacgtggctcaagaacttgttcagcgacgcctgcagcgcgggggctgaagtctccggggtagtgccgggcgaagggggcccatcacggcaagccgatcaccctggaagcttgcccgggttcactcgcaactggcacccgtgcaggtggttcaacgccgtcaagcacgtggggctggccagcaggttctccgtcatcctctggttcagtggcgagtccccgctgggaagtagctctgcgctggagttgtccatgctggggctggtgagggtcatgtcatcgctgctggctgtgggggacatgggtcagggtgaccaagtggaattccaggacacccagggggaacagcgagggcagagccagcagccagcctccaatgacacccctaactcctacaagggttaggatctggcacttactcagatacttctggagacaaagacttgagaacacccagctcgtctgtctccaacaccgtatcctatctggccctgctcttgatctctgcccagaactcagtggaggggaggatggcaaaaccaccttcacacaaggctatgacacctgcagcccacagggaaagccactggccctgccacagatgcagccagggtgggctctatggggagggaacaactgctcaagtgttgggtcactggccaagcatctgcaggtggcccggcagcttacttttgggtcctgctgggcacgtaacacttgcacggcaagcccccaaaaccaaggagaagcaggtggcagtgctgagggctctcaaatcagaaccaacagccaggcaggtgcatacctgatgcacacccggtgcaggacctcgtgcaggacctggtgcatacctggtgcagggttccctgcacttcgtatgttccgtgtgtttgagtcccaggtgcatacctggtgcatacccggtgcatacctggtgcaggacctggtgcatacccggtgcatacctggtgcaggacctggtgcatacctggtgcagggttccctgcacttccccctaccatgccctgctgctgctcagtgatgagaagtccttgctgggtgagcttcctattgactgctcccctgccctagtgcgggtgatcaagaccacatctgctgtgaagaacttgcagcagctagcccaagatgcggacctggccttgctgcaggccatgggatcagctgtggctgctagtcatgtgggcgtggcccagagccacgggaccattgaaatactgcctgagggtgggagcaggtggtgcctgtgggtggcgccctcgtctggtggcggtcagcagggcgttgctgctggtgtggcggtgcggaagcccctggggcccagccctggcatggcaaaagtccccagaatacagcaccaaggtcttggaaaagcaatgaatgcctttgctctggaggcgtgcctactgcatgggcaaagtcacaactatgacaagagtgggaaggctgtatctgctaagtatgacgcatactcagaacaattgagggacaggacgatgttcagggacagccaagccctgagcagggcccagaatcttagtaatgccatcactgatcctgcttgtatgcagagagctgattggcaggctatggtgtacaagttccctttcatcctgctaacaagatga

SEQ ID NO: 14844 - DNA, 364 bp, Homo sapiens
  SIMILAR (33)..(164): 361254mologous to Lycopersicon esculentum extensin,accession number Z46674,Smith-Waterman Score=61.
catccctgacacattaacgtttatacttcaagtacagcacagcgccaagccctttctctagccccatctgtgtgcatcctactctgtctttccctgatgatggccactccagatgtcatgctccacttcaaacacacctctacacatcatctccaccactccctgggtggggtcaggacctcaccagctacaactccccaccttctttcccagggaccacagtacattgcttataccttcctctgttgagcagttactttatcctttcttgtgatagggagcttatatatctagctcaccaactaaatcataagctctttcaggaaaagctgaaaccaattttgctatcttcagctcatcacca

SEQ ID NO: 14845 - DNA, 1634 bp, Homo sapiens
  SIMILAR (1)..(654): 951254mologous to Homo sapiens putative p150,accession number U93563,Smith-Waterman Score=1067.
atggagattcctgctgtgatcttaacagttgctcccatcctccacttaactagctgtggtttccctgtgactggagatggtctaaaacaagcagagggcaaatgtgctcctgaagaatggaatcccacaaagttcataaaactaacagacaatcaagcatgctttgcttgtggcttatggcctttatccgagattcaaaggagaacctcaaggactgttactataatatccaggatatcagccctaagagaaaagggaaatggaagaaagcctaccagcatttcaggatcagtaaatgaaatgagacaggttctggtgaaagaccaggtgtcaatgccaagagttctccctacaattatttttgttccagacgaggcaggcttcagtgcaggagccgtgtggccatgtgcagctcctctgtggggcagcagctggactccactaaaagtggaaaactgctcgttctacattagactctctttcgcaatttcggtaggtggtgatgagctgaagatagcaaaattggtttcagcttttcctgaaagagcttatgatttagttggtcaccaacatcaaagaccaaaggtagataaaaccacaaagatggggagaaaccagagcagaaaggctgaaaattccaaaaaccagaacatgtcttctcctccaaaggaacacaactcctctccagcaagggaacaaaactggatggagaatgagtttgatgagttgagagaagtaggcttcagaaggtcggtaataacaaacttctccgagctaaaggagcatgttctaacccatcacaaggaagctaaaaaccttgaaaaaaggttagatgaatggctaactagaataaacagtgtagagaagagcttaaatgatctgatggagctgaaaaccacattacgagaacttcgtgaagcatacataagcttcaatagccaattcgaccaagcggaagaaagggtatcagtgatcgaagatcaaattagtgaaataaagcaggaagtgaagtttagagaaaaaagagtaaaaagaaatgaacaaagcctccaagaaatatgggactatgtgaaaagaccaaaatctacgtctgattggtatacctgaaagtgacgaggagaatggaaccaagttggaaaacactctgcaggatattatccaggagaacttccccaacatagcaaggcaggccaacattcaaattcggggaaattacagagaacgcccacaaaggttgcctcctcgagaacagcaactccaagacacataattagtgtgggttcaccaaagttgaatatgaagggaaaaaatattaagggcagcccagagagaaaggtcggggttacccacaaaggggaagcccttcagactaacagcagcggatctctcggcagaaacttctacaagccagaagacagagtgggggccaatattcaacattcttaaagaaaagaatttttcaacccagaaatttcatatccagccaaacctaagcttcataagtgaaggagaaataaaatactttacagaccaagccaaatgcttgagagatttttgtcaccaccagggccttctcttgcctgccctaaaagagcaccaggcctgccctaaaagagctgctgaagggaagcact

SEQ ID NO: 14846 - DNA, 1429 bp, Homo sapiens
  SIMILAR (490)..(723): 711254mologous to Mus musculus Pro-Pol-dUTPase polyprotein,accession number Y12713,Smith-Waterman Score=287.
atggtgctggcagctggtgatcccgtggaaaaaggcatcacgtgggcaagagaaaatgcgggtatctacatcagctgtacaatgatgaaactatctatgattcctattggtgatcaaagttataggaaccttatacctctgaagtttgttgcctgcattttaatagaaggaaacgctaaatgttggcctttaccagagtttgatccaagccagattcgactgattgtatatcaagactgtgaaagacgagggagaaatgttttgtttgactccagtgttaagagaagaaatgaggacatatcagtatcgagaataaaatacctaggaatccaacttacaagggatgtgaaggacctcttcaaggagaactacaaaccactgctcaacgaaataaaagaggacacaaacaaatggaagaacattccatgctcatggatagaaagaatcaatatcgtgaaaatagccatactgcccaagaaactcggcagtgatgctcaagttaaagtctttgggaaatgctgccaactgaaacctggaggagacagttcttcctctttagatagttctgtgacttcatcttctgatataaaagaccagtgtcttaagtaccagagaacagtggatctctcagcacagctttcaagctctggtaagggacagactacctcctcaagtgggtccctgacccctatgactcctcactgggagatacctcccagcggtggtcaacagacatcacatacaggagagctccggctggcatctggcaggggctcctctggaatgaagcttccagaggaagggacagacaggaatctttgctgttctgcagcctccagtggtgatacccaggcaaacagggactggagtggaccaccagcaaacaccagcagacctgcagcggaggggcctgactgtgacagggagaatggaaccaagttggaaaacactcttaaggatattatccacgagaactttcccaacatagcaagacaggctaacattaaaattcaggaaatacagagaacacaacaaagatactgctcgagaagagcaaccccaagacacataatcgtcagattcaccaaggttgaaatgaaggaaaaaatgttaagggcagccggagagaaacattgggttatacacaaaggaaagtccatcagactaacagtggatctctctgcagaaactctacaagccagaagagagtgggggaccaatattcaacgttcttaaagaaaagaattttcaactcagaatttcatatccagccaaactaagcttcataagcgaaggagaaatgaaatcctttccagagaagcaaatgctgagagactttgtcaccatcaggcttgccttacaagagctcctgaaggaagcactaaatatggcaagggaaaacggtaacagccactgcaaaaacatatga

SEQ ID NO: 14847 - DNA, 3852 bp, Homo sapiens
  SIMILAR (235)..(104): 581254mologous to Homo sapiens Human secreted protein sequence encoded by gene 11 SEQ ID NO:72,accession number B24447,Smith-Waterman Score=137.
atgacaggatcaaattcacacataacaatattaactttaaatataaatggactaaattctgcaattaaaagacacagacgggcaagttggataaagagtcaagacccatcagtgtgctgtattcaggaaacccatctcacgtgcagagacacacataggctcaaaataaaaggatggaggaagatctaccaagcaaatggaaaacaaaaaaaggcaggggttgcaatcctagtctctgataaaacagactttaaaccaacaaagatcaaaagagacaaagaaggccattacataatggtaaagggatcaattcaacaagaggagctaactatcctaaatatttatgcacccaatacaggagcacccagattcataaagcaagtcctgagtgacctacaaagagacttagactcccacacattaataatgggagactttaacaccccactgtcaacattagacagatcaacgagacagaaagtcaacaaggatacccaggaattgaactcagctctgcaccaagcggacctaatagacatctacagaactctccaccccaaatcaacagaatatacattttttttagcaccacaccacacctattccaaaattgaccacatagttggaagtaaagctctcctcagcaaatgtaaaagaacagaaattataacaaactatctctcagaccacagtgcaatcaaactagaactcaggattaagaatctcactcaaagccgctcaactacatggaaactgaacaacctgctcctgaatgactactgggtacataatgaaatgaaggcagaaataaagatgttctttgaaaccaacgagaacaaagacaccacataccagaatctctgggacgcattcaaagcagtgtgtagagggaaatttatagcactaaatgcctacaagagaaagcaggaaagatccaaaattgacaccctaacatcacaattaaaagaactagaaaagcaagagcaaacacattcaaaagctagcagaaggcaagaaataactaaaatcagagcagaactgaaggaaatagagacacaaaaaacccttcaaaaaatcaatgaatccaggagctggttttttgaaaggatcaacaaaattgatagaccactagcaagactaataaagaaaaaaagagagaagaatcaaatagacacaataaaaaatgataaaggggatatcaccaccgatcccacagaaatacaaactaccatcagagaatactacaaacacctctatgcaaataaactagaaaatctagaagaaatggatacattccttgacacatacactctcccaagactaaaccaggaagaagttgaatctctgaatagaccaataacaggctctgaaattgtggcaataatcaatagtttaccaaccaaaaagagtccaggaccagatggattcacagccgaattctaccagaggtacaaggaggaactggtaccattccttctgaaactattccaatcaatagaaaaagagggaatcctccctaactcattttatgaggccagcatcattctgataccaaagccgggcagagacacaaccaaaaaagagaattttagaccaatatccttgatgaacattgatgcaaaaatcctcaataaaatactggcaaaccgaatccagcagcacatcaaaaagcttatccaccatgatcaagtgggcttcatccctgggatgcaaggctggttcaatatacgcaaatcaataaatgtaatccagcatataaacagagccaaagacaaaaaccacatgattatctcaatagatgcagaaaaagcctttgacaaaattcaacaacccttcatgctaaaaactctcaataaattaggtattgatgggacgtatttcaaaataataagagctatctatgacaaaccaacagccaatatcagactgaatgggcaaaaactggaagcattccctttgaaaactggcacaagacagggatgccctctctcaccgctcctattcaacatagtgttggaagttctggccagggcaatcaggcaggagaaggaaataaagggtattcaattaggaaaagaggaagtcaaattgtcccctctttgcagatgacatgattgtatatgtagaaaacccccttccgtctcagccccaaaatcttctttaaggctggttaagcaacttcagcaaaagtcttcaggttacaaaatcaatgtgcaaaaatcaccaagcattcctatacaccaacaacagacaaacagagagccaaatcatgagtgaactcccattctgttattgcttcaaagagaataaaatacctaggaatctaaacttacaaggggtgtgaaggacctcttcagggagaactacaaaccactgctcaacgaaataaaaagaggacacaaacaaatggaagaacattccatgctcatgggtaggaagaatcaatatcgtgaaaaatggccatacttgcccaaggtaaatttatagattcaatgccatccccatcaagctaccaatgactgttttcacagaattggaaaaaaactactttaaagttcatatggaaccaaaaaagagcccgcattgccaagtcaatcctaagacaaaagaacaaagctggaggcatcacactacctgacttcaaactatactacaaggctacagtaaccaaaacagcatcggtactggtaccaaaacagagatatagaccaatggaacagaacagaggcctcagaaataatgccacatatctacactattctgatcctttggacaaacctgagaaaaacaagcatgggggaaaggcatccctaatttataaaatggctgctggggaaaactggctagcccatatgtaggaagctgaaactggatcccttccttacaccttatacaaaaatcaattcaagatggattaaagatttaaacgttaaacctaaaaccataaaaaccctagaagaaaacctaggcattaccattcaggacataggcgtgggcaaggacttcatgtccaaaacaccaaaagcaatggcaacaaaagacaaaattgacaaatgggatctaattaaactaaagagcttctgcacagcaaaagaaactaccatcagagtgaacaggcaacctacaacatgggagaaaattttcgcaacctactcatctgacaaagggctaatatccagaatctacaatgaactcaaacaaatttacaagaaaaaaacaaacaaccccatcaaaaagtgggcgaaggacatgaacagacacttctcaaaagaagacatttatgcagccaaaaaacacatgaagaaatgctcatcatcactggccatcagagaaatgcaaatcaaaaccactatgagatatcatctcacaccagttagaatggcaatcattaaaaagtcaggaaacaacaggtgctggagaggatgcggagaaataggaacacttttacactgttggtgggactgtaaactagttcaaccattgtggaagtcagtgtggcgattcctcagggatctagaactagaaataccatttgacccagccatcccattactgggtatatacccaaatgagtataaatcatgctgctataaagacacatgcacacgtatgtttattgcggcactattcacaatagcaaagacttggaaccaacccaaatgtccaacaatgatagactggattaagaaaatgtggcacatatacaccatggaatactatgcagccataaaaaatgatgagttcatatcctttgtagggacatggatgaaattggaaaccatcattctcagtaaactatcgcaagaacaaaaaaccaaacaccgcatattctcactcataggtgggaattga

SEQ ID NO: 14848 - DNA, 874 bp, Homo sapiens
  SIMILAR (317)..(9): 371254mologous to Cucumis sativus expressed in cucumber hypocotyls,accession number AB029147,Smith-Waterman Score=100.
catcctctacgaggaaaggaatgtgctgggctcggacgcgccgtcctggccgaacggcagcacctggggcgcgctctggaccgctggggtccgctgtctggcgctgcgccacgattacctcagcagcagagagcgccgcttcccaaaatcggctgtggttggggaccccacggccccgcaggcgtgcgggctgcggggacagcaactggccagcagtggagagggtggggaccgggaggtgggcaaaggcgaccccgccaagcgttccgccaagtgtgcaggggcgcctgcccttcctctacacccacacttgccaggagccggctacggaggagctgtccctcctgttcagctactgacggggtggtgcgtaacggcaaaagcaccgccggacatcagcgctatctctgctctcactgccgtaaaacatggcaactgcagttcacttacaccgcttctcaacccgccgggcagtgacgtcatcgtctgcgcggaaatggacgaacagtggggctatgtcggggctaaatcgcgccagcgctggctgttttacgcgtatgacagtctccggaagacggttgttgcgcacgtattcggtgaacgcactatggcgacgctggggcgtcttatgagcctgctgtcaccctttgacgtggtgatatggatgacggatggctggccgctgtatgaatcccgcctgaagggaaagctgcacgtaatcagcaagcgatatacgcagcgaattgagcggcataacctgaatctgaggcagcacctggcacggctgggacggaagtcgctgtcgttctcaaaatcggtggagctgcatgacaaagtcatcgggcattatctgaacataaaacactatcaataa

SEQ ID NO: 14849 - DNA, 891 bp, Homo sapiens
  SIMILAR (459)..(4): 911254mologous to synthetic construct InsB peptide,accession number Z37515,Smith-Waterman Score=720.
ttattgatagtgttttatgttcagataatgcccgatgactttgtcatgcagctccaccgattttgagaacgacagcgacttccgtcccagccgtgccaggtgctgcctcagattcaggttatgccgctcaattcgctgcgtatatcgcttgctgattacgtgcagctttcccttcaggcgggattcatacagcggccagccatccgtcatccatatcaccacgtcaaagggtgacagcaggctcataagacgccccagcgtcgccatagtgcgttcaccgaatacgtgcgcaacaaccgtcttccggagactgtcatacgcgtaaaacagccagcgctggcgcgatttagccccgacatagccccactgttcgtccatttccgcgcagacgatgacgtcactgcccggcgggttgagaagcggtgtaagtgaactgcagttgccatgttttacggcagtgagagcagagatagcgctgatgtccggcggtgcttttgccgttacgcaccaccccgtcagtagctgaacaggagggacagcctggagtctgtagacatagtaggcatcagaatccacctccctgtccccaatggtggttttgcagatgtagcttctgtcctcaaagataccagaaaagccacgttggtgatcataggggacaggcagtgcaacgtcccctttcttctcgtgcagtgtcaccaccagctgtgggtctgttactcggcatggaatggtgatctcagttatttccgtgagaaagatgaatagttcctcggcatcattagggaggaagcccacggtgggatctgccaggagtggagccgtgaataaatcaggggaactgggtttctggccatcccctgaattgctgtgtggcaagtcatttgccat

SEQ ID NO: 14850 - DNA, 669 bp, Homo sapiens
  SIMILAR (211)..(666): 911254mologous to synthetic construct InsB peptide,accession number Z37515,Smith-Waterman Score=720.
atggctgcgagggccggggcctatggagaatggacagagaaatggtcagacatccggtccagagcctgcacgcagggccaacctgtgctggggacacgggagaccactggtgaaaacagggacccggcagtacatgacctcagccagctactgacggggtggtgcgtaacggcaaaagcaccgccggacatcagcgctatctctgctctcactgccgtaaaacatggcaactgcagttcacttacaccgcttctcaacccgccgggcagtgacgtcatcgtctgcgcggaaatggacgaacagtggggctatgtcggggctaaatcgcgccagcgctggctgttttacgcgtatgacagtctccggaagacggttgttgcgcacgtattcggtgaacgcactatggcgacgctggggcgtcttatgagcctgctgtcaccctttgacgtggtgatatggatgacggatggctggccgctgtatgaatcccgcctgaagggaaagctgcacgtaatcagcaagcgatatacgcagcgaattgagcggcataacctgaatctgaggcagcacctggcacggctgggacggaagtcgctgtcgttctcaaaatcggtggagctgcatgacaaagtcatcgggcattatctgaacataaaacactatcaataa

SEQ ID NO: 14851 - DNA, 810 bp, Homo sapiens
  SIMILAR (394)..(807): 981254mologous to synthetic construct InsB peptide,accession number Z37515,Smith-Waterman Score=719.
atgaaggtggacaaccacttcattcaaaaggatgatgctatcctgattaatattgagagaagaccaagagctcacaaaggcagtttcaagggccaagggttccaatgtcctggttccaaaaggtttggttccccaaggctggtcaagccaaacgacggagtacccacagcgggtagctccttcatgcagctagcagcccagatgtctgtgagtttggaaagaaaattagaagctcagggagtaaataaccaaagaagaattggtggttggagatggctgaacactacggatcataatcacggacgatttcagcccgttgtggctggacgaccgaatgcggaaataccaaaagaaaagaacgttgtaaacagaatatataaggagaaagtgtggcgaaagaggccgggcagtgacgtcatcgtctgcgcggaaatggacgaacagtggggctatgtcggggctaaatcgcgccagcgctggctgttttacgcgtatgacagtctccggaagacggttgttgcgcacgtattcggtgaacgcactatggcgacgctggggcgtcttatgagcctgctgtcaccctttgacgtggtgatatggatgacggatggctggccgctgtatgaatcccgcctgaagggaaagctgcacgtaatcagcaagcgatatacgcagcgaattgagcggcataacctgaatctgaggcagcacctggcacggctgggacggaagtcgctgtcgttctcaaaatcggtggagctgcatgacaaagtcatcgggcattatctgaacataaaacactatcaataa

SEQ ID NO: 14852 - DNA, 337 bp, Homo sapiens
  SIMILAR (2)..(157): 1001254mologous to Homo sapiens A human proliferation and apoptosis related protein,accession number Y84902,Smith-Waterman Score=266.
  misc_feature (1)...(337): n = a,t,c or g
tattctttctaagacctcttctgacttaagtaaaatggctgctatatacctggtagatgtggaccaaactgcagtttatacacagtattttgacatcagttatattccatctactgtctttttcttcaatgggcagcatatgaaagtggattatggtggagaagatccagccctcagaagcataaaagctgtccgcagaaccagccctgcaggtactttaggagaaaagccagtcaactcctagtaataacaggtaacattgggagggttctgnnnnnnnnnnnnnnnnnnnnnnnnnnnnnnnnnnnnnnnnnnnnnnnntcttcaacagcccatg

SEQ ID NO: 14853 - DNA, 1200 bp, Homo sapiens
  SIMILAR (462)..(4): 891254mologous to synthetic construct InsB peptide,accession number Z37515,Smith-Waterman Score=714.
ttattgatagtgttttatgttcagataatgcccgatgactttgtcatgcagctccaccgattttgagaacgacagcgacttccgtcccagccgtgccaggtgctgcctcagattcaggttatgccgctcaattcgctgcgtatatcgcttgctgattacgtgcagctttcccttcaggcgggattcatacagcggccagccatccgtcatccatatcaccacgtcaaagggtgacagcaggctcataagacgccccagcgtcgccatagtgcgttcaccgaatacgtgcgcaacaaccgtcttccggagactgtcatacgcgtaaaacagccagcgctggcgatatttagccccgacatagccccactgttcgtccatttccgcgcagacgatgacgtcactgcccgggtcattcatgccataatcatgattttctggtgcgatcgggttgagaagcgtgtaagtgacgcagttgcatgttttacgcttgagagcgagatagccgaagtcggcgtgctttgccgtacgcacatccgtcagtagcgacaggtcacgcctgctcgaatgtaagctctgtcgcgaatcttgcatgcctgcaggtccgaagacgtgcgccacaaccgtcctccgtatcctgtcatacgcgtaaaacagccagcgctgacgtgatttagcaccgacgtagccccactgttcgtccatttcagcgcagacaatcacatcactgcccggttgtatgcgcgaggttaccgactgcggcctgagttttttaagtgacgtaaaaccgtgttgaggccaacgcccataatgcgtgcacgggctgagaggcggtgtaagtgaactgtagttgccatgttttacggcaaggagagcagagatagcgctgatgtccggcagtgcttttgccgttacgcaccacgccttcagtagcggagcaggaaggacatccggccgttgctcattctcgtaacagtctggagatgaggaaccttgttccttccattttctctcttcaccatcccctgggctcaaggtgttggcctctgtatgatggcagccacatccctcccgcatactcaacaagatatccctgcggaccacagccctggagaacacctccatcaaggttggccccgccggaagaatttgtccaaggcggcatgcacgcaggatcaagatgaaccgtcggtgaagacccat

SEQ ID NO: 14854 - DNA, 1755 bp, Homo sapiens
  SIMILAR (1797)..(3131): 1001254mologous to Homo sapiens PDE4C-791,accession number U66346,Smith-Waterman Score=2298.
atgggagtaaatgatgcagtcctcgaaatgcatggccttggcaacgattttatggtcgtcgacgcggggtttgaccaactgctggtggttgagccgccgtatgatcttgagctggattttcactatcgcatgttcaatgctgatggcagtgaagtggcgcagtgcggcaacggtgcgcgctgctttgcccgttttgtgcgtctgaaaggactgaccaataagcgtgatatccgcgtcagcaccgccaacgggcggatggttctgaccgtcaccgatgatgatctggtccgcgtaaatatgggcgaacccaacttcgaaccttccgccgtgccgtttcgcgctaacaaagcggaaaagacctatattatgcgcgccgccgagcagacaatcttatgcggcgtggtgtcgatgggaaatccgcattgcgtgattcaggtcgatgatgtcgataccgcggcggtagaaacgcttggtcctgttctggaaagccacgagcgttttccggagcgcgccaatatcggttttatgcaagtggttaagcgcgagcatattcgtttacgcgtttatgagcgtggggcaggagaaacccaggcctgcggcagcggcgcgtgtgcggcggttgcagtagggattcagcaaggtttgctggccgaagaagtacgcgtggaactccccggcggtcgtcttgatatcgcctggaaaggggaagaactgcaggaaacactcacggagcttgatgaccgggcggttgtcgattatctgattaaaaatcctgagttttttatccgtaatgcgcgcgcagtagaagcgatacgtgtgccgcatccggtacgcggcaccgtttcgttggtcgagtggcacatggcccgcgcacgtaatcatattcatgttctggaagagaacatggcgctgttgatggaacaggctatcgccaacgaaggcctgttttatcgcctactctacctgcagcgcagtctcaccgccgccagcagtctcgacgatatgctgatgcgctttcaccgctgggcgcgcgatctcggcctggcagtcgcgatgccagtcactatcaacaagggcaaccagatcattgaaaaccaactggatacagaaacaataactattagttatgaatttatcctctgtcaacatcttatcgcaaataccgagttcagctatttggcactccctgaaaattataaccgtttgtgtttaccaaattcaaaaaaccaaacaaataatcgtttcaaaacgttaaacagcaaagctattggcaggctacttgctgctggtggcgtatacaatgggaacattgaaggattcagagatactgcggaaaaactggctgtccctcctgttcagctactgacggggtggtgcgtaacggcaaaagcactgccggacatcagcgctatctctgctctcactgccgtaaaacatggcaactgcagttcacttacaccgcttctcaacccgccgggcagtgacgtcatcgtctgcgcggaaatggacgaacagtggggctatgtcggggctaaatcgcgccagcgctggctgttttacgcgtatgacagtctccggaagacggttgttgcgcacgtattcggtgaacgcactatggcgacgctggggcgtcttatgagcctgctgtcaccctttgacgtggtgatatggatgacggatggctggccgctgtatgaatcccgcctgaagggaaagctggcacgtaatcagcaagcgatatacgcagcgaattga

SEQ ID NO: 14855 - DNA, 750 bp, Homo sapiens
  SIMILAR (292)..(747): 911254mologous to synthetic construct InsB peptide,accession number Z37515,Smith-Waterman Score=720.
atgatcatcatcgatccgcgctataccgacaccggtgccgggcgcgaagatgagtggatccctattcgtccgggaacagatgccgcactggttaacggtctggcgtacgtcatgatcactgaaaacctggtggatcaggcattcctcgataaatattgcgttggctacgatgagaaaaccctgccagccagtgcgccgaaaaatggccactataaagcttatattctggctactgacgggtggtgcgtaccgccaaaagcaccgccggacatcagcgctatctctgctctcactgccgtaaaacatggcaactgcagttcacttacaccgcttctcaacccgccgggcagtgacgtcatcgtctgcgcggaaatggacgaacagtggggctatgtcggggctaaatcgcgccagcgctggctgttttacgcgtatgacagtctccggaagacggttgttgcgcacgtattcggtgaacgcactatggcgacgctggggcgtcttatgagcctgctgtcaccctttgacgtggtgatatggatgacggatggctggccgctgtatgaatcccgcctgaagggaaagctgcacgtaatcagcaagcgatatacgcagcgaattgagcggcataacctgaatctgaggcagcacctggcacggctgggacggaagtcgctgtcgttctcaaaatcggtggagctgcatgacaaagtcatcgggcattatctgaacataaaacactatcaataa

SEQ ID NO: 14856 - DNA, 2466 bp, Homo sapiens
  SIMILAR (2077)..(2748): 991254mologous to Escherichia coli enterobactin,accession number M60177,Smith-Waterman Score=1193.
atgattagcgtaacccttagccaacttaccgacattctcaacggtgaactgcaaggtgcagatatcacccttgatgctgtaaccactgatacccgaaaactgacgccgggctgcctgtttgttgccctgaaaggcgaacgttttgatgcccacgattttgccgaccaggcgaaagctggcggcgcaggcgcactactggttagccgtccgctggacatcgacctgccgcagttaatcgtcaaggatacgcgtctggcgtttggtgaactggctgcatgggttcgccagcaagttccggcgcgcgtggttgctctgacggggtcctccggcaaaacctccgttaaagagatgacggcggcgattttaagccagtgcggcaacacgctttatacggcaggcaatctcaacaacgacatcggtgtaccgatgacgctgttgcgcttaacgccggaatacgattacgcagttattgaacttggcgcgaaccatcagggcgaaatagcctggactgtcacgcacccaccacggttcgtcaccaaacagtggctctgctttttgccagatggcctgctgctcttcgctgaagcccgctttgtgatctggcagatgcagccagccgtgatggctgtggatgtcgccgctttcgcgcatcttttcaatcagcaacagtaccagcgcttcaccgggcgaccgcccgattccagcaaactaccctggaaaataacctgtaatggggaatgcgttaccttccactggtggctgctgggcgtagcggtccgaatatcgcgtttattgcctgtacgggtgatgacagcattggaaggtaactacaacgggacggaaggtatctccgccctgccgttcaacgggattattctcgcacactcgaacgagtccgaatgggtcactttccgtaataacaaaaacaacgaagccttcctcgatcgtgtttacatcgtgaaggtgccgtattgcttgcgcatttccgaagagatcaaaatctacgagaaattgcttaatcacattttcgagtgctggcagcacttcttgaataatcctgagtctctccagtgctatatctgggctgctaatgccgattttcgagaggcccggcaggttatcttcaagacgttttttacggtcggtgttgaagaagaactcggcatccgccagacgcggacgaacgactttctcgttaccggagataatctgctgcggatctttcgattcgatgttggcaacgaagataaagttcggcagcagtttgccgtcgttcgcatacaccgggaagtatttctggtcacctttcatggtgtaaaccagcgcttcagccggcaccgcgaggaatttctcttcgaattttgcgtcagcgttaccgccaatcttacgcgctgcttcttcggcatcggctttaatcttcgccttacgttcttcgtaatcggcgatgactttcccacgctcacgcagaatttccggatactgatcggcgttatcgatggtgaattccggctcgcccataaagcggtggccgcgaatcacgcgatcggactgaatgcccagaatggttgccggaatgactttgtcgcccatgcagcagggtcacgtgccctggcagctgatggtcgttctctggaacacgcgccaacggtggaaaccgtcgtcgccggaccgttatgtgaatcgggcgatgtctttacccagcaggaagggggaaatgttgaaacccgcgccttgccggaagtgaaggcagctgtccctcctgttcagctactgacggggtggtgcgtaacggcaaaagcactgccggacatcagcgctatctctgctctcactgccgtaaaacatggcaactgcagttcacttacaccgcttctcaacccgccgggcagtgacgtcatcgtctgcgcggaaatggacgaacagtggggatacgtcggggctaaatcgcgccagcgctggctgttttacgcgtatgacaggctccggaagacggttgttgcgcaccgtctgcggattcacagccgtctgccgattgtgatcccggcacgtatcaccgaggcgctggttgaatgctttgcccgttctacgctgcaaatcttgctggtgaatcacatcaaccatgcccatgaggtagatgaaacattccgtcaggcgatggctaagttgcgccgggtaggcgttactttgctgaaccagagcgttctgttacgtgatgtgaacgataacgcacaaacgctggcaaacctgagtaatgcgttgttcgatgccggcgtaatgccgtattacctgcatgtgctcgataaagtacagggcgcggcgcattttatggtgagtgatgacgaagcacggcagattatgcgtgagttgctgacactggtgtcgggatatctggtgccgaaactggcgcgagaaattggcggcgaacccagcaaaacgccgctggatctccagctacgccagcagtaa

SEQ ID NO: 14857 - DNA, 1236 bp, Homo sapiens
  SIMILAR (1210)..(1722): 971254mologous to Escherichia coli 4-alpha-l- fucosyltransferase,accession number M87049,Smith-Waterman Score= 864.
ctaaatctggtgctttttcaacaacgcgcggaactgatgataagttaaccccagtaattcagccgcgcgcttctggttatatttcccttgttgcaaactgagttgcagcaactctttttcctgctgcatgtaaatccagcggcagtggaagccccccccagtgtcccaatagggctttacagcgaaaacgtgcgcaacaaccgtcttccggagactgtcatacgcgtaaaacagccagcgctggcgcgatttagccccgacatagccccactgttcgtccatttccgcgcagacgatgacgtcactgcccggcgggttgagaagcggtgtaagtgaactgcagttgccatgttttacggcagtgagagcagagatagcgctgatgtccggcggtgcttttgccgttacgcaccaccccgtcagtagctgaacaggagggacagcggaaaacacccgcactgtttgaaatggtaaaaagaaaggagagtgaatatgagcgcatcggcactggtttgcctcgcccctggtagtgaagagactgaagccgtcaccactatcgatctgctggttcgcggcggtatcaaagtcaccactgccagcgtcgccagcgatggtaacctggcgattacctgctcgcgcggcgtgaagctgctggcggatgcgccgctggtcgaagtggctgatggcgaatatgacgtgatcgtgctgcctggtggcattaaaggcgcggagtgttttcgcgatagcactctgctggttgaaaccgttaaacagttccaccgttccgggcgtatcgtcgcggctatttgcgccgcgccagccaccgtgctggtgccgcacgatatcttcccgattggtaatatgaccggcttcccgacgctgaaagacaaaattcccgccgaacaatggctggacaagcgcgtcgtctgggatgcacgggtaaaattgctgaccagccaggggccgggtacagctatcgactttggtctgaaaattatcgaccttcacattgttaaagccctgctcgcgcagatagagcgcctgcagacggctcatcaccccgcgctcacaccacagcagccagttttgttcacgggggcggtttttgggccccaaaagcctgtgggtgccaaatggtccgaaggcccccaagggggttggttttttggggtgttgtttgggtaaagcggggatagtgagttgagatgtgtagatgataaaggtttccagggccat

SEQ ID NO: 14858 - DNA, 2036 bp, Homo sapiens
  SIMILAR (844)..(1425): 951254mologous to Escherichia coli enterobactin synthetase component F,accession number U82598,Smith-Waterman Score=974.
atgcgccgcaacgcttgccagtaccgcactccggcggttgtggccagccggcagaagcgctggcacggcgatctggggatgatcggaagccgcgatgtgatgctgtttatctcggactccgttggcgcgaaggaactggatctgattattccgcgtctggaagataaatctatcgcgctgctggcgatgaccggcaaaccgacgtcaccgctgggcctggcggcaaaagcggtgctggatatctccgtagaacgcgaagcctgcccgatgcaccttgcgccgacctccagcaccgtcaataccctgatgatgggtgacgcgctggcgatggcggtcatgcaggcgcgcggatttaatgaagaagattttgcccgctcccacccagccggggcactgggcgctcgcttgctgaataaagtgcatcatctgatgcgccgtgacgatgccatcccacaggtggcgttaaccgccagcgtgatggatgcgatgctggaactcagccgcaccggtctggggctggtggcggtatgtgacgctcaacaacaggtacaaggcgtctttaccgacggcgatttacgtcgctggctggttggcggcggcgcactcaccacgccagtcaatgaagcgatgacggtcggcggcaccacgttgcaatcgcaaagtcgcgccatcgacgccaaagagatcctgatgaagcgcaaaatcactgccgcaccggtggtggatgaaaacgggaaactcaccggcgcaataaaactgcaggatttctatcaagggcggggattatttaatccttcaatccccagagtttcgacagccgatgcaggtttggctaacagggcacgccgcaattgggttggaagttcctggaagcaagttggccagattatactccagggggggccacaaaacgccgagaagtctgggcagcgctacacggtgtcacatgaccgacaccgggacgcagagcgccagcgcgtgaagtcgggactacctcggtacgccgaatgcagcacgtatccgtcatgcccagtggcgctggatctggcgttcgcttcccacggcattcatatgcacgccccgggagaagctttacggatgctcgttacggcgatggataaagcggcggatgcacgcaccaaactggcgcgcctgctggcgaccaaaggcatcacccatgaaatccagatcccggatatctcaaccaaagagaaagcccagcagcccattggcctgaacatggaacaaatcaagcccgagaagcaggacttcatcaaaccggtgatcccgcaggccggaaaacacaatggagtgaatatgagcgtattacgttcgttattaactgccggggtgctggcgtcgggcctgttgtggagcctgaacggaattaccgctacccctgcggcgcaggcatctgatgatcgctacgaagttacccagcagcgtaacccggatgccgcctgtctggactgtcataaaccagataccgaagctgtccctcctgttcagctactgacggggtggtgcgtaacggcaaaagcaccgccggacatcagcgctatctctgctctcactgccgtaaaacatggcaactgcagttcacttacaccgcttctcaacccgccgggcagtgacgtcatcgtctgcgcggaactggacgaacagtggggctatgtcggggctaaatcgcgccagcgctggctgttttacgcgtatgcacagtctccgcgcacgacgcgttgttgcgcacgtattcggctgcacgcactatggcgacgctggggcgtcttatgagcctgctgtcaccctttgacgtggtgatatggatgacggatggctggccgctgtatgaatcccgcctgaagggaaagctgcacgtaatcagcaagcgatatacgcagcgaattgagcggcataacctgaatctgaggcagcacctggcacggctgggacggaagtcgctgtcgttctcaaaatcggtggagctgcatgacaaagtcatcgggcattatctgaacataaaacactatcaataa

SEQ ID NO: 14859 - DNA, 3774 bp, Homo sapiens
  SIMILAR (577)..(248): 531254mologous to Homo sapiens HSPC300,accession number AF161418,Smith-Waterman Score=213.
tcatgcattcgtcctctctgcaatacgcagaactgaactacgggcacgagggttctcagccacctcttcttcgcccggcattaacttgcctagtgctcgcagctgacggccacccagttttttgagctgctcttcagtcatcggtaaccctgccggaacttgcggaccgcggctgttttcacgcataaaacgtttcacaatacggtcttccagcgagtggaagctgatgatcgaaagccgcccacccggggccagcacgttgagcgagctttttagcgcctgctctatctcctccagttcactgtttacccaaatgcgcaccgcctggaaggtacgggtcgcgggatgtttaaacttatctttcaccggcgttgcagcagccacgacttccgccagttctttggtgcgggtcatcggctgttcgcggttacgctcgagcactgctcggcaacatatgctaccacgccaataaaacttcgcccgtaagccgtaggcctgataagacgcgcaaagcttcgcatcaggcatggcgcacgactgccggatgcggcgtgaacgccttatccggtctacacttcgcccataaaccgtaggccacatcaaatcatcaggcactttgaagtcggcatacgggtcgtcttcatcctgctcttcggcgctgagcgcgctgtgcaacactatactgctggcatcgcgctgagcaattttatcggcaacgctggcgggaataatggcgtattcaccttcgctattgttatcgaccaacaagcgggcaatcgccagacgaccattaatcaactgcgcctgtgtgagcttatcgacaaaaatcttcttaatcagattgccgtcagtgaagttaaaaccaatatcgccattggcaatggtgattcggttcatttcaataagctgcttcacctgagctttatattctttcgccaacgccgcttgtttttgctgttcgctaagctgtttatcacgctcaagctgtgcctttttattttcttctaccgccgggtttttgagggtacccatgggccggcccagtgaaccacactgaatccaagtgttccggttgagaagcggtgtaaagtgaactgcagttgccatgtttacggcagtgagagcagagatagcgctgatgtccggcagtgcttttgccgttacgcaccaccccgtcagtagctgaacaggagggacagctatgtcgaatatctggccgataaggttgcggatcgagaagaggatgcagaggaatatctggaagcaatcatggaggctcgtgttaccgttgctggcatggggctggtgatggaggtgcaggattacttcgatggcgaggccgatagactggcgaaggcgtggctggccgagtacacaccgcaaatcaagtcgttgaaagatgagcgtaaagaggcctatcgtcaaatcgtcgaaatgagtaccgaaccgcaggatgtggatctggtcaggccggcgaacaagtttgaaatgaccagggtgcgtgaaggtgaaaaggaagctgaccttccagtctggaaacaccatttgttgtgtgacgaaagcgggaactatccggctctgttgaaccattgggaaaccaggtttttgagatcgaaaccaaacgtgaaaattcataggagctctgataaaagtccaacatattttgtgttcttcatcagccagtacgacctcccagctttctacccaattaatggccattttttggtcgagagagtggtcaaagtcaggatcgtcttcattgaagaattcgctgaccatcaccatcttgccattttccagttcaacaaccgactccagcgtcatgcctttgtagttacgctcgcgaacgtaaccaatcagcccttcagcgtggttgtcgtcgttaatctcttcaacacgtaagtcttccgggcgcagcagaacatgcagtttttgccccggttcaacggcgaagttaacgtagatattacattcgcggccttcaacgttggcgcgtacgcgctgctcgtctagacgttcgatgacagtggcgttaaacatattgatttcgccaatgaagccggcaacaaacaggtttttcggctcttcgtagatttcacgcggcgtgccgtcttgctcaatgcgaccatcgcgcatcacatccctgttccgggctaccgcccagcagttcgattcaataaagtggtcatagtaagccagcactgccggaacgataccgcaggcaccgttggttggcgcagttaccacacgaccaccggcggcgttttcttcgttaactgccagcgcaaacatgtttacccagtcaatgacattcatcggatcgttagacagtttatcgctggaaaccagcatccggcgcagggcagacgcacgacgtggcacgcgcagcgggcctggcagtacaccttcggtgttcatcccgcgatcgatacatgcctgcatggtttgccagacatgcgcgaaatactcgtcgatctctttcttgctgtgcagcgccagttcgttctgggaggcagaggtgaagtccatgtactggcggcactgttcacagtggtgaaaggtgttataggctgcatatttggtcagcattatggatacagtttcccgtttcctgggctcttcaactttggattcctttatcacttctttgaacggacgcttcatgttttcgatagcgtcgatgatgtcgtggtgaaccagctgttcgttctggatacctacacaacgaccgccgtaacctgccagcagcagatcgatagcgtaagcgcccatacgggaagccagaatacggtcgtaaggcaccggagaaccaccgcgctggatgtggcccagcacagttgcgcgggtttcacgaccggtttctttctcgatgaaatgcgccagttcgtcaacatcacacatatgttcggtaatcgccacgatcgcgtgttttttacctttcgcgatacccgctttgatttcgtttaccaggtcttcacggctgaattcaacttccggaaccacaacgaattcacagccaccggcaatggccgcagccaacgtcagatctccacaataacggcccatcacttccaccacggaaatacgctggtgagaagaagaggtgtcacgcagacggtcgatcgcttctcgcgcatacagccgggcagtgacgtcatcgtctgcgcggaaatggacgaacagtggggatacgtcggggctaaatcgcgccagcgctggctgttttacgcgtatgacaggctccggaagacggttgttgcgcacgtattcggtgaacgcatgttgcagttgttcccaggaggtggagcaatcatccacgatgatcatctcccagttgctgtagtcctggcgcaaaaccgattttattgcccgaatcgccagttgttgtcggttccaggtcggcatatagattgagatcagcggattgtttttcataggttgttctcccggcttatgagctggtttgcttgccggatgcggcgtgaacgccttatccggcggggcggtgcgaatgcaggcgtcgttatttcgcatccgactatattcgtattcgtaatagccataatcctgatacgcgctggcgcggcggaagatggagttcagaatcacccctttcaccggaataccgttttgctcaaagcggctcagactggtttccacttctttcaatgtgttgaccgcataacgcgccaccattaacgtggttccgacatgacgaccaacaattgccgcatcggtcaccgcgcggggaaaccgtaattcgaaggaccacat

SEQ ID NO: 14860 - DNA, 3099 bp, Homo sapiens
  SIMILAR (580)..(1821): 481254mologous to Homo sapiens Not3p,accession number AF180474,Smith-Waterman Score=695.
atgaaacaggggttccaaaatgtagagtataagcaactagtggaggtgctagaaacggtttataacaaagctcagaaaatactaaaggttaaaggagaattgagagctgccaaggaaatgaaagatgaggcgggggagagagacagagaagtgagcagcctgaacagcaagctgttaagcctgcaacttgacatcaagaatctgcacgatgtctgcaagagacagaggaagaccttgcaggacaatcagctctgcatggaggaggcaatgaacagcagccacgacaagaagcaagcacaggcattagcattcgaggagtcagaggtggaatttgggtccagtaaacagtgtcatctgagacaactccagcaactgaagaaaaaattgctggtccttcaacaagaactggagtttcacacagaggagttgcagacttcttactattctctccgccagtatcagtccatcctagagaagcagacttccgacctggttcttctgcaccatcactgcaaactgaaagaagatgaggtgattctctatgaggaggaaatgggaaatcacaacgagaacacaggggagaagctccatttggcgcaggagcaactcgccttggccggggacaagatcgcctctctagagaggagcttaaacctctacagggataaataccagtcttccctgagcaacatcgagttactagaatgccaagtgaagatgttgcagggggaactcggcgggatcatgggtcaggagcctgagaacaagggtgatcattcaaaggtacggatatacacttctccttgcatgattcaagagcatcaggagactcagaaacgactgtctgaagtctggcaaaaggtctctcaacaggatgatctcattcaagaacttcgaaataagctggcctgcagtaacgctttggttctggagcgtgaaaaggctttgataaaactacaagccgattttgcttcctgtacagccacccacagataccctcctagctcctcagaagagtgtgaagacatcaaaaagatactgaagcacttgcaggagcagaaagacagccagtgcctgcatgtggaggagtaccagaacctggtgaaggatctgcgcgtggaactagaggccgtgtcggaacagaagagaaacatcatgaaggacatgatgaagctggagctggacctgcacggactgcgggaggagacatctgcccacattgagaggaaggataaggacatcaccatcctgcagtgccggctgcaggagctgcagctggagttcaccgagacccaaaagctcactttgaagaaagacaagttcctccaagagaaagatgagatgctgcaagagctggagaagaaactgacacaggttcagaacagcctcctgaaaaaggagaaggagctggagaagcagcagtgcatggccacagaacttgaaatgacagtcaaggaggctaagcaggacaagtccaaggaggcggagtgcaaggccctgcaggctgaggtccagaagctgaagaacagtctcgaagaggccaagcagcaggagaggctggctgctcagcaagcagcccagtgcaaagaagaggctgcactggcaggctgtcacctggaggacacccagaggaaactgcagaagggtctcctcctggacaagcagaaggcagacaccatccaggaactacagagagaacttcagatgctgcagaaggagtcctcgatggctgagaaggaacaaacctccaacagaaaacgggtggaggagctgtcattagaactctctgaagccctgaggaagcttgaaaattcagacaaggaaaagaggcagcttcagaagacagtggctgagcaggatatgaaaatgaatgacatgcttgatcgtatcaagcaccagcacagggagcaaggctccatcaaatgcaagttagaagaagatcttcaggaggccacaaagcttctggaggacaaacgggagcagttgaagaagagcaaagagcatgagaagctgatggagggagaacttgaagctttgcggcaggaatttaaaaagaaagacaagacgatagcccttcagaaggagtccttaatgagcctgcaggcccagctggacaaagctctgcagaaggagaagcactatctccagactaccatcaccaaagaagcctatgatgcattatcccggaagtcagccgcctgccaggatgacctgacacaagccctcgagaagaggacaggaagggactggaaccctcctccattcaggactcagcagagagggtcaaagtctctgacagccattcgtcctctttgtcttttccggaagctcaatcacgtgacctcagagacaaagagcctgcagcaaagcttgacacagacccaagagaagaaagctcagctggaagaggaaatcattgcttatgaggaaaggatgaaaaagctcaatacggaattaagaaaactgcggggcttccaccaggagagtgagctggaggtgcacgcctttgacaagaagctagaggagatgagctgccaggtgctgcagtggcagaagcaacaccagaatgacctcaagatgctggcagccaaagaggagcagctcagggagttccaggaggagatggccgccttaaaagagaacctccttgaggacgataaggagccctgctgcctgccccagtggtctgtgcccaaagacacctgtaggctctaccgagggaatgatcagattatgaccaacttggagcaatgggcaaaacagcagaaggtcgccaatgagaaactaggaaaccagctccgagagcaggtgaaatacattgccaagctgagtggcgaaaaggaccacctccacagtgtaatggtccacttgcagcaggaaaacaagaagctgaagaaggagatagaagagaagaagatgaaagccgagaacacaaggctatgcaccaaagccctaggcccgagcagaacggagtccacacagagggagaaagtgtgcggcaccttgggctggaaggggttgccccaggatatgggtcaaagaatggacctcaccaagtacatcgggatgccccactgcccgggttcctcatactgctag

SEQ ID NO: 14861 - DNA, 1596 bp, Homo sapiens
  SIMILAR (642)..(1274): 961254mologous to Homo sapiens BB1=malignant cell expression- enhanced gene/tumor progression-enhanced gene,accession number S82470,Smith-Waterman Score=1103.
ttattgatagtgttttatgttcagataatgcccgatgactttgtcatgcagctccaccgattttgagaacgacagcgacttccgtcccagccgtgccaggtgctgcctcagattcaggttatgccgctcaattcgctgcgtatatcgcttgctgattacgtgcagctttcccttcaggcgggattcatacagcggccagccatccgtcatccatatcaccacgtcaaagggtgacagcaggctcataagacgccccagcgtcgccatagtgcgttcaccgaatacgtgcgcaacaaccgtcttccggagactgtcatacgcgtaaaacagccagcgctggcgcgatttagccccgacgtatccccactgttcgtccatttccgcgcagacgatgacgtcactgcccggcgggttgagaagcggtgtaagtgaactgcagttgccatgttttacggcagtgagagcagagatagcgctgatgtccggcggtgcttttgccgttacgcaccaccccgtcagtagctgaacaggagggacagccgcggttttaagcgaatcgatggagactgcgccgacaaacttattaccgcgttcgataacgtagccatattcgcgatcttcatcctgcaataatttcagtgccgaacgtgggccgaagccaggggttttacgaattaagccattcggtgtccggcgggcaatatctttcgcactgaatacctgactaatatcaacgccacggaagaaggtacggacataatcattcgccggctttagagcagggcgatgagcatcgcaggtgtgtgtctccggcttaaacgagactgatccatcttgatgtctcctcaacgcggaatattgactgtgtatcatttggtccgcccgaaacaggttggccagcgtgaataacatcgccagttggttatcgtttttcagcaaccccttgtatctggctttcacgaagccgaactgtcgcttgatgatgcgaaatgggtgctccaccctggcccggatgctggctttcatgtattcgatgttgatggccgttttgttcttgcgtggatgctgtttcaaggttcttaccttgccggggcgctcggcgatcagccagtccacatccacctcggccagctcctcgcgctgtggcgccccttggtagccggcatcggctgagacaaattgctcctctccatgcagcagattacccagctgattgaggtcatgctcgttggccgcggtggtgaccaggctgtgggtcaggccactcttggcatcgacaccaatgtgggccttcatgccaaagtgccactgattgcctttcttggtctgatgcatctccggatcgcgttgctgctctttgttcttggtcgagctgggtgcctcaatgatggtggcatcgaccaaggtgccttgagtcatcatgacgcctgcttcggccagccagcgattgatggtcttgaacaattggcgggccagttgatgctgctccagcaggtggcggaaattcatgatggtggtgcggtccggcaaggcgctatccagggataaccgggcaaacagacgcatggaggcgatttcgtacagagcatcttccat

SEQ ID NO: 14862 - DNA, 948 bp, Homo sapiens
  SIMILAR (490)..(945): 911254mologous to synthetic construct InsB peptide,accession number Z37515,Smith-Waterman Score=720.
atggatgaagctgaaaaccataattctcaacaaactaacacacgaacagaaaaccaaacaccacatgttctcactcataagtgggagttgaactatgagaacccatggacacagggaggggaacatctcacaatggggcttgtcgtgggttggaggggtcttcaagaaggtgatcctgcaagaactaatctcagttattatcaagctaatgtgggtagtggacaacaccgtgaaaacaaggggccaattaacttgggaaatgtggggaagagcaacggtgagcggggagggaagtcgctttacaggtgtaagattttcttggagagtagtgtgaccatgaaggacagggaattgccacctgtgtatgatggtgtttttgaggtgctccagtggcttctgtttctatcagctgtccctcctgttcagctactgacggggtggtgcgtaacggcaaaagcaccgccggacatcagcgctatctctgctctcactgccgtaaaacatggcaactgcagttcacttacaccgcttctcaacccgccgggcagtgacgtcatcgtctgcgcggaaatggacgaacagtggggctatgtcggggctaaatcgcgccagcgctggctgttttacgcgtatgacagtctccggaagacggttgttgcgcacgtattcggtgaacgcactatggcgacgctggggcgtcttatgagcctgctgtcaccctttgacgtggtgatatggatgacggatggctggccgctgtatgaatcccgcctgaagggaaagctgcacgtaatcagcaagcgatatacgcagcgaattgagcggcataacctgaatctgaggcagcacctggcacggctgggacggaagtcgctgtcgttctcaaaatcggtggagctgcatgacaaagtcatcgggcattatctgaacataaaacactatcaataa

SEQ ID NO: 14863 - DNA, 902 bp, Homo sapiens
  SIMILAR (128)..(412): 981254mologous to Homo sapiens A human proliferation and apoptosis related protein,accession number Y84902,Smith-Waterman Score=474.
tgaaaggagctgtccgcgcccgggctcttccgagaagtggttgctgacagccacaaagtgaaagggagtgaggcggcgtggaccagtaaggagtgacagtgaggattcacatttgggttatttcaagatgagcttcctactgcccaagctgactagcaaaaaggaagtagaccaggcgataaaaagtactgctgagaaggtgttggttctcacgtttgggagagatgaagatcctgtctgtctgcagctagatgatattctttctaagacctcttctgacttaagtaaaatggctgctatatacctggtagatgtggaccaaactgcagtttatacacagtattttgacatcagttatattccatctactgtctttttcttcaatgggcagcatatgaaagtggattatggatctccagatcacactaagtttgtgggaagcttcaaaaccaaacaagacttcatagatttgattgaagtaatctatcgaggagcaatgagggggaagcttattgtccaaagtcctattgatcccaagaatattcccaaatatgaccttctctatcaagacatttagtacattaattgctgtcaaagatgaagaagaaggcacatcttgacacagtacctgaatccagctggtgctgtgtttctggagtcctttggaaacatgtgtcccagaggagaagaggtttgacttgcgtgtagaaaacccggcccctgaggaaaagaccccactggttctctgatgacctgggatgcctaactgtctactccctgcaagcctcagagcagccaagtcattggtgttcattttccccacagtgatttttgtaacttctctttctaatgtttttctttatccctttaatacagaaccctcccaaacaaaaaaaaaaaaa

SEQ ID NO: 14864 - DNA, 2568 bp, Homo sapiens
  SIMILAR (1396)..(2979): 951254mologous to Homo sapiens putative p150,accession number U93574,Smith-Waterman Score=2654.
atgctggccaatatcgggttttataatagtaatgtcatccataggagcaaaggagcaattggagagggcccgccagatcctcgaggaattgtagagcagaacctgggaggagacattagcatcccgtgctacaatggaccaaggcctcggcggagcgcgcagaagacaactctgggcccgctaaaccaacccaggatacccagcgcgcagtgcgcaggcgccttcccgcgggtcgcggcggcgggagcgggaggcggcggcggcggcggcagcggcgggagcggcttctgcctcggctggagactgaggcgaaggcggcagcggcggaggaggtggaggagaggcgagggtgaaggcgatggcgacgcggggcacatgaggccgcgaccggcgggacgggccgaggcccggcggaggaggcggctccgggggaacccgccgccgggcgcgcggctcccaaatcgggagggaaacggctcgggggtgtcctgggccgcggaggtgtcgggcgacggtcggggagcccggacagaagcggcgcgcactcggcggcgccccggcggtgccgacaactacccgggcgctgtccctcctgttcagctactgacggggtggtgcgtaacggcaaaagcaccgccggacatcagcgctatctctgctctcactgccgtaaaacatggcaactgcagttcacttacaccgcttctcaacccgccgggcagtgacgtcatcgtctgcgcggaaatggacgaacagtggggctatgtcggggctaaatcgcgccagcgctggctgttttacgcgtatgacagtctccggaagacggttgttgcgcacgtattcggtgaacgcactatggcgacgctggggcgtcttatgagcctgctgtcaccctttgacgtggtgatatggatgacggatggctggccgctgtatgaatcccgcctgaagggaaagctgcacgtaatcagcaagcgatatacgcagcgaattgagcggcataacctgaatctgaggcagcacctggcacggctgggacggaagtcgctgtcgttctcaaaatcggtggagctgcatgacaaagaggagctcgcagccctcttctctgagctgaagcaggagcagaagaaggtggatgagctcatcgccaaactggtgaaaaaccggacccgaatcgtcaatgagtcggatgtcttcagctgggtgatccgccgcgagttccaggagctgcgccacccggtggacgaggagaaggcccgctgcctggaggggatagggggtcacacccgtggcctggtggcctccctggacatgcagctggagcaggcccagggaacccgggagcggctggcccaagccgagtgtgtgctggaacagttcggaaatgaggaccaccatgagttcatctggaagttccactccatggcctccagtgtccagaagaaggccatggacagaacggagactaggttccgtaagaggggacagattacgggaaagatcacgaccagccgtcaaccgcacccccagaatgagcagagtccccagcggagcacctcggggtaccccctccaggaggtggtggatgatgaagtgttgggaccatcagatgaggggactggtggaagaagaggtgggataggattgactaagacgaaggaagggggccgggagctcgcccctgagcctgaggagacctgggtagtggagacgctgtgtgggctcaagatgaagctgaagcaacagcgagtgtcacccatcctccctgagcaccacaaggacttcaacagtcagcttgcccctggggtagatcccagccccccgcataggtccttttgctggaaaaggaagatggagtggtgggacaaatctgaggagtcgttggaggaggagccacggaaggtgctcgcccctgagcctgaggagatctgggtggcggagatgctgtgtggcctcaagatgaagctgaagcgacggcgagtgtcgctcgtgctccctgagcaccacgaggccttcaacaggctgcttgaggatcctgtcattaaaagattcctggcctgggacaaaggtctgagggtgtcggacaagatcccatcggagcccaccatcctgggagcatcacccaaaacccttcctctggcttctcggatttgcatccgaccttcgaatacccctccatcccgcaatttccaaatgagtacagtcaccccaacactgagctacctggccaatgacatggaggaggacgacgaggaccccaaacaaaacatcttctacttcctgtatgggaagacccgctctcgcatacccttgctccgtaagcgtcggttccagttatgccgttgcatgaacccgagggccaggaagaaccgctctcagatagtcctgttccagaaacttcggttccagttcttctgttccatgagctgcagggcttgggtttccccggaggagttggaggagaacaccggacccaggggagatgtggattttcagcaggaactttattccaatgctaatggcagacaccaggaagaaggagaggaaccatttgtgcagatcatctag

SEQ ID NO: 14865 - DNA, 1514 bp, Homo sapiens
  SIMILAR (115)..(5): 351254mologous to Brugia malayi, male, adult, Peptide Partial, 72 aa heat shock protein 90, hsp90, Bm14= excretory/secretory antigen,accession number S76367,Smith-Waterman Score=71.
atgattatagcccttcagaaggagtccttaatgagcctgcaggcccagctggacaaagctctgcagaaggagaagcactatctccagactaccatcaccaaagaagcctatgatgcattatcccggaagtcagccgcctgccaggatgacctgacacaagccctcgagaagaggacaggaagggactggaaccctcctccattcaggactcagcagagagggtcaaagtctctgacagccattcgtcctctttgtcttttccggaagctcaatcacgtgacctcagagacaaagagcctgcagcaaagcttgacacagacccaagagaagaaagctcagctggaagaggaaatcattgcttatgaggaaaggatgaaaaagctcaatacggaattaagaaaactgcggggcttccaccaggagagtgagctggaggtgattctctatgaggaggaaatgggaaatcacaacgagaacacaggggagaagctccatttggcgcaggagcaactcgccttggccggggacaagatcacctctctagagaggagcttaaacctctacagggataaataccagtcttccctgagcaacatcgagttactagaatgccaagtgaagatgttgcagggggaactcggcgggatcatgggtcagctttctaagacctcttctgacttaagtaaaatggctgctatatacctggtagatgtggaccaaactgcagtttatacacagtattttgacatcagttatattccatctactgtctttttcttcaatgggcagcatatgaaagtggattatggctttatctggctcttccttccttcttgacgcccattatatctcccagtttggtccccgccagttacccagtgtttgtgctgagcctgaaaaggaaaaagctactgacggggtggtgcgtaacggcaaaagcaccgccggacatcagcgctatctctgctctcactgccgtaaaacatggcaactgcagttcacttacaccgcttctcaacccgccgggcagtgacgtcatcgtctgcgcggaaatggacgaacagtggggctatgtcggggctaaatcgcgccagcgctggctgttttacgcgtatgacagtctccggaagacggttgttgcgcaccacagggagcaaggctccatcaaatgcaagttagaagaagatctccaggaggccacaaagcttctggaggacaaacgggagcagttgaagaagagcaaagagcatgagaagctgatggagggagaacttgaagctttgcggcaggaatttaaaaagaaagacaagacgttgaaagagaattccagaaagttggaggaagaaaatgagaatctccgagcagagctacagtgttgttctacacaactggaatcctctctcaacaaatacaacaccagccagcaagtcatccaagacttgaataagtcgccaatggagatacgatttcagctttatatttttacccctgaccagtacgacaaatgcatctaa

SEQ ID NO: 14866 - DNA, 363 bp, Homo sapiens
  SIMILAR (42)..(302): 351254mologous to Homo sapiens Wilms' tumor assocated protein,accession number M60614,Smith-Waterman Score=81.
aatgaggcttccacaagctgccaggcagtggcttcctaacccggcggacgcccctcgaaacgattatcaagttgtttcactggacaggtgctgggtaaaagcttgttgagaaaataaaaaataaataaacgtgtcggtgtggtcacaaccgttccccggaggttaacagccggagaaggggcttaaggagcatcccgcggatgccagaccaggctcatgtcgcgcctgccgggcggccagtgcagggccgggccgaggtcgcctccgccgctcctcctcgcggtagctcaccggccgccgctcccggccagagccaccctcccagctgtctgagggcccccctgtactggagctttagtcgtt

SEQ ID NO: 14867 - DNA, 586 bp, Homo sapiens
  SIMILAR (206)..(271): 361254mologous to Homo sapiens JAK familiy tyrosine protein kinase,accession number U31317,Smith-Waterman Score=42.
  misc_feature (1)...(586): n = a,t,c or g
cagtcttcattcggtgctgtctctctctcctctcttgaattcttctatactattgtgaggacaatacaggctcttccagcttgaaacttcagttctntgcatcgctgggccaagacgttccttgagtaggattctgtgcacacactgctagttacaagactgaggggtggctttgcaaatgaggcttccacaagctgccaggcagtggcttcctaacccggcggacgcccctcgaaacgattatcaagttgtttcactggacaggtgctgggtaaaagcttgttgagaaaataaaaaataaataaacgtgttcgacccgccgccgcaagaatgatttatctgtaaaatacgtgtcggtgtggtcacaaccgttccccggaggttaacagccggagaaggggcttaaggagcatcccgcggatgccagaccaggctcatgtcgcgcctgccgggcggccagtgcagggccgggccgaggtcgcctccgccgctcctcctcgcggtagctcaccggccgccgctcccggccagagccaccctcccagctgtctgagggcgccgctgtactggagctttagtagttgac

SEQ ID NO: 14868 - DNA, 407 bp, Homo sapiens
  SIMILAR (766)..(2142): 941254mologous to Homo sapiens putative p150,accession number U93572,Smith-Waterman Score=2268.
  misc_feature (1)...(407): n = a,t,c or g
caggaactgccattttaaattaccatgtctgaaggtcaagaaacaagttattaaagtcactttagnnnnnnnnnnnnnnnnnnnnnnntgaagtgagcagttgtggccaactttttcattgtaaccagaattatgtgacagactaattgataccacataagacctcatcccaaccttcctccttgccaaaaggacccttttcctagaattctactccttcctgacttagaggaatggttacattctcacccttctcttccattcttaatggtcaatttgagccaaattctgggtgtcctctcttccagtttgctgggtatgccttcgagaacctggggatcccgaaaaattaggggaatttcttcagaaagacaatatcagcgtgcattatttctgtcttgtgagtt

SEQ ID NO: 14869 - DNA, 762 bp, Homo sapiens
  SIMILAR (528)..(707): 421254mologous to cercopithicine herpesvirus 15 latent nuclear antigen EBNA-3B,accession number AF159309,Smith-Waterman Score=109.
cattccttcttttcttttacagtcttcattcggtgctgtctctctctcctctcttgaattcttctatactattgtgaggacaatacaggctcttccagcttgctattcccacaggggtccacgtgagcggactgcggagcagttcccagttactggggctaccccgaccatccagcaatagacataaaaccttgaaacttcagttctttgcatcgctgggccaagacgttccttgagtaggatttctgtgcacacactgctagttacaagacgtcacgatcttcaaaacatctgaggggtggctttgcaaaatgaggcttcccacaaagctcccaggcagtggcttcctaacccggcggacgcccctcgaaacggattatccaagttgtttcaactggacaggtgctgggtaaaagcttgttgagaaaataaaaaataaataaacgtgttcgacccgccgccgcaagaatgatttatctgtaaaatacgtgtcggtgtggtcacaaccgttccccggaggttaacagccggagagggggcttaaggagcatcccgcggatgccagacgcaggctcatgctcgcgcctgccgggcggcccagtgcagggccgggcaggaggtcgcctccgccgctccttcctcgcggtagctcaccggccgccgctcccggccagagccaccctcccagctcgtctcagggcgccgctgtactggagctttagtcgttgacacaggccgtggtagctactaccgggcggtcgc

SEQ ID NO: 14870 - DNA, 1790 bp, Homo sapiens
  SIMILAR (1740)..(1240): 991254mologous to Cloning vector pZC320 SopA,accession number U26464,Smith-Waterman Score=883.
ccagcacctgtccagtgaaacaacttgattatcgtttcgaggggcgtccgccgggttaggaagccactgcctggcagcttgtggaagcctcatttgcaaagccacccctcagatgttttgaagatcgtgacgtcttgtaactagcagtgtgtgcacagaatcctactcaaggaacgtcttggcccagcgatgcaaagaactgaagtttcaagctggaagagcctgtattgtcctcacaatagtatagaagaattcaagaggggagaagagaagacagcacccgaatgaaagactgtaaaaagaaaaagaaggaaagccccagagattgaagaaaatctgcccaagactaggagggtaaccccagaggaaaccgtcttccagggcctgtttgcctggctatgccttcgagaacctggggatcccgaaaaattaggggaatttcttcagaaagacaatatcagcgtgcattatttctgtcttatcttatctagtaagctgcctcagaggggccagtccaacagaggcttccatggatttctgcctgaagacatcaaaaagggaggcagcccgggcttctaggaagatctgctttgtgtgcaagaaaaagggagctgctatcaactgccagaaggatcagtgcctcagaaacttccatctgccttgtggccaagaaagggggttgcctttcacaattttttggagagtacaaatcattttgtgacaaacatcgcccaacacagaacatccaacatggggcatgtgggggaggaaagctgcatcttatgttgtgaagacttatccccaacagagtgtttgagaacattccagagcccgtgttgtagtcaagccatctaccaccgcaagtgcatacagaaaatatgcccacacatcagtcaaagcatttcttcaaatgtccacagtgtaacaatcgaaaagagtttcctcaagaaatgctgagaatgggaattcatattccagacagagatgctgcctgggaactcgagccaggggctttctcagacttatatcagcgctatcagcactgtgatgcccccatcttgtctgtatgaacaaggcagagacagctttgaggatgaagggaggtggtgcctcattctgtgtgctacatgcggatcccacggaacccacagggactgctcctctcttagatctaacagtaagaaatgggagtgtgaggagtgttcacctgctgcagccacagactacatacctgaaaactcaggggacatcccttgctgcagcagcaccttccaccctgaggaacatttctgcagagacaacaccttggaagagaatccgggcctttcttggactgattggccagaaccttccttattagaaaagccagagtcctctcgtggcaggaggagctactcctggaggtccaagggtgtcagaatcactaacagctgcaaaaaatccaagtaacaccttctgagtagctgcttgtcccacacaatagggtatgaacgtgcgctcctccatcgggtttggggagggagcactctgggactgtgagacaaggaagcagggccagcagtgagactatgagccaagcaaagagaagtctcagtggagcatgaggagggagcagtccagatgccaacaaggaaatgcgtttatggctacaagagtgcctctgctttctcctcctctcctcccaccaaggattcttccaccttaatcttgttttcatatgcctcttcttacttcacccatgtttgttgttatgcaaataaaggttttctctccaaaaaaaaaaaaaaaaa

SEQ ID NO: 14871 - DNA, 484 bp, Homo sapiens
  SIMILAR (374)..(297): 801254mologous to Xenopus laevis beta-catenin-interacting protein,accession number AB046868,Smith-Waterman Score=95.
aagagtcagaaataaaaataaaaggtttctgttggtcaagatttaaaaaataaaaaagtttcttcctgcagccaatcacaagtccatccctttaagccaattataaacgcaccactggtgtctcccttgatgccagccccactgagtagctgtgaggtggggtggggcagggcagggttgggtaggggaagggggaggtggggcaaggggggctgctgccactcagccggcccaggagccacacagatctcttggccctcaacagcatccagggtgttccaagggctttgcagctactgcctccggtcttccgtctccgacctggaaaacgccatcaccacgtcctctgcacctgggccgcccgacccggccgggccggcaggggcagcgggtccggcgcgcagcgcgcggcggcctgttccggggcgtgctcagcccgagcagccgctgcggcggcggcagtagcagcagcaggagcggccgc

SEQ ID NO: 14872 - DNA, 372 bp, Homo sapiens
  SIMILAR (329)..(243): 441254mologous to Homo sapiens Human secreted protein encoded by gene 49 clone HFOXE30,accession number Y14459,Smith-Waterman Score=70.
ctcaatcagtcattcaattcaacaaatattttcagagtactacaaagtttaggtcctatattataagagtagacaaaaagagccaaaaatctctgctctcaaagagcttaaatgctggtgggagctaagaagcagataaaaaaaggcgaaataatggttacttcaatttagcatataccaagtgctaggtggtcttctgagtatctactaggtattacttaatttaatcctcccaacaactccatgaggaaagtattactattgtgcatatggggaaactgagacacagagagattaagttacctgctgaagatcatgcagctcctgaaggcagaaccaagatccaaacctgatggtcttggtacaaagtcc

SEQ ID NO: 14873 - DNA, 725 bp, Homo sapiens
  SIMILAR (1)..(873): 921254mologous to Homo sapiens p40,accession number U93564,Smith-Waterman Score=1409.
cgcagcggttgcatggtctgagcacgccccggaacaggcggcggcactcagcgcgccggacccgctgtccctgccggcccggccgggtcgggcggcccagggcggcaccttcctacttctgcccagccacagccctcccctcacagttgagcacctgtttgcctgaagttaatttccagaagcaggagtccccagagccaggcagggggatgaaccgcgagggagctcccgggaagagtcctgaaggagatgtacattcagcagaaggtccgagtgctgctcatgctgcggaagatgggatcaaacctgacagccagcgaggaggagttcctgcgcacctatgcaggtgtggttatacagccagctcagccagctgcctccgcactccatcgaccagggtgcagaggacgtggtgatggcgttttccaggtcggagacggaagaccggaggcagtagctgcaaagcccttggaacaccctggatgctgttgagggccaagagatctgtgtggctcctgggccggctgagtggcagcagccccccttgccccacctcccccttcccctacaccaaccctgccctgccccaccctacctcacagctactcagaggggctggcatcaagggagacaccagtggtgcgtttataattggcttaaagggatggacttgtgattggctgcaggaagaaactttttttttttttaaatcttgaccaacagaa

SEQ ID NO: 14874 - DNA, 951 bp, Homo sapiens
  SIMILAR (892)..(948): 1001254mologous to Danio rerio beta-catenin-interacting protein,accession number AB046866,Smith-Waterman Score=93.
atggactttgtaccaagaccatcaggtttggatcttggttctgccttcaggagctgcatgatcttcagcaggccttgccttcctaatcagatgctggatgctgctgccccgcccctcagcttgaagggccagctgattagcaccgggagtgccacatacagtgacatgacaagggctggtgaaaataacatcgcacaaggatatgcctcgctgtcctggcaccctcctctcactccaaataacacatacctgtttacagaagtttctacactacaacacaaccatgaaaaatggagccacaggttagcagagcaagtggcatcgtggacaactgatgggaggaccaaaaagggatctgaaaagctggccaatggcacccagtctaaagagtcccactctggattcctgaacaagaaaacacagttagtccaaaatagaatgaaagtaaggacaaaaagcgaccagtttctcaggggctccttgcggggagcttaccgcgccctcactgtccgccggcccgagtgctaccggagatcaccagcggcccggacgccagcgagtggaacatctcggtcgcactctcattggttccagggggccggaagtgcgtgcgtccagcggaagtgctcccccggcgcggtccgccaggccagtgccctcaggacaagcatcataccaccacatactgttacacacaatgcagctgttctacgaaagggctccagcagcacagtgggaggctctataaatgccaccagggaagggggtggcagctggcagtgtgggaaggagagaatacctgcagtagcacagacaacatgtcagaaagaccatgggcagccagactggtacttttcggggcaaagtgaagatctggccttttacaaagggggtgcagaggacgtggtgatggcgttttccaggtcggagacggaagaccggaggcagtag

SEQ ID NO: 14875 - DNA, 517 bp, Homo sapiens
  SIMILAR (152)..(514): 651254mologous to Homo sapiens Membrane-bound protein PRO1151,accession number Y66642,Smith-Waterman Score=346.
attggctgactttggctatagaaaaaagaaaggaacgattagagacagttttttttggaaagctaagtcttccctttatcgagtcaagaaacccccccttcttgagctatttacagcttttaacaattgagtaaagtacgctccggtcaccatggtgacagccgccctgggtcccgtctgggcagcgctcctgctctttctcctgaggtgtgagatccgtatggtggagctcacctttgacagagctgtggccagcggctgccaacggtgctgagactctgaggaccccctggatcctgcccatgtatcctcagcctcttcctgcgggcggccccacgccctgcctgaggagcagaccctacattaatatcaccatcctgaagggtgacaaaggggacccaggcccaatgggcctgccagggtacatgggcagggaggggccccaaggggagcctggcccttagggcagcaagggtgacaagggggagatgggcaggccccggcgccccgtgccaga

SEQ ID NO: 14876 - DNA, 1147 bp, Homo sapiens
  SIMILAR (1147)..(518): 811254mologous to Escherichia coli pantothenate kinase,accession number M90071,Smith-Waterman Score=841.
ctaaccgcatgagggattaacagcaccagccaacgctgcccgttcagtaagctcatccgctctggcaaaagcctcttctttaaaaggcaccgtcacattcgcacctttaccaccagcactaaagaaagcgttcagtgtgttgatgaaatcattgatgggtgccaacacgcgcccatagggatgttcaatattcagttgctgagcaaattgctgatgaatgaatggcgatttgctgtgggccgtcagggcatcgcggatttctgaaggatttaaacgcccccccgtttcaccagacacaaccgggaccgccgcgccaaatggtgcgcgaacttcgtctgctgttcggcaaggtggcaatccactcaagttggcactggtagaaaccagcggtttaccataagcctggcacaaagcaaccaccaacgaatggtcggtgtctcgtacagcaagcgaatcaaagcggcccgtcaaccagcgcggtgttgtcgcaggcgcgggaaagacaaaggtgacaggaccatgtctgaagtaagtcttccggtgcatcaacatatatcgaaaaatcgacaaaatcagaaacaaatacatgatgtggatcgtgtggataatccatcccgctctgtaagacatttaacccttcaagaattaaaatatcaggctgaacaaccgttttatctccatccgggatcacatcataaataagatgtgagtaaacaggtgctgtaacgtttggcacgccggatttgagatcggaaacaaacttcaccaggcgatgcatatcatacgattccgggaagcctttcttcttcatcagaccacgttctttcagaacctgattagggtgaaggaagccatctgtagtgatcagttcaacacgacgatgttccgccaacggcttaatagcgcctgcaatacacgggcggttgtacttttccccaccgcgacactgccagcaatactgataatgtaaggaatgcgttgcccgttggtaccaagaaactgttccagaacctggacggcgcagattcgagcttatatagaagttcagcaaacgtgacaaaggtaaatagatctcggcaacttcttctaacgagagatcttcattaatacctctgagacgcgcgatctcatcttccgataacgtcat

SEQ ID NO: 14877 - DNA, 927 bp, Homo sapiens
  SIMILAR (563)..(769): 411254mologous to Mus musculus Fish protein,accession number AJ007012,Smith-Waterman Score=105.
atgccccatgtgtgcgctcaacgtcggctcccggtggcagcggtacttccacctgacggtgcgcagaactgcatcctgctcgctgggctgtctgctggcactttctgccatcatggaggtgttcacatcttgctgtccaatccagtggccactagcctcctggtagctattgacagggtgggtcagatacccatccctccacctccaccccctgccctgccctatgactgctgctgtcctccacccagcaggcacacagaggatagggaacatgtgcctattccactacactggaagcttatggtaaaccgctggtttctaccagtgccaactgagtggattgccaccttgtcgaacagtagtcgaagttcgcggacctgcagcatgcaaggccttagtttcctggacagtcaggtccaccttaaagcaatgatcgaggatttaagagggaatgtttctaaagaatctagcccatgtctggcagataatgcagatgttggacaatttcccatggaaggaggacagaaggaccccaagcagcggatcatccctttctgccagggggtgacaaacctcagtggaccccatggtcctggagcagtatgtggtggtagccactaccagaagcaggagagttcggagatcagcctcagcgtggggcaggtgtggacatcatcgagaagaatgagtcaggttggtggttcgtcacactgccgaggagcaaggctgggtccctgcaacgtgcctcgaaggccagatggggtgcaggatgagttttctctgcagcctgaagaagatgctggattggattcagagaagagtgagtctatgaccaggacacaggtagtcaagaatcttcaaaagccagcatcctacatcattcattcactggacagcaccttcaaagagctaaccatgactccatga

SEQ ID NO: 14878 - DNA, 478 bp, Homo sapiens; identical to SEQ ID NO: 3840
  SIMILAR (1)..(258): 951254mologous to Homo sapiens putative p150,accession number U93563,Smith-Waterman Score=429.
  misc_feature (1)...(478): n = a,t,c or g

SEQ ID NO: 14879 - DNA, 413 bp, Homo sapiens; identical to SEQ ID NO: 8619
  SIMILAR (174)..(413): 951254mologous to Homo sapiens reverse transcriptase,accession number L27428,Smith-Waterman Score=416.

SEQ ID NO: 14880 - DNA, 5976 bp, Homo sapiens; identical to SEQ ID NO: 5415
  SIMILAR (214)..(1176): 911254mologous to Homo sapiens putative p150,accession number U93569,Smith-Waterman Score=1506.
  misc_feature (1)...(5976): n = a,t,c or g

SEQ ID NO: 14881 - DNA, 2238 bp, Homo sapiens; identical to SEQ ID NO: 3843
  SIMILAR (829)..(2232): 941254mologous to Homo sapiens putative p150,accession number U93572,Smith-Waterman Score=2306.

SEQ ID NO: 14882 - DNA, 2151 bp, Homo sapiens; identical to SEQ ID NO: 4456
  SIMILAR (925)..(2697): 881254mologous to Homo sapiens putative p150,accession number U93572,Smith-Waterman Score=2740.

SEQ ID NO: 14883 - DNA, 1824 bp, Homo sapiens; identical to SEQ ID NO: 9101
  SIMILAR (1)..(798): 871254mologous to Homo sapiens putative p150,accession number U93574,Smith-Waterman Score=1134.

SEQ ID NO: 14884 - DNA, 1251 bp, Homo sapiens; identical to SEQ ID NO: 5395
  SIMILAR (154)..(1245): 961254mologous to Homo sapiens putative p150,accession number U93563,Smith-Waterman Score=1846.

SEQ ID NO: 14885 - DNA, 2121 bp, Homo sapiens; identical to SEQ ID NO: 10363
  SIMILAR (1)..(1362): 891254mologous to Homo sapiens putative p150,accession number U93565,Smith-Waterman Score=2008.

SEQ ID NO: 14886 - DNA, 1140 bp, Homo sapiens; identical to SEQ ID NO: 5157
  SIMILAR (1)..(681): 941254mologous to Homo sapiens putative p150,accession number U93565,Smith-Waterman Score=1074.

SEQ ID NO: 14887 - DNA, 2013 bp, Homo sapiens
  SIMILAR (1942)..(2364): 921254mologous to Homo sapiens dJ475N16.3 (novel protein similar to RPL7A (60S ribosomal protein L7A)),accession number AL035587,Smith-Waterman Score=632.
atgaacattgatgcaaaaatcctcaataaaatactggcaaaccgaatccagcagcacatcaaaaagcttatccaccatgatcaagtgggcttcatccctgggatgcaaggctggttcaatatatgcaaatcaataaatgtaatccagcatataaacagagccaaagacaaaaaccacatgattatctcaatagatgcagaaaaggcctttgacaaaattcaacaacccttcatgctaaaaactctcaataaattaggtattgatgggatgtatttcaaaataataagagctatctatgacaaacccacagccaatatcatactgaatgggcaaaaactggaagcattccctttgaaaactggcacaagacagggatgccctctctcaccactcctattcagcatagtgttggaagttctggccagggcaattaggcaggagaaggaaataaagggtattcaattaggaaaaaaggaagtcaaattgtccctgtttgcggatgacatgattgtatatctagaaaaccccattgtctcagcccaaaatctccttaagctgataagcaacttcagcaaagtctcaggatacaaaatcaatgtacaaaaatcacaagcattcttatacaccaacaacagacaaacagagagccaaatcatgagtgaactgccattcacaattgcttcaaagagattaaaatacctaggaatccaacttacaagggatgtgaaggacctcttcaaggagaactacaaaccactgctcaaggaaataaaagaggatacaaacaaatggaagaacattccatgctcatgggtaggaagaatcaatatcatgaaaatggccatactgcccaaggtaatttacagattcaatgccatccccatcaagctaccaatgcctttcttcacagaactggaaaaaactactttaaagttcatatggaatgaaaaaagagcccgcatcgccaagtcaatcccaagccagaagaacaaagctggaggcatcacactacctgacttcaaactatactacaaggctacagtaaccaaaacagcatggtactggtaccaaaacagagatatagatcaatggaacagaacagagccctcagaaataacgccgcatatctacaactatctgatctttgacaaacctgagaaaaacaagcaaatccagaaagccttcatcctccatcaaggaaccttgggtaatgtggaacatgggaaccaatgtcagatgaaattgatgtatgaacataatcttcagagaacagcctgcaatatgacctatggatcatttggtggtgtaaaaggtagaggagcctcttcctgtgggcaccactaccactggcccacagaagtgttctggcaggccactgaccatgttcacttaaagtccaaggtctcttcagacagctgtggtaaatgctgccaggcctgggactcacccttcagggcagtgggctcccatctggcccagggcaggtccagaaatagtgtccaagagcctaagcctggacttggagaccccaggagcctgcttgttgctctacctcagtgtggccaagctgtggctaaggtggtatccaggatgcaagacaaagttctctttactcctcgttctcttctccttaagcagaggatggagtcactttcattgctccggccagccctgctggccctgggcaatgaggggcttagcacccaggccagcagctgcggagggtatactgggtcccccagcagtgccagaccactggcgctgcgctcaatttctcaccgggccttagctgccttcccgtggggcagggctcgcgacctgcagcccgccatgcctgagcctcccaccccctccgtgggctcctgtgcggccgagcttccccgggctggggagtgcgggcacagggcgcgggactggcaggcagctccacctgcagccccagtgcagggtccactgggtgaagccagctgggctcctaagtctggtggggatgtggagaacctttatgtctag

SEQ ID NO: 14888 - DNA, 2244 bp, Homo sapiens; identical to SEQ ID NO: 5419
  SIMILAR (418)..(2238): 821254mologous to Homo sapiens putative p150,accession number U93569,Smith-Waterman Score=2508.

SEQ ID NO: 14889 - DNA, 2805 bp, Homo sapiens; identical to SEQ ID NO: 7495
  SIMILAR (2)..(2920): 961254mologous to Homo sapiens putative p150,accession number U93563,Smith-Waterman Score=4866.

SEQ ID NO: 14890 - DNA, 2742 bp, Homo sapiens; identical to SEQ ID NO: 2177
  SIMILAR (1)..(3135): 971254mologous to Homo sapiens unknown,accession number AF148856,Smith-Waterman Score=5279.

SEQ ID NO: 14891 - DNA, 2481 bp, Homo sapiens; identical to SEQ ID NO: 4454
  SIMILAR (1)..(789): 931254mologous to Homo sapiens putative p150,accession number U93572,Smith-Waterman Score=1231.

SEQ ID NO: 14892 - DNA, 873 bp, Homo sapiens
  SIMILAR (1)..(339): 1001254mologous to Escherichia coli CG Site No. 385,accession number U00039,Smith-Waterman Score=560.
atcatggcggtcgcgctggcgttaggtatcggtacgatgattggctggcgccgtgtggcaacgactatcggtgagaaaatcggtaagaaaggcatgacctacgctcaggggatgtctgcccagatgacggcggcagtgtctatcggcctggcgagttataccgggatgccggtttccactactcacgtactctcctcttctgtcgcggggacgatggtggtagatggtggcggcttacagcgtaaaaccgtgaccagcattctgatggcctgggtgtttacccttccggctgcggtactgctttccggcgggctgtactggctctccttgcagttcctgtaatcgtacgcaccaaaacgagcgggtcagctggcccgcttcagattgtgacatagtgcgctttgttcatgccggatgcggcgtgaacgccttatccggcctacaaaaacatgcaaattcaatagattgcagagattatgtaggcctgataagcggagcgcatcaggcaattttgcggttgtaatcaggctcgagcgggtcagtttactggccccgtttttttatggcgtattattgctgaaatgcttaatgcccaagcgtcaatgcaatgaggctgaccaccaccagacccacacatgcgctgggcaaaaaaaaatggcgacgcacccgcttccaggggagaataaattcattatcggggaggatcgggaataccgttgggctttgatgttcccaaacgagaacgcccctgtttgttggggtttggccatggtgaggtaaaaaaagcccccctctttcaccttattgagaagaacaactggaatcctcttaaaagtaaacccggaggggattgccaacgttgggacctgggcg

SEQ ID NO: 14893 - DNA, 3255 bp, Homo sapiens
  SIMILAR (822)..(989): 451254mologous to Homo sapiens Human secreted protein fragment encoded from gene 42,accession number Y07785,Smith- Waterman Score=100.
atggtaaagggatcaattcaacaagaggagctaactatcctaaatatttatgcacccaatacaggagcacccagattcataaagcaagtcctcagtgacctacaaagagacttagactcccacacattaataatgggagactttaacaccccactgtcaacattagacagatcaacgagacagaaagtcaacaaggatacccaggaattgaactcagctctgcaccaagcagacctaatagacatctacagaactctccaccccaaatcaacagaatatacatttttttcagcaccacaccacacctattccaaaattgaccacatagttggaagtaaagctctcctcagcaaatgtaaaagaacagaaattataacaaactatctctcagaccacagtgcaatcaaactagaactcaggattaagaatctcactcaaagccgctcaactacatggaaactgaacaacctgctcctgaatgactactgggtacataacgaaatgaaggcagaaataaagatgttctttgaaaccaacgagaacaaagacaccacataccagaatctctgggacgcattcaaagcagtgtgtagagggaaatttatagcactaaatgcctaccagagaaagcaggaaagatccaaaattgacaccctaacatcacaattaaaagaactagaaaagcaagagcaaacacattcaaaagctagcagaaggcaagaaataactaaaatcagagcagaactgaaggaaatagagacacaaaaaacccttcaaaaaatcaatgaatccaggagctggttttttgaaaggatcaacaaaattgatagaccgctagcaagactaataaagaaaaaaagagagaagaatcaaatagacacaataaaaaatgataaaggggatatcaccaccgatcccacagaaatacaaactaccatcagagaatactacaaacacctctacgcaaataaactagaaaatctggaagaaatggatacattcctcgacacatacactctcccaagactaaaccaggaagaagttgaatctctgaatcgaccaataacaggctctgaaattgtggcaataatcaatagtttaccaaccaaaaagagtccaggaccagatggattcacagccgaattctaccagaggtacaaggaggaactggtaccattccttctgaaactattccaatcaatagaaaaagagggaatcctccctaactcattttatgagaccagcatcattctgataccaaagccgggcagagacacaaccaaaaaagagaattttagaccaatatccttgatgaacattgatgcaaaaatcctcaataaaatactggcaaaccgaatccagcagcacatcaaaaagcttatccaccatgatcaagtgggcttcatccctgggatgcaaggctggttcaatatacgcaaatcaataaatgtaatccagcatataaacagagccaaagacaaaaaccacatgattatctcaatagatgcagaaaaagcctttgacaaaattcaacaacccttcatgctaaaaactctcaataaattaggtattgatgggacgtatttcaaaataataagagctatctatgacaaacccacagccaatatcatactgaatggacaaaaactggaagcattccctttgaaaactggcacaagacagggatgccctctctcaccgctcctattcaacatagtgttggaagttctggccagggcaatcaggcaggagaaggaaataaagggtattcaattaggaaaagaggaagtcaaattgtccctgtttgcagacgacatgattgtttatctagaaaaccccatcgtctcagcccaaaatctccttaagctgataagcaacttcagcaaagtctcaggatacaaaatcaatgtacaaaaatcacaagcattcttatacaccaacaacagacaaacagagagccaaatcatgagtgaactcccattcacaattgcttcaaagagaataaaatacctaggaatccaacttacaagggatgtgaaggacctcttcaaggagaactacaaaccactgctcaaggaaataaaagaggagacaaacaaatggaagaacattccatgctcatgggtaggaagaatcaatatcgtgaaaatggccatactgcccaaggtaatttacagattcaatgccatccccatcaagctaccaatgactttcttcacagaattggaaaaaactactttaaagttcatatggaaccaaaaaagagcccgcattgccaagtcaatcctaagccaaaagaacaaagctggaggcatcacactacctgacttcaaactatactacaaggctacagtaaccaaaacagcatggtactggtaccaaaacagagatatagatcaatggaacagaacagagccctcagaaataatgccgcatatctacaactatctgatctttgacaaacctgagaaaaacaagcaatggggaaaggattccctgtttaataaatggtgctgggaaaactggctagccatatgtagaaagctgaaactggatcccttccttacaccttatacaaaaatcaattcaagatggattaaagatttaaacgttaaacctaaaaccataaaaaccctagaagaaaacctaggcattaccattcaggacataggcgtgggcaaggacttcatgtccaaaacaccaaaagcaatggcaacaaaagacaaaattgacaaatgggatctaattaaactaaagagcttctgcacagcaaaagaaactaccatcagagtgaacaggcaacctacaacatgggagaaaatttttgcaacctactcatctgacaaagggctaatatccagaatctacaatgaactcaaacaaatttacaagaaaaaaacaaacaaccccatcaaaaagtgggcgaaggacatgaacagacacttctcaaaagaagacatttatgcagccaaaaaacacatgaagaaatgctcatcatcactggccatcagagaaatgcaaatcaaaaccactatgagatatcatctcacaccagttagaatggcaatcattaaaaagtcaggaaacaacaggccagaaaagaccaaaagttttttacctcctttgccaacacaaagttcaattcacagtggtttcctagagcattgtgttgaacaggattctgaggctctgtctggagaggctggtaaaagtctgatgtttgccatgggtgtaggaagtgaacgagcaaagcat

SEQ ID NO: 14894 - DNA, 3813 bp, Homo sapiens; identical to SEQ ID NO: 14516
  SIMILAR (1279)..(1569): 881254mologous to Escherichia coli g30k protein,accession number M29698,Smith-Waterman Score=418.

SEQ ID NO: 14895 - DNA, 3156 bp, Homo sapiens; identical to SEQ ID NO: 10078
  SIMILAR (80)..(766): 781254mologous to Homo sapiens p40,accession number U93564,Smith-Waterman Score=882.

SEQ ID NO: 14896 - DNA, 3325 bp, Homo sapiens; identical to SEQ ID NO: 10079
  SIMILAR (370)..(810): 521254mologous to Homo sapiens p40,accession number U93567,Smith-Waterman Score=385.

SEQ ID NO: 14897 - DNA, 1870 bp, Homo sapiens; identical to SEQ ID NO: 9122
  SIMILAR (667)..(1230): 661254mologous to Homo sapiens p40,accession number U93566,Smith-Waterman Score=636.

SEQ ID NO: 14898 - DNA, 2070 bp, Homo sapiens; identical to SEQ ID NO: 5421
  SIMILAR (342)..(578): 321254mologous to Mus musculus SPR2B protein,accession number AJ005560,Smith-Waterman Score=87.

SEQ ID NO: 14899 - DNA, 1296 bp, Homo sapiens; identical to SEQ ID NO: 5429
  SIMILAR (325)..(1266): 981254mologous to Homo sapiens putative p150,accession number U93565,Smith-Waterman Score=1639.

SEQ ID NO: 14900 - DNA, 3229 bp, Homo sapiens; identical to SEQ ID NO: 14519
  SIMILAR (2241)..(1318): 911254mologous to Homo sapiens putative p150,accession number U93568,Smith-Waterman Score=1458.

SEQ ID NO: 14901 - DNA, 3352 bp, Homo sapiens
  SIMILAR (1)..(2748): 971254mologous to Homo sapiens unknown,accession number AF149422,Smith-Waterman Score=4641.
atggtaaagggatcaattcaacgagaggagctaactatcctaaatatttatgcacccaatacaggagcacccagattcataaagcaagtcctcagtgacctaaaaagagacttagactcccacacattaataatgggagactttaacaccccactgtcaacattagacagatcaacgagacagaaagtcaacaaggatacccaggaattgaactcagctctgcaccaagcagacctaatagacatctacagaactctccaccccaaatcaacagaatatacatttttttcagcaccacaccacacctattccaaaattgaccacatagttggaagtaaagctctccttagcaaatgtaaaagaacagaaattataacaaactatctctcagaccacagtgcaatcaaactagaactcaggattaagaatctcactcaaagccgctcaactacatggaaactgaacaacctgctcctgaatgactactgggtacataacgaaatgaaggcagaaataaagatgttctttgaaaccaacgagaacaaagacaccacataccagaatctctgggacgcattcaaagcagtgtgtagagggaaatttatagcactaaatgcctacaagagaaagcaggaaagatccaaaattgacaccctaacatcacaattaaaagaactagaaaagcaagagcaaacacattcaaaagctagcagaaggcaagaaataactaaaatcagagcagaactgaaggaaatagtgacacaaaaaacccttcaaaaaatcaatgaatccaggagctggttttttgaaaggatcaacaaaattgatagaccgctagcaagactaataaagaaaaaaagagagaagaatcaaatagacacaataaaaaatgataaaggggatatcaccaccgatcccacagaaatacaaactaccatcagagaatactacaaacacctctacgcaaataaactagaaaatctagaagaaatggatacattcctcgacacatacactctcccaagactaaaccaggaagaagttgaatctctgaatagaccaataacaggctctgaaattgtggcaataatcaatagtttaccaaccaaaaagagtccaggaccagatagattcacagccgaattctaccagaggtacaaggaggaactggtaccattccttctgaaactattccaatcaatagaaaaagagggaatcctccctaactcattttatgaggccagcatcattctgataccaaagccgggcagagacacaaccaaaaaagagaattttagaccaatatccttgatgaacattgatgcaaaaatcctcaataaaatactggcaaaccgaattcagcagcacatcaaaaagcttatccaccatgatcaagtgggcttcatccctgggatgcaaggctggttcaatatacgcaaatcaataaatgtaatccagcatataaacagagccaaagacaaaaaccacatgattatctcaatagatgcagaaaaagcctttgacaaaattcaacaacccttcatgctaaaaactctcaataaattaggtattgatgggacgtatttcaaaataataagagctatctatgacaaacccacagccaatatcatactgaatgggcaaaaactggaagcattccctttgaaaactggcacaagacagggatgccctctctcaccactcctattcaacatagtgttggaagttctggccagggcaatcaggcaggagaaggaaataaagggtattcaattaggaaaagaggaagtcaaattgtccctgtttgcagatgacatgattgtttatctagaaaaccccatcgtctcagcccaaaatctccttaagctgataagcaacttcagcaaagtctcaggatacaaaatcaatgtacaaaaatcacaagcattcttatacaccaacaacagacaaacagagagccaaatcatgggtgaactcccattcacaattgcttcaaagagaataaaatacctaggaatccaacttacaagggatgtgaaggacctcttcaaggagaactacaaaccactgctcaaggaaataaaagaggacacaaacaaatggaagaacattccatgctcatgggtaggaagaatcaatatcgtgaaaatggccatactgcccaaggtaatttacagattcaatgccatccccatcaagctaccaatgactttcttcacagaattggaaaaaactactttaaagttcatatggaaccaaaaaagagcccgcatcgccaagtcaatcctaagccaaaagaacaaagctggaggcatcacactacctgacttcaaactatactacaaggctacagtaaccaaaacagcatggtactggtaccaaaacagagatatagatcaatggaacagaacagagccctcagaaataatgccgcatatctacaactatctgatctttgacaaacctgagaaaaacaagcaatggggaaaggattccctatttaataaatggtgctgggaaaactggctagccatatgtagaaagctgaaactggatcccttccttacaccttatacaaaaatcaattcaagatggattaaagatttaaacattagacctaaaaccataaaaaccctagaagaaaacctaggcattaccattcaggacataggcgtgggcaaggacttcatgacagcaaaagaaactaccatcagagtgaacaggcaacctacaacatgggagaaaattttcgcaacctactcatctgacaaagggctaatatccagaatctacaatgaactcaaacaaatttacaagaaaaaaacaaacaaccccatcaaaaagtgggcgaaggacatgaacagacacttctcaaaagaagacatttatgcagccaaaaaacacatgaagaaatgctcatcctcactggccatcagagaaatgcaaatcaaaaccactatgagatatcatctcacaccagttagaatggcaatcattaaaaagtcaggaaacaacagcttcctaacattccttgggaatccacgtctgcccagctttcaggctgcaggtccacaagtccaggtgaattttctcccttgccagcgcccaggattccatggggtacagtcctgtccaatcagaacattgcattctcttggccactatgattggctcagagatgaccatgtgactcgatcaaatctgaccctaagaattttgctagaaagaccaagaagaaaagcaccattttaccctctagattttccaagaagttatgatgcaggcctagagctgttggtgccatcatgtcaccacaagggacagcctgcttggaaatggagccaacgcagag

SEQ ID NO: 14902 - DNA, 1422 bp, Homo sapiens; identical to SEQ ID NO: 10393
  SIMILAR (100)..(1419): 931254mologous to Homo sapiens putative p150,accession number U93574,Smith-Waterman Score=2128.

SEQ ID NO: 14903 - DNA, 1716 bp, Homo sapiens; identical to SEQ ID NO: 10085
  SIMILAR (1)..(669): 951254mologous to Homo sapiens putative p150,accession number U93563,Smith-Waterman Score=1104.

SEQ ID NO: 14904 - DNA, 705 bp, Homo sapiens
  SIMILAR (97)..(585): 881254mologous to Homo sapiens putative p150,accession number U93563,Smith-Waterman Score=714.
atgactcaccctttaggaggccattccaatgttctatctagacaacagcttctaggtgatgggaaatttgctgatagcgctgaattctatggtgcgttggaacttctggccagggcaattaggcaggagaaggaaacaaagggtattcgattaggaaaagaggaagtcaaattgttgctgtttgcagatgacatgattgtatatctagaaaaccccattgtctcagcccaaaatctccttaagctgataagcaacttcagcaaagtctcaggatacaaaatcaatgtacaaaaatcacaagcattcttatacaccaacaacagacaaacagagagccaaatcatgagtgaactcccattcacaattgcttcaaagagaataatatacctaggaatccaacttacaagggatgtgaaggacctcttcaaggagaactacaaaccactgctcaaggaaataaaagaggatacaaagaaatggaagaacattccatgctcatgggtaggaagaatcaatatcatgaaaatggccatactgcccaagctatttgcggaccacctatttggtggtgttgaggtctttcttttcgtggggatggcctatgatcactatgtggccatctctaagccactgcactatttgatcatcgtgaatcgactggtttgcatccttctgttggtggtggccgtgactggaggattttga

SEQ ID NO: 14905 - DNA, 2388 bp, Homo sapiens
  SIMILAR (1027)..(1473): 971254mologous to Homo sapiens putative p150,accession number U93563,Smith-Waterman Score=732.
atgagggaggaacttcgcttcgggtcccggcgaattcgcgccggggttcttgcctttccagttagactcagcccactgtatgatcaagtcgtgcatctctggcacacagtcaatgcttcatgcatctttgtggaactggatcaaaatgaatggcatcttggtcacacttcagccacagaggtgcacactcagggctgcatggtgagaccggaaaggcaagagaaacccaacaacctgagccaatgctgtgcacagcatgctgtgagccagtgctggcaacaagacaccaacaagaggaaagaggccaggtgctgtgagccagtgctggcaacaagacaccaaaaaaagcaagaggccgggtactatgagccagtgctggcaacaagacaccaaaaaaagcaagaggccgggtgctatgagccagtgctggcaacaggacaccaaaaagagcaagaggccggcatttctgtaacacagtttcctcagttttattgttcttatgtacttaacaatggatctcactcgctctcagaaacacggatgggcgtcctccccatcacacggcacaagcccatggccagtgagactcagaaccagcctggccaagccctgcaaatggcaggtcagcctttgctggtggctgtcagcgtctcctggatcctcgttctccctcgtgagatcatctctgctcatcatcgtccctcatgcggaatccgtgtccaggcgaccatccctgctctccagggtcggtctcttccctgcacgttattaacacagggtgtggcaacgcagtccaagcccacagacaagagaccacctgataaaaagaaatccatcacaggacgtgtgaaggaggcagcaaccacgtggaactcgtgtctcgaacacagtgcagtcttcacacctcagcgctgggcatcgggaggcagccttcatgtgatgctaccctatgaggccagcaagggctcccgggaaatgaaaacggcagcagccggcacccagtcccagcagcagacaggagcagcgttggaagttctggccagggcaattaggcaagagaaggaaataaagggtattcaattaggaaaagaggaagtcaaattgtccctgtttgcagatgacatgattgtatatctagaaaaccccactgtctcagcccaaaatctccttaagctgataagcaacttcagcaaagtctcaggatacaaaatcaatgtacaaaaatcacaagcattcttatacaccaacaacagacaaacagagagccaaatcatgagtgaactcccattcacaattgcttcaaagagaataacatacctaggaatccaacttacaagggatgcgaaggacctcttcaaggagaactataaaccactgctcaaggaaataaaagaggatacaaacaaatggaagaacattccatgctcatgggtaggaagaatcaatatcgtgaaaatggccatactgcccaaggaacctggatgggcgaggtccctggtctttggggcgcggggcctgcagggacagggtcgctgcgggcagagcagagggggtggtgggtcctgcctggggggcgggggcagcaccgagaactggcagcaccgagaaccgtcagcacggaaaaccggcagcaccgagaaccggcggcaccgagaaccggcggcaccgagaaccggcagcaccgagaaccagcaccgagaaccggcagcaccgagaaccggcaccgagaaccggcaccgagaaccgtcagcacggaaaaccggcagcaccgagaaccggcggcaccgagaaccggcagcaccgagaaccggcagcaccgagaaccagcaccgagaaccggcagcaccgagaaccggcaccgagaaccggcaccaagaaccggcggcaccgagaaccggcggcaccgagaatcggcagcaccgagaaccggcagcaccgagaaccggcaccgagaaccggcagcaccgagaaccggcaccaagaaccggcagcaccgagaaccggcagcaccgagaaccggcaccgagaaccggcagcaccgagaaccgtcagcaccgagaatcggcagcaccgagaaccggcagcaccgagaaccggcaccaagaaccggcagcaccgagaaccggcactgagaaccggcaccgagaaccgtcggcaccgagaaccgtcggcaccgagaaccggcggcaccgagaactggtggcaccgagaaccggcggcaccgagaaccggccccgagagccacctgcggggaccaggcccaggcacaccccgatgcggggcggctctgagggcgccttgtttcaccaaaggcggtttttggaacccacgccggaccgtgaacaactcgagggcattcgatacccaccggtagcctcggtgtcctag

SEQ ID NO: 14906 - DNA, 2274 bp, Homo sapiens; identical to SEQ ID NO: 10086
  SIMILAR (103)..(4149): 1001254mologous to Homo sapiens prepro-alpha-1 type 3 collagen,accession number X14420,Smith-Waterman Score=7703.

SEQ ID NO: 14907 - DNA, 3192 bp, Homo sapiens; identical to SEQ ID NO: 3969
  SIMILAR (1729)..(1830): 1001254mologous to Homo sapiens carboxy-propeptide of alpha 1 (III) procollagen,accession number X01742,Smith-Waterman Score= 181.

SEQ ID NO: 14908 - DNA, 3354 bp, Homo sapiens; identical to SEQ ID NO: 2158
  SIMILAR (1249)..(989): 981254mologous to Homo sapiens envelope protein,accession number AF164615,Smith-Waterman Score=437.

SEQ ID NO: 14909 - DNA, 3192 bp, Homo sapiens
  SIMILAR (870)..(601): 981254mologous to Homo sapiens SIL1 protein,accession number AJ299442,Smith-Waterman Score=432.
atgggagactttaacaccccactgtcaacattagacagatcaacgagacagaaagtcaacaaggatacccaggaattgaactcagctctgcaccaagcagacctaatagacatctacagaactctccaccccaaatcaacagaatatacatttttttcagcaccacaccacacctattccaaaattgaccacatactgggaagtaaagctctcctcagcaaatgtaaaagaacagaaattatagcaaactatctctcagaccacagtgcaatcaaactagaactcaggattaagaatctcactcaaaaccgctcaactacatggaaactgaacaacctgctcctgaatgactactgggtacataacgaaatgaaggcagaaataaagatgttctttgaaaccaacgagaacaaagacacaacataccagaatctctgggacgcattcaaagcagtgtgtagagggaaatttatagcactaagtgcccacaagagaaagcaggaaagatccaaaattgacaccctaacatcacaattgaaagaactagaaaagcaagagcaaacacattcaaaagctagcagaaggcaagaaataactaaaatcagagcagaactgaaggaaatagagacacaaaaaacccttcaaaaaattaatgaatccaggagctggttttttgaaaggatcaacaaaattgatagaccactagcaagactaataaagaaaaaaagagagaagaatcaaatagatgcaataaaaaatgataaaggggatatcaccatcgatcccacagaaatacaaactaccatcagggaatactacaaacacctctacgcaaataaactagaaaatctagaagaaatggataaattcctggacacatacactctcccaagactaaaccaggaagaagttaaatctctgaatagaccaataacaggagctgaaattgtggcaataatcaatagcttagcaatcaaaaagagtccaggaccagatggattcacagccgaattctaccagcggtacaaggaggaactggtaccattccttctgaaactattccaatcaatagaaaaagagggaatcctccctaactcattttatgaggccagcatcattctgataccaaagccaggcagagacacaacaaaaaaagagaattttagaccaatatccttgatgaacattgatgcaaaaatcctcaataaaatactggcaaaccgaatccagcagcacatcaaaaagcttatccaccatgatcaagtgggcttcatccctgggatgcaaggctggttcaatatacacaaatcaataaatgtaatccaacatataaacagagccagagacaaaaaccacatgattatctcaatagatgcagaaaaagcatttgacaaaattcaacaacccttcatgctaaaaactctcaataaattaggtattgatgggacgtatctcaaaataataagagctatctatgacaaacccacagccaatatcatactgaatgggcaaaaactggaagcattccctttgaaaactggcacaagacagggatgccctctctcaccactcctattcaacatagtgttggaagttctggccagggcaattaggcaggagaaggaaataaagggtattcaattaggaaaagaggaagtcaaattgtccctgtttgcagacgacatgattgtatatctagaaaaccccattgtctcagcccaaaatctccttaagctgataagcaacttcagcaaagtctcaggatacaaaatcaatgtacaaaaatcacaagcattcttatacaccaacaacagacaaacagagagccaaatcatgagtgaactcccattcacaattgcttcaaagagaataaaatacctaggaatccaacttacaagggatgtgaaggacctcttcaaggagaactacaaaccactgctcaaggaaataaaagaggatacaaacaaatggaagaacatgccatgctcatgggtaggaagaatcaatatcgtgaaaatggccatactgcccaaggtaatttacagattcaatgccatccccatcaagctaccaatggctttcttcacagaattggaaaaaactactttaaagttcatatggaaccaaaaaagagcccgcatcgccaagtcaatcctaagtcaaaagaacaaagctggaggcatcacactacctaacttcgaactatactacaaggctacagtaaccaaaacagcatggtactggtaccaaaacagatatatagaccaatggaacagaacagagccctcagaaataacaccgcatatctacaactatctgatctttgacaaacctgggaaaaacaagcaatggggaaaggattccctatttaataaatggtgctgggaaaactggctagccatatgtagaaagctgcaactggatcccttccttacaccttatacaaaaatcaattcaagatggattaaagacttaaacgttagacctaaaaccataaaaaccctagaagaagacctaggcattaccattcaggacataggcatgggcaaggacttcatgtctaaaacaccaaaagcaatggcaacaaaagacaaaattgacaaatgggatctaattaaactcaagagcttctgcacagcaaaagaaaccaccatcagagtgaacaggcaacctacaaaatgggagaaaattttcgcaacctactcatttgacaaagggctaatatccagaatctacaatgaactccaacaaatttacaagaaaaaaacaaacaaccccatcaaaaagtgggcgaaggacatgaacagacacttctcaaaagaagacatttatgcagccaaaaaacacatgaaaaaatactcatcatcactggccattagagaaatgcaaatcaaaaccacaatgagataccatctcacacccgttagaatggcaaccattaaaaactcaggaaacaacaggtcattgtgtttttataaggaaaacctaagcctttgtctggcgatccttctctctgttcctgtgcaagaaggaggggccagaagttttctggccccagcaggaggcgtggcaggccgagcaacaagtcactatggcggacacatggcgactgcagagaggctgtcagtggagctatctgggcaagccctgaaggaattccaaaagggccctttatctccaaaacagtttaag

SEQ ID NO: 14910 - DNA, 2745 bp, Homo sapiens; identical to SEQ ID NO: 14522
  SIMILAR (609)..(1397): 621254mologous to Tupaia belangeri chinensis p53 tumor suppressor protein,accession number AF175893,Smith-Waterman Score= 798.

SEQ ID NO: 14911 - DNA, 2313 bp, Homo sapiens; identical to SEQ ID NO: 10082
  SIMILAR (384)..(701): 391254mologous to Canis familiaris ribosomal protein L27,accession number AJ388516,Smith-Waterman Score=107.

SEQ ID NO: 14912 - DNA, 1545 bp, Homo sapiens; identical to SEQ ID NO: 10092
  SIMILAR (94)..(234): 821254mologous to Homo sapiens ZNF91L,accession number AC003973,Smith-Waterman Score=206.

SEQ ID NO: 14913 - DNA, 3303 bp, Homo sapiens; identical to SEQ ID NO: 10093
  SIMILAR (651)..(364): 581254mologous to Homo sapiens RCC1-like G exchanging factor RLG,accession number AF060219,Smith-Waterman Score=307.

SEQ ID NO: 14914 - DNA, 1827 bp, Homo sapiens; identical to SEQ ID NO: 5436
  SIMILAR (469)..(912): 391254mologous to Danio rerio myosin VIIA,accession number AJ404001,Smith-Waterman Score=281.

SEQ ID NO: 14915 - DNA, 2985 bp, Homo sapiens; identical to SEQ ID NO: 7459
  SIMILAR (1)..(348): 991254mologous to Leishmania major probable levansucrase precursor,accession number AL160371,Smith-Waterman Score=596.

SEQ ID NO: 14916 - DNA, 3033 bp, Homo sapiens
  SIMILAR (1087)..(2310): 921254mologous to Homo sapiens putative p150,accession number U93572,Smith-Waterman Score=1954.
atgtctggctttctgatctctcctaaacataagcatggcactaactctggaattgtcagttgggcagatgtacagagtcagctcaggcacatagaagcagcatttgaccaggaggctgcggcagtgttgatggcacggcttggggtgttccgagcggagtcagaggaggggcccgatgtgctccggtggctggaccgacaactcatccgactgcactctctactgacaacgcttgatatcgtgccagctggcaaaggagaggtagtgaaagggcccatgtccatttcacagcaggcaaaggggtgtcaaaagtttggacagtataacaaagaagaccccacttcttttaggttatcagattccttttctctatatcctcagtttatgttccatctgagaagatctccatttcttcaagtgtttaacaacagtcctgatgagtcgtcatattacagacatcattttgcccggcaggacctgacccagtccctcatcatgatccagcccattctctactcttactcctttcatgggccaccagagccagtactcttggatagcagcagcattctagctgacagaattttgctgatggatactttctttcaaattgtcatttatcttggtgagaccatagcccagtggcgtaaagctggctaccaggacatgcccgagtatgaaaacttcaagcaccttctgcaggcaccactggatgatgctcaagaaattctgcaagcacgcttcccgatgccacgttacatcaacacggagcatggaggcagtcagaagaaaagagagaagaatcaaatagacgcaataaaaaatgataaaggggatatcaccaccgagcccacagaaatacaaactaccatcagagaatactataaacacctctatgcaaataaactagaaagtctagaagaaatgaataaattcctcgacacatacactctcccaagactaaaccaggaagaagttgaatctctgaatagacaaataacaggctctgaaattgaggcaataattaatagcttaccaaccaaaaaaagtccaggaccagacagattcacagccaaattctaccagagaaccaatgaccaaaaacacatgattatctcaatagatgcagaaaaagcctttgacaaaattcaacaaccctttatgctaaaaactctcaataaattaggtattgatgggacgtatttcaaaataataagagctatttatgacaaacccacagccaatatcatactgaatgggcaaaaactggaagcattccctttgaaaactggcacaagacagggatgccctctctcactgctcctattcaacataatgttggaagttctggccagggcaatcaggcaggagaaggaaataaagggtattcaatttggaaaagaggaagtcaaattgtccctgtttgcagatgacatgattgtatatctagaaaaccccattgtcttagcccaaaatctccttaagctgataagcaacttcagcaaagtctcaggatacaaaatcaatgtgcaaaaatcacaagcattcttatacaccagtaacagacaaacagagagccaaatcatgagtgaactcccattcacaattgcttcaaagagaataaaatacctaggaatccaacttacaagggatgtgaaggacctcttcaaggagaactacaaaccactgctcaatgaaataaaagaggatacaaacaaatggaagaacattccatgctcatgggtaggaagaatcaatatagtgaaaatggccatactgcccaaggtaatttacagattcaatgccatccccatcaagctatcaatgactttcttcacggaattggaaaaaactactttagagttcatatggaaccaaaaaagagcccgcattaccaagtcaatcctaagccaaaagaacaaagctgaaggcatcacgctacctgacttcaaactacagtacaaggctacagtaaccaaaacagcatggtactcgtaccaaaacagagatatagatcaatggaacagaacagagccctcagaaatagtgccatgcatctacaactatctcatctttgacaaacctgacaaaaacaagaaatggggaaaggattccctatttaataaatggtgctgggaaaactggctagccatatgtagaaagctgaaactggatcccttccttacaccttatacaaaaattaattcaagacggattaaagacttaaatgttagacctaaaaccataaaaaccctagaagaaaacctaggcaataccattcaggacgcctcaaaaaagaaggtgtatatgctctataacctgcagccagaccggtctgtgactggtggagcctggtacagtgaccaggattttgaatctgaatttgtagaggtgcttaaccaacagtgttttaaattcctacagtccaaggcagaaacagcacgagaaagcaaacagaacccaatgatacaaagaaatagttcatttgcctcatcacatgaagtgtggaaatatatctgcgaattgggaatcagtaaggtagagttatccatggaagacattgaaaccatcctgaatacactcatttatgatggaaaagtggagatgacgattattgctgcaaaagaaggcacagttggcagtgtagatggacacatgaaactgtacagggcagtcaatccaatcatccctcccacaggtttggtccgggcaccctgtggactctgcccggtgactcttgctttgtaccggaagaagctggcacttactagccaacttgcttcttttgggttgctgtgcatgtttccgattgtttgtgaggtttgttctcatctcggacagattcctcatgaaactggacaatgtggttattatggtctacagcagcggtccccaacctttttggcaccagggaccagttttgtagaagacaatttttccacggacctggttgggggatggattcaggatgaaactgctcctcctcagatcatcagtcatgagttagattcttataaggaacgcgcaacctag

SEQ ID NO: 14917 - DNA, 1431 bp, Homo sapiens; identical to SEQ ID NO: 10382
  SIMILAR (433)..(882): 981254mologous to Homo sapiens putative p150,accession number U93574,Smith-Waterman Score=738.

SEQ ID NO: 14918 - DNA, 1975 bp, Homo sapiens
  SIMILAR (3058)..(4995): 531254mologous to Danio rerio myosin VIIA,accession number AJ404002,Smith-Waterman Score=1758.
tgcaatcaaactagaactcaggattaagaatctcactcaaaaccgctcaactacatggaaactgaacaacctgctcctgaatgactactgggtacatagcgaaatgaaggcagaaataaagatgttctttgaaaccaacgagaacaaagacacaacataccagaatctctgggacacattcgaagcaaaaagcaagagcaaacaacattcaaaagctagcagaaggcaagaaataactaaaatcagagcagaactgaaggaaatagagatacaaaaaacccttcaaaaaattaatgaatccaggagctggttttttgaaaggatcaacaaaattgatagaccactagcaagactaataaagaaaaaaagagagaagaatctaatagacgcaataaaaactgataaaggggatatcaccaccaatcccacagaaatacaaactaccatcagagaatactacaaacacctctacgcaaataaactagaaaatcgagaagaaatggataaattcctcgacacatacactctcccaagactaaacgaggaagaagtcgaatctctgaatacaccaataacaggctcagaaattgtagcaataatcaatagcttaccaaccaaaaagagtccaggaccagatggattcacagccgaattgtaccagaggtacaaggaggaactggtaccattccttctgaaactattccaatcaatagaaaaagagggaatcctccctaactcattttatgaggccagcatcattctgataccaaagccaggcagagacacaaccaaaaaagagaattttagaccaatatcgttgatgaacattgatgcaaaaatcctcaataaaatactggcaaaaggaatccagcagcacatcaaaaagcttatccaccatgatcaagtgggcttcatccctgggatgcaaggccggttcaatatacgcaaatcaataaatgtaatccagcatataaacagaaccaaagacaaaaaccacatgattatctcaatagatgcagaaaaagcctttgacaaaattcaacaaccctttatgctaaaaactctcaataaattaggtattgatgggacgtatttcaaaataataagagctatctatgacaaacccacagccagtatcatactgaatgggcaaaaactagaagcattccgtttgaaaactggcacaagacagggatgccctctctcaccactcctattcaacatagtgtttgaaattctggcccgggcaattaggcaggagaaggaaataaagggtattcaattaggaaaagaggaagtcaaattgtccctgtttgcaggcgacatgattgtatatctagaaaaccccattgtctcagcccaaaatctccttaagctgataagcaacttcagcaaagtctcaggatacaaaatcaatgtgcaaaaatcacaagcattcttatacaccaataacagacaaacagagagccaaatcatgagtgaactcccattcacaattgcttcaaagagaataaaatacctaggaatccaacttacaagggatgtgaaggacctcttcaaggagaactacaaaccactgctcaaggaaataaaagaggatacaaacaaatggaagaacattccatgctcatgggtaggaagaatcaatatcgtgaaaatggccatactgcccaagctgataggcaactgcagcaaaatctcaggatacaaaatcaatgtgcaaaaatcacaagcattcttatacaccaataacagacaaacagagagccaaatcatgagtgaactcgcattcacaattgcttcaaagaaaatcaaatacctaggaatccaacttacaagggatgtgaaggacctcttcaaggagaactacaaaccactgctcaatgaaataaaagaggatacaaacaaatggaagaacattccatgctcatgggtaggaagaatcaatatcgtgaaaatggccatactgcccaag

SEQ ID NO: 14919 - DNA, 3894 bp, Homo sapiens
  SIMILAR (220)..(2): 1001254mologous to Homo sapiens Human secreted protein, SEQ ID NO: 6560,accession number G02479,Smith-Waterman Score=383.
atgaagccagaaataaagatgttctttgaaaccaacgagaacaaagacacaacataccagaatctctgggacacattcaaagcagtgtgtagagggaaatttatagcactaaatgcccacaagagaaagcaggaaagatctaaaatcaacaccctaacatcacaattcaaagaactagagaagcaagagcaaacaaattcaaaagctagcagaaggcaagaaataactaagatcagagcagaactgaaggaaatagagacacaaaaaccccttcaaaaaatcaatgaatccaggagctggttttttgaaaagatcaacaaaattgatagaccgctagcaagactaataaagaagaaaagagagaagaatcaaatagacgcaataaaaaatgacaaaggggatatcaccactgatcccacagaaatacaaactaccatcagagaatactataaacacctctacgcaaataaactagaaaatctagaagaaatggataaattcctggacatgtacactctcccaagactaaaccaggaagaagttgaatctctgaatagaccaataacaggctcagaaattgaggcaataattaacagcttaccaaccaaaaaaagtccaggaccagatggattcacagctgaattctaccagaggtacaaggaggagctggtatcattccttctgaaactattccaatcaataaaaaaagagggaatcctcctgaacttattttatgaggacagcatcatcctgaaaccaaagcctggcagagacacaacaaaaaaagagaattttagaccaatatccttgatgaacattgatgcaaaaatcctcattaaaatactggcaaaccgaatccagcaacacatcaaaaagcttatccaccatgatcaagtgggcttcatccctgggatgcaaggctggttcaacatacgaaaatcaataaatgtaatccagcatataaacagaaccaaagacaaaaaccacatgattatctcaatagatgcagaaaaggcctttgacaaaattcaacaacccttcatgttaaaaactctcaataaattaggtattcatgggacatatctcaaaataataagagctatctatgacaaacccacagccaatatcatactgaatgggcaaaaactgaaagcattccctttgaaaactggcacaagacagggatgccctctctcaccactcgtattcaacatagtgttggaagttctggcctgggcaatcaggcaggagaaggaaataaagggcatccaattaggaaaagaggaagtcaaattatccctgtttgcagatgacatgactgtatatctagaaaacccgatcatctcagcccaaaatctccttaagctgataagcaacttcagcaaagtctcaggatacaaaatcaatgtacaaaaatcacaagcattcttatacaccaataacggacaaacagagagcctaatcatgagtgaactcccattcacaattgcttcaaagagaataaaatacctaggaatccaacttacaagggatgtgaaggacctcttcaaggagaactacaaaccactgctcaatgaaataaaagaggattacaaacaaatggaagaacattccatgctcatgggtaggaagaatcaatatcgtgaaaatggccatactgcccaagtgaggagcgcctctgcccggccgcccatcgtctgggaagtgaggagcgcctctgcccggccgcccatcatctgggaagtgaggagcgcctctgcccggccgcccatcgtctgggaagtgaggagcgcctctgcccggccgccctgtctgggaagtgaggagcacctctgcccggccgctgtgcaatcttccaagtgtgaaggacagccattctgcaggtgtacccaacagctccaaagagacagcgaccatcgagaaggggccatgatgacgatggcggttttgtcgaaaagaaaagggggaaatgcaaagaagttgaaaactttgaaaaaaaatttagaagaatgtataactagaataaccaatacagagaagtgcttaaaggagctgatggagctgaaaaccaaggctcgagaactacgtgaagaatgcagaagcctcaggagccgatgcgatcaactggaagaaagggtatcagcgatggaagatgaaatgaatgaaatgaagcgagaagggaagtttagagaaaaaagaataaaaagaaatgagcaaagcctccaagaaatatgggactatgtgaaaagaccaaatctatgtctgattagtgtacctgaaagtgatggagagaatggaaccaagttggaaaacactctgcaggatattatccaggagaacttccccaatctaccaaggcaggccaatgttgagattcaggaaatacagagaacgccacaaagatactcctcgagaagagcaactccaagacacataattgtcagattcaccaaagttgaaatgaaggaaaaaatgttaagggcagccagagagaaaggtcgggttaccctcaaagggaagcccatcagactaactgcggatctctcggcagaaatcctacaagccagaagagagtgggggccgatattcaacattcttaaagacaagaattttcaacccagaatttcatatccagccaaactaagcttcataagcgaaggagaaataaaatcctttacagacaagcaaatgctgagagattttgtcaccaccaggcctgccctaaaagagctcctgaaggaagtgctaaacatggaaaggaacaaccggagctggttttttgaaaagatcaacaaaattgatagaccactagcaagagtaataaagaagaaaagagagaagaatcaaatagacgcaataaaaaatgataaagaggatatcaccaccaatcccacagaaatacaaactatcatcagagaatactacaaacacctctacccaaataaactagaaaatctagaagaaatggatacattcctcgacacatacaccttcccaagactaaaccaggaagaagttgaatctctgaatacatcaataacaggctctgaaattgtggcaataatcagtatagcataccaaccaaaaaaagtccaggaccagatggatccacagccgaattctaccagagtgttggaagttctggccagggcaattaggcaggagaaggaaataaagggtattcaattaggaaaagaggaagtcaaattgtccctctttgcagatgacatgattgtatatctagaaaaccccattgtctcagcccaaaatctccttaagctgataagcaacttcagcaaagtctcaggatacaaaatcaatgtacaaaaatcacaagcattcttatacaccaacaacagacaaacagagagccaaatcatgagtgaactcccattcacaattgcttcaaagagaataaaatgcctaggaatccaacttacaagggatgtgaaggacctcttcaaggagaactacaaaccactgctcaaggaaataaaagaggatacaaacaaatggaagaacattccatgctcatgggtaggaagaatcaatatcgtgaaaatggccatactgcccaaggtaatttacagattcaatgccatccccatcaagctaccaatgactttcttcacagatttggaaaaaactactttaaatttcatatggaaccaaaaaagagcccgcatcaccaagtcaatcctaagccaaaagaacaaagccggaggcatcacactacctgacttcaaactatactacacggctacagtaaccaaaacagcatggtactggtaccaaaacagcatggtactggtaccaaaacagagatatagatcaatggaacagaacagagccctcagaaataacgccgcatgtctacaactatctgatctttga

SEQ ID NO: 14920 - DNA, 4309 bp, Homo sapiens
  SIMILAR (257)..(487): 981254mologous to Homo sapiens Human signal peptide containing protein HSPP-36 SEQ ID NO:36,accession number Y87259,Smith-Waterman Score=378.
atgcattcctgcttgccagatgccacaggggaaggagaactttacaactccctgggctctctgacctggagctttctttccatgataggagtacttctttgggttgacttctctggtgacagtattgacttgtgctccccactttggaacaggaccaacttggaggccttgcagaagaagctggaggagctagagcttgatgagcagcagcgaaagcgccttgaggcctttcttacccagaagcagaaggtgggagaactgaaggatgacgactttgagaagatcagtgagctgggggctggcaatggcggtgtggtgttcaaggtctcccacaagccttctggcctggtcatggccagaaagctaattcatctggagatcaaacccgcaatccggaaccagatcataagggagctgcaggttctgcatgagtgcaactctccgtacatcgtgggcttctatggtgcgttctacagcgatggcgagatcagtatctgcatggagcacatggtcctgttgcaggaaaggccctgccctggcttcctctggatggaaaattctgactatgggctgctgcttcccttggaccttctgctttgcctcagcttcagtttttcaaaggtgttgtcagatttagtcagtgacatcctaatccacgggatgaaggctcgaaaccgctcaattcatggagatgtggtagttgtggagctgcttcctaaaaatgaatggaaaggaagaaccgtagccctgtgtgagaatgactgtgacgacaaggcttcgggcgagtccccaagtgagcccatgcctacaggtcgagtggtgggcatacttcagaagaactggcgggattatgtggtgacatttccgtccaaagaagaggtccaatctcagggcaaaaatgctcagaaaatcctggttacaccttgggattacagaattcccaaaattcgaattagcactcagcaagcagaaaccctccaggacttcagggtggtcgtgcgcatcgattcctgggagtcaacatctgtgtatccaaatggacattttgtgcgtgttttaggaagaatcggagatctggaaggggaaattgcaaccatcctggtggaaaacagtatttcagttattcctttctcagaagctcagatgtgtgagatgccagtaaacacaccagaaagtccctggaaggtgagtcctgaagaggaacaaaaacgtaaagacttgaggaaaagccatctcgtattcagcattgaccccaaaggttgtgaagatgtggatgacacactctcagtcagaaccttaaataatggcaacctggaacttggggtccacatcgcagatgtaacacactttgtggcaccaaattcttacattgatattgaagctagaacaaggtatgctgtaagcatcatgtgggaactggataaagcctcttatgaaattaagaaagtgtggtatggcagaaccattattcgatcagcatacaaactgttctatgaagcagcccaagaactactggatggaaacttaagcgttgttgatgatattccagaattcaaagacttggatgagaagagcagacaagccaagctggaggagttggtgtgggcaattggaaagctgaccgacatagctcgccatgtcagagctaaacgagacggatgtggtgccctggaactggaaggggtagaggtttgcgtacagctagatgacaaaaagaacattcacgacctcatccccaagcagccccggaagtccaataaaacactggctgattctctggataatgcgaacgacccccacgatcccattgtgaacaggctactgcgctccatggccacgcaggccatgtcgaatgctctgtacttctccaccggatcctgtgcggaggaggagttccatcattacggtcttgcattagataaatatacccactttacttctccaataagaagatattcagatattgtagtacaccgcttgttaatggcagccatttcaaaagataagaaaatggaaattaagggaaatctgttcagcaacaaagatcttgaggaattatgcagacatatcaacaacagaaaccaagcagcacagcattctcagaagcagtctactgagctcttccagtgcatgtacttcaaagacaaagaccctgccaccgaggagcgttgcatatctgacggagttatttattcaattagaacaaatggtaataaaaggcctgacatatctgagggagaagcacaagatcatgcacagagtatagttgcttttaaagaagatgaagccagaggacaggaaattggtaaacatagtgctgtcggccatgtcccttcagccacagcactgccaacactgactggtgttgagaggagagctgaagcggagatgagtggactagggtgggctgttggaactgactggacagcttacaagccccgtagattaggtgatacatcactgcatataaacagagccaaagacaaaaaccacatgattatctcaatagatgcagaaaaagcctttgacaaaattcaacaacccttcatgctaaaaactctcaataaattaggtattgatgggacgtatttcaaaataataagagctatctatgacatacccacagccaatatcataccgaatgggcaaaaactggaagcattccctttgaaaactggcacaagacagggatgccctctctcaccactcctattcaacatagtgttggaagttctggccagggcaatcaggcaggagaaggaaataaagggtattcaattaggaaaagaggaagtcaaattgtccctgtttgcagacgacatgattgtttatctagaaaaccccatcgtctcagcccaaaatctccttaagctgataagcaacttcagcaaagtctcaggatacaaaatcaatgtacaaaaatcacaagcattcttatacaccaacaacagacaaacagagagccaaatcatgagtgaactcccattcacaattgcttcaaagagaataaaatacctaggaatccaacttacaagggatgtgaaggacctcttcaaggagaactacaaaccactgctcaaggaaataaaagaggacacaaacaaatggaagaacattccatgctcatgggtaggaagaatcaatatcgtgaaaatggccatactgcccaaggtaatttacagattcaatgccatccccatcaagctaccaatgactttcttcacagaattggaaaaaactactttaaagttcatatggaaccaaaaaagagcccgcatcgccaagtcaatcctaagccaaaagaacaaagctggaggcatcacactacctgacttcaaactatactacaaggctacagtaaccaaaacagcatggtactggtaccaaaacagagatatagatcaatggaacagaacagagccctcagaaataatgccacatatctacaactatctgatctttgacaaacctgagaaaaacaagcaatggggaaaggattccctatttaataaatggtgctgggaaaactggctagccatatgtagaaagctgaaactggatcccttccttacaccttatacaaaaatcaattcaagatggattaaagatttaaacgttagacctaaaaccataaaaaccctagaagaaaacctaggcattaccattcaggacataggcgtgggcaaggacttcatgtccaaaacaccaaaagcaatggcaacaaaagccaaaattgacaaatgggatctaattaaactcaagagcttctgcacagcaaaagaaactaccatcagagtgaacaggcaacctacaacatgggagaaaattttcgcaacctactcatctgacaaagggctaatatccagaatctacaatgaactcaaacaaatttacaagaaaaaaacaaacaaccccatcaaaaagtgggcgaaggacatgaacagacacttctcaaaagaagacatttatgcagccaaaaaacacatgaaaaaatgctcaccatcactggccatcagagaaatgcaaatcaaaaccacaatgagataccatctcacaccaacccacttattgtcattggaattgaagaatgtctcagaggaaaagaaaaacttgaaacattatactattggaattcagacacggaccaccaggtctgatggctggggtggccgtaatggaagtcagaccacaaaaaggagcaacccagcttctgagagaacatttcagctaaagcataagttgatagatgtcacaatccaagttcttttagatttccacgcaggaacttcagagttggtgacaagaattg

SEQ ID NO: 14921 - DNA, 2826 bp, Homo sapiens; identical to SEQ ID NO: 13292
  SIMILAR (801)..(22): 911254mologous to Escherichia coli glutaminyl-tRNA synthetase,accession number M10187,Smith-Waterman Score=1231.

SEQ ID NO: 14922 - DNA, 3303 bp, Homo sapiens; identical to SEQ ID NO: 10101
  SIMILAR (437)..(318): 871254mologous to Homo sapiens Human secreted protein, SEQ ID NO: 7420,accession number G03339,Smith-Waterman Score=168.

SEQ ID NO: 14923 - DNA, 2854 bp, Homo sapiens
  SIMILAR (163)..(864): 701254mologous to Escherichia coli K12 5'-3' exonuclease,accession number AE000363,Smith-Waterman Score=752.
atggaagatgaaatgaatgaaatgaagcgagaagggaagtttagagaaaaaagaataaaaagaaatgagcaaagcctccaagaaatatgggactatgtgaaaagaccaaatctacatctgattggtgtacctgaaagtgatgtggagaatggaaccaagttggaaaacactctgcaggatattatccaggagaacttccccaatctagcaaggcaggccaacgttcagattcaggaaatacagagaacgccacaaagatactcctcgagaagagcaactccaagacacataattgtcagattcaccaaagttgaaatgaaggaaaaaatgttaagggcagccagagagaaagggcactgtaactctggcaaaagtcacagatccctttgggaacaaaacaagggaatatttaccacatgtatttgtgatgatgccgaggacttacagtctccttcaactgctggaccctggtttggggttctttataccaaaggtggaccctaccctcaggaagacatattcagtgaagaagttcatacaggccctaagttgaggaagaaaattcaagagtaccagttaacaagcaaatggtcaaaaagtgatgttcaggtttctgtggagaggagaatggctggaggaaatccaaaccagtgccatattggggaagttctcctggatggattcacagctgaattctaccggaggtacaaggaggaactggtaccattccttctgaaactattccaatcaatagaaaaagagggaatcctccctaactcattttatgaggccagcatcattctgatacaaaagccaggcagagacacaacaaaaaaagagaattttagaccaatatccttgatgaacattgatgcaaaaatcctcaataaaatactggcaaaacgaatccagcagcacatcgaaaagcttatccaccatgatcaagtgggcttcatccctgtgatgcaaggctggttcaatatatgcaaatcaataaatgtaatccagcatataaacagagccaaagacaaaaaccacatgattatctcaatagatgcagaaaaagcctttgataaaattcaacaacccttcatgctaaaaactctcaataaattaggtattgatgggatgtatttcaaaataataagagctatctatgacaaacctacagccaatatcatactgaatgggcaaaaactggcagcattccctttgaaaactggcacaagacagggatgccctctctcaccactcctattcaacatagtgttggaagtcctggccagggcaatcaggcaggagaaggaaataaagggtattcaattaggaaaagaggaagtcaaattgtccctgtttgcagatgacatgatcgtatatctagaaaaccccattgtctcagcccaaaatctccttaagctgataagcaacttcagcaaagtctcaggatacaaaatcaatgtacaaaaatcacaagcattcttatacaccaataacagacaaacagagagccaaatcatgagtgaactcccattcacaagtgcttcaaagagaataaaatacctaggaatccaacttacaagggatgtgaaggacctcttcaaggagaactacaaaccactgctcaaggaaataaaagaggatacaaacaaatggaagaacattccatgctcatgggtaggaagaatcaatatcgtgaaaatggccatactgcccaaggtaatttatagattcaatgccatccccatcaagctaccaatgcctttcttcacagaattggaaaaaactactttaaagttcatatggaaccaaaaaagagccctcatcaccaagttaatcctaagccaaaagaacaaagctggaggcatcacactacctgactttaaactatactacaaggctacagtaaccaaaacagcatggtactggtaccaaaacagagataaagatcaatggaacagaacagagccctcagaaataacgccgcatatctacaattatctgatctttgacaaacctgagaaaaacaagcaatggggaaaggattccctatttaataaatggtactgggaaaactgcctagccatatgtagaaagctgaaactagatcccttccttacaccttatacaaaaattaattcaagatggattaaagacttaaatgttagacttaaaaccataaaagccctagaagaaaacctaggcaataccattcaggacataggcatgggcaaggacttcatgtctaaaacaccaaaagcaatggcaacaaaagacaaaattgacaaatgggatctaattaaaccaaagagcttctgcacagcaaaagaaactaccatcagagtgaacaggcaacctacaaaatgggagaaaattttcgcaacctactcatctgacaaagggctaatatccagaaactacaatgaactcaaacaaatttacaagaaaaaaacaatcggccccatcaaaaagtgggcagaggatatgaacaggcacttctcaaaagaagacacttatgcagccaaaaaacacatgaaaaaatgctcatcatcactggccatcagagaaatgcaaatcaaaaccacaatgagataccatctcacaccagttagaatggtgatcattaaaaagtcaggaaacaacaggtgctggagaggatgtggagaaacaggaacactttcacactgttggtgggactgtaaactaatcaaccattgtggaatttttgagagattaaggaccgaagactggtggggactcataaatgatacaagtaaagtattagccacaacagaagaaaaaggggtgcccaaacgcataatcttgaaatttgatgtctgtgctgtcattaatagca

SEQ ID NO: 14924 - DNA, 3349 bp, Homo sapiens; identical to SEQ ID NO: 13299
  SIMILAR (1584)..(547): 991254mologous to Escherichia coli similar to,accession number D90876,Smith-Waterman Score=1820.

SEQ ID NO: 14925 - DNA, 3855 bp, Homo sapiens
  SIMILAR (1037)..(1411): 991254mologous to Escherichia coli phosphoglycerate kinase (AA 1-387),accession number X14436,Smith-Waterman Score=609.
atggggaaaaaacagaacagaaaaactggaaactctaaaacgcagagcgcctctcctcctccaaaggaacgcagttcctcaccagcaacagaacaaagctggatggagaatgattttgacgagctgagagaagaaggcttcagacgatcaaattactctgagctatgggaggacattcaaaccaaaggcaaagaagttgaaaactttgaaaaaaatttagaagaatgtataactagaataaccaatacagagaagtgcttaaaggagctgatggagctgaaaaccaaggctcgagaactacatgaagaatgcagaagcctcaggagccgatgcgatcaactggaagaaagggtatcagcaatggaagatgaaatgaatgaaatgaagcgagaagggaagtttagagaaaaaagaataaaaagaaatgagcaaagcctccaagaaatatgggactatgtgaaaagaccaaatctacgtctgattggtgtacctgaaagtgatgtggagaatggaaccaagttggaaaacactctgcaggatattatccaggagaacttccccaatctagcaaggcaggccaacgttcagattcaggaaatacagagaatgccacaaagatactcctcgagaagagcaactccaagacacataattgtcagattcaccaaagttgaaatgaaggaaaaaatgttaagggcagccagacagaaagcaccacaccacacctattccaaaattgaccacatagttggaagtaaagctctcctcagcaaatgtaaaagaacagaaattataacaaactatctctcagaccacagtgcaatcaaactagaactcaggattaagaatctcactcaaagccgctcaactacatggaaactgaacaacctgctcctgaatgactactgggtacataacgaaatgaaggcagaaataaagatgttctttgaaaccaacgagaacaaagacaccacataccagaatctctgggacacattcaaagcagtgtgtagagggaaatttatagcactaaatgcctacaagagaaagcaggaaacatccaaaattgacaccataacatcacaattaaaagaactagaaaagcaagagcaaacacattcaaaagctagcagaaggcaagaaataactaaaatcagagcagaactgaaggaaatagagacacaaaaaacccttcaaaaaatcaatgaatccaggagctggttttttgaaaggatcaacaaaattgatagaccgctagcaagactaataaagaaaaaaagagagaagaatcaaatagacacaataaaaaatgataaaggggatatcaccaccgatcccacagaaatacaaactaccatcagagaatactacaaacacctctacgcaaataaactagaaaatctagaagaaatggatacattcctcgacacatacactctcccaagactaaaccaggaagaagttgaatctctgaatagaccaataacaggctctgaaattgtggcaataatcaatagtttaccaaccaaaaagagtccaggaccagatggattcacagccgaattctaccagaggtacaaggaggaactggtaccattccttctgcaactattccaatcaatagaaaaagagggaatcctccctaactcattttatgaggccagcatcattctgataccaaagccgggcagagacacaaccaaaaaagagaattttagaccaatatccttgatgaacattgatgcaaaaatcctcaataaaatactggcaaaccgaatccagcagcacatcaaaaagcttatccaccatgatcaagtgggcttcatccctgggacgcaaggctggttcaatatacgcaaatcaataaatgtaatccagcatataaacagagccaaagacaaaaaccacatgattatctcaatagatgcagaaaaagcctttgacaaaattcaacaacccttcatgctaaaaactctcaataaattaggtattgatgggacatatttcaaaataataagagctatctatgacaaacccacagccaatatcatactgaatgggcaaaaactggaagcattccctttgaaaactggcacaagacagggatgccctctctcaccgctcctattcaacatagtgttggaagttctggccagggcaatcaggcaggagaaggaaataaagggtattcaattaggaaaagaggaagtcaaattgtccctgtttgcagacgacatgattgtttatctagaaaaccccatcgtctcagcccaaaatctccttaagctgataagcaacttcagcaaagtctcaggatacaaaatcaatgtacaaaaatcacaagcattcttatacaccaataacagacaaacagagagccaaatcatgagtgaactcccattcacaattgcttcaaagagaataaaatacctaggaatccaacttacaagggatgtgaaggacctcttcaaggagaactacaaaccactgctcaaggaaataaaagaggacacaaacaaatggaagaacattccatgctcatgggtaggaagaatcaatatcgtgaaaatggccatactgcccaaggtaatttacagattcaatgccatccccatcaagctaccaatgactttcttcacagaattggaaaaaactactttaaagttcatatggaaccaaaaaagagcctgcatctccaagtcaatcctaagccaaaagaacaaagctggaggcatcacactacctgacttcaaactatactacaaggctacagtaaccaaaacagcatggtactggtaccaaaacagagatatagatcaatggaacagaacagagccctcagaaataatgccacatatctacaactatctgatctttgacaaacctgagaaaaacaagcaatggggaaaggattccctatttaataaatggtgctgggaaaactggctagccatatgtagaaagctgaaactggatcccttccttacaccttatacaaaaatcaattcaagatggattaaagatttaaacgttagacctaaaaccataaaaaccctagaagaaaacctaggcattaccattcaggacataggcgtgggcaaggacttcatgtccaaaacaccaaaagcaatggcaacaaaagccaaaattgacaaatgggatctaattaaactaaagagcttctgcacagcaaaagaaactaccatcagagtgaacaggcaacctacaacatgggagaaaattttcacaacctactcatctgacaaagggctaatatccagaatctacaatgaactcaaacaaatttacaagaaaaaaacaaacaaccccatcaaaaagtgggcgaaggacatgaacagacacttctcaaaagaagacatttatgcagccaaaaaacacatgaagaaatgctcatcatcactggccatcagagaaatgcaaatcaaaaccactatgagatatcatctcgcaccagttagaatggcaatcattaaaaagtcaggaaacaacagcactattcacagtagcaaagacatggattcaacccaaatgtgcatcaatgatacactgtatgaagaaagtgtagaacatatacaccatgaaatacaatccagccataaaaaaggagttcacatcctttgcagcaatatggatggagctgaaagccactttcctaagcaaactaatgcaagaacagaaagccaaatactgcatgttctcacttggctttcttttaacccaccagttacaattactaaagttcatgaaaatgtctaccagccaagtaccactcgtaacactgaaacaacgcagggagtcccaagaaccagggaagaccaagaagcatatttataa

SEQ ID NO: 14926 - DNA, 2562 bp, Homo sapiens; identical to SEQ ID NO: 2291
  SIMILAR (795)..(13): 991254mologous to Escherichia coli acriflavine resistance protein,accession number M96848,Smith-Waterman Score=1292.

SEQ ID NO: 14927 - DNA, 2956 bp, Homo sapiens; identical to SEQ ID NO: 10076
  SIMILAR (43)..(495): 891254mologous to Escherichia coli No definition line found,accession number U00039,Smith-Waterman Score=690.

SEQ ID NO: 14928 - DNA, 2049 bp, Homo sapiens; identical to SEQ ID NO: 10109
  SIMILAR (440)..(1195): 981254mologous to Homo sapiens putative p150,accession number U93574,Smith-Waterman Score=1250.

SEQ ID NO: 14929 - DNA, 3276 bp, Homo sapiens
  SIMILAR (2158)..(3429): 831254mologous to Escherichia coli RhsC protein precursor,accession number D90709,Smith-Waterman Score=1859.
atggtaaagggatcaattcaacaagaggagctaactatcctaaatatttatgcacccaatacaggagcacccagattcataaagcaagtcctcagtgacctacaaagagtcttagactcccacacattaataatgggagactttaacaccccactgtcaacattagacagatcaacgagacagaaagtcaacaaggatacccaggaattgaactcagctctgcaccaagcagacctaatagacatctacagaactctccaccccaaatcaacagaatatacatttttttcagcaccacaccacacctgttccaaaattgaccacatagttggaagtaaagctctcctcagcaaatgtaaaagaacagaaattataacaaactatctctcagaccacagtgcaatcaaactagaactcaggattaagaatctcactcaaagccgctcaactacatggaaactgaacaacctgctcctgaatgactactgggtacataacgaaatgaaggcagaaataaagatgttctttgaaaccaacgagaacaaagacaccacataccagaatctctgggacgcattcaaagcaaccgctagcaagactaataaagaaagaagagagaagaatcaaatagacacaataaaaaatgataaaggggatatcaccaccgatcccacagaaatacaaactaccatcagagaatactacaaacacctcttcgcaaataaactagaaaatctagaagaaatggatacattcctcgacacatacactctcccaagactaaaccaggaagaagttgaatctctgaatagaccaataacaggctctgaaattgtggcaataatcaatagtttaccaaccaaaaagagtccaggaccagatggattcacagccgaattctaccagaggtacatggaggaactggtaccattccttctgaaactattccaatcaatagaaaaagagggaatcctccctaactcattttatgaggccagcatcattctgataccaaagccgggcagagacacaaccaaaaaagagaattttagaccaatatccttgatgaacattgatgcaaaaatcctcaataaaatactggcaaaccgaatccagcagcaaatcaaaaagcttatccaccatgatcaagtgggcttcatccctgggatgcaaggctggttcaatatacgcaaatcaataaatgtaatccagcatataaacagagccaaagacaaaaaccacatgattatctcaatagatgcagaaaaagcctttgacaaaattcaacaacccttcatgctaaaaactctcaataaattaggtattgatgggacgtatttcaaaataataagagctatctatgacaaacccacagccaatatcatactgaatgggcaaaaactggaagcattccctttgaaaaccggcacaagacagggatgccctctctcaccgctcctattcaacatagtgttggaagttctggccagggcaatcaggcaggagaaggaaataaagggtattcaattaggaaaagaggaagtcaaattgtccctgtttgcagacgacatgattgtttatctagaaaaccccatcgtctcagcccaaaatctccttaagctgataagcaacttcagcaaagtctcaggatacaaaatcaatgtacaaaaatcacaagcattcttatacaccaacaacagacaaacagagagccaaatcatgggtgaactcccattcacaattgcttcaaagagaataaaatacctaggaatccaacttacaagggatgtgaaggacctcttcaaggagaactacaaaccactgctcaaggaaataaaagaggagacaaacaaatggaagaacattccatgctcatgggtaggaagaatcaatatcgtgaaaatggccatactgcccaaggtaatttacagattcaatgccatccccatcaagctaccaatgactttcttcacagaattggaaaaaactactttaaagttcatatggaaccaaaaaagagcccgcattgccaagtcaatcctaagccaaaagaacaaagctggaggcatcacactacctgacttcaaactatactacaaggctacagtaaccaaaacagcatggtactggtaccaaaacagagatatagatcaatggaacagaacagagccctcagaaataatgccgcatatctacaactatctgatctttgacaaacctgagaaaaacaagcaatggggaaaggattccctatttaataaatggtgctgggaaaactggctagccatatgtagaaagctgaaactggatcccttccttacaccttatacaaaaatcaattcaagatggattaaagatttaaacgttaaacctaaaaccataaaaaccctagaagaaaacctaggcattaccattcaggacataggcgtgggcaaggacttcatgtccaaaacaccaaaagcaatggcaacaaaagacaaaattgacaaatgggatctaattaaactaaagagcttctgcacagcaaaagaaactaccatcagagtgaacaggcaacctacaacatgggagaaaattttcgcaacctactcatctgacaaagggctaatatccagaatctacaatgaactcaaacaaatttacaagaaaaaaacaaacaaccccatcaaaaagtgggtgaaggacatgaacagacacttctcaaaagaagacatttatgcagccaaaaaacacatgaagaaatgctcatcatcactggccatcagagaaatgcaaatcaaaaccactatgagatatcatctcacaccagttagaatggcaatcattaaaaagtcaggaaacaacagtgaaggttatccggacttgctgaatactgagtatgagcagatttcttttggaaatcaaagaggaactaaggttgtgcctggtgacccaagggaaacaaaaacacatgcagatgcagaagccagaagcagaatttggctagtgctggcgtcagtggtgcaggatagatggaccaatatttatgaggaaatctcccaccttgctccatggaacaaacaggtcactgagcagcagccaaaatctgctgctgcacagagcttaaggcctgggcccagtgatcctgttggcctctcctttcctgggtactgtgaatcaggtgcaccagcagcatttcttcatgccagggctgagacattaaaattaagtagtgcaactatgtctgctacagaaatcaaaggggaagggcagtctcagacaggaaggactcagtaa

SEQ ID NO: 14930 - DNA, 2277 bp, Homo sapiens; identical to SEQ ID NO: 5445
  SIMILAR (172)..(1752): 951254mologous to Homo sapiens putative p150,accession number U93564,Smith-Waterman Score=2634.

SEQ ID NO: 14931 - DNA, 3562 bp, Homo sapiens
  SIMILAR (2242)..(2652): 811254mologous to Mus musculus Pro-Pol-dUTPase polyprotein,accession number Y12713,Smith-Waterman Score=588.
atgggagactttaacaccccactgtcaacattagacagatcaacgagacagaaagtcaacaaggatacccaggaattgaactcagctctgcaccaagcggacctaatagacatctacagaagtctccacgccaaatcaacagaatatacatttttttcagcaccacaccacacctattccaaaattgaccacatacttggaagtaaagctctcctcagcaaatgtaaaagaacagagattataacaaactatctctcagaccacagtgcaatcaaactagaactcagaattaagaatctcactcaaaaccgctcaactacatggaaactgaacaacctgctcctgaatgactactggatacatgacgaaatgaaggcagaaataaagatgttctttgaaaccaacgagaacaaagacacaacataccagaatctctgggatgcattcaaagcaaccgctagcaagactaataaagaagaaaagagagaagaatcaaatagacacaataaaaaatgataaaggggatatcaccaccgatcccacagaaatacaaactaccatcagagaatactacaaacacctctatgcaaataaactagaaaatctagaagaaatggataaattcctcgacacatacactctcccaagactaaaccaggaagaagttgaatctctgaatagaccaataacaggagctgaaattgtggcaataatcaatagtttaccaaccaaaaagagtccaggaccagatggattcacagccgaattctaccagaggtacaaggaggaactgcatataaacagagccaaagacaaaaaccacatgattatctcaatagatgcagaaaaggcctttgacaaaattcaacaacccttcatgctaaaaactctcaataaattaggtattgatgggacgtatttcaaaataataagagctatctatgacaaacccacagccaatatcatactaaatgggcaaaaactggaagcattccctttgaaaactggcacaagacagggatgccctctctcaccactcctattcaacatagtgttggaagttctggccagggcaattaggcaggagaaggaaataaagggtattcaattaggaaaagaggaagtcaaattgtccctgttcgcagacgacatgactgtatatctagaaaaccccattgtctcagcccaaaatctccttaagctgataagcaacttcagcaaagtctcaggatacaaaatcaacgtgcaaaaatcacaagcattcttatacaccaacaacagacaaacagagagccaaatcatgagtgaactcccattcacaattgcttcaaagagaataaaatacctaggaatccaacttacaagggatgtgaaggacctcttcaaggagaactacaaaccactgctcaaggaaataaaagaggatacaaacaaatggaagaacattccatgctcatgggtaggaagaatcaatatcatgaaaatggccatactgcccaaggtaatttacagattcaatgccatccccataaagctaccaatgactttcttcacagaattggaaaaaactactttaaagttcatatggaaccaaaaaaagagcccgcatcgccaaggcaatcctaagccaaaagaacgaagctggaggcatcacgatacctgacttcaaactatactacaaggatacagtaaccaaaacagcatggtactggtaccaaaacagagatctagaccaatggaacagaacagagccctcggaaataatgccgcatatctacaaccatctgatctttgacaaacctgacaaaagcaaggaatggggatatgattccctatttaataaatggtgctgggaaaactggctagccatatgtagaaagctgaaactggatcccttccttacactttatacaaaaattaattcaagatggattaaagacttaaatgttagacataaaaccataaaagccctagaagaaaacctaggcaataccattcaggacatagacatgggcaaggacttcatgtctaaaacaccaaaagcaatggcagcaaaagccaaaattgacaaatgggatctaattaaactaaacagcttctgcacagcaaaagaaactaccatcagagtgaataggcaacctacagaatgggagaaaatttttgcaatctactcatctgacaaagggctaatatccagaatctacaatgaactcaaacaaatttacaagaaaaaaacaaacaaccccatcaaaaagtggacgaaggatatgaacagacacttctcaaaagaagacttttacgcagcccaaagacacatgaaaaaatgttcatcatcactggccatcagagaaatgcaaatcaaaaccacataccatgctggaccagatggatttacagccgaattctaccagaggtacaaggaggaactggtaccattccttctgaaactattccaatcaatagaaaaagagggaatcctccctaactcattttatgaggccagcatcatcctgataccaaagcctggtagagacacaaccaaaaaagagaattttagaccaatatccttgatgaacattgatgcaaaaatcctcaataaaatactggcaaaacgaatccagcagcacatcaaaaagcttatccaccatgatcaagtgggtttcatccctgggatgcaaggctggttcaatatatgcaaatcaataaacgtaatccagcatataaacagaaccaaagacaaaaaccacatgattatctcaatagatgcagaaaaggcctttgacaaaattcaacaactcttcatgctaaaaactctcaataaattaggtattgatgggacgtatctcaaaataataagagctatctatgacaaacccacagccaatatcatactgaatgggcaaaaactggaagcattccctttgaaaactggcacaagacagggatgccctctctcaccactcctattcaacatagtgtgggaagttctggccagggcaatgaggcaggagaaggaaataaagggtattcaattaggaaaagaggaagtcaaattgtccctgtttgcagacgacatgattgtgtatctagaaaaccccattgtctcagcccaaaatctccttaagctgataagcaacttcagcaaagtctcaggatacaaaatcaatgtacaaaaatcacaagcattcttatacaccaataacagacaaacagagagccaaatcatgagtgaactcccattcacaactgcttcaaagagaataaaatacctaggaatccaacttacaagggatgagaaggacctcttcaaggagaactacaaaccactgctcaaggaaataaaagaggatacaaacaaatggaagaacattccatgctcatgggtaggaagaatcaatattgtgaaaatggccatactgcccaaggtccttctatatgatccactctttgactggaccatgaatcctttgaaagctttgtatttacagcagaggccggaagatgaaactgagcttcaccctactctgaatgcagatgaccaagaatgcaaacgaaatctcag

SEQ ID NO: 14932 - DNA, 2649 bp, Homo sapiens; identical to SEQ ID NO: 7868
  SIMILAR (937)..(1584): 811254mologous to Mus musculus Pro-Pol-dUTPase polyprotein,accession number Y12713,Smith-Waterman Score=977.

SEQ ID NO: 14933 - DNA, 2232 bp, Homo sapiens; identical to SEQ ID NO: 2163
  SIMILAR (1964)..(2035): 881254mologous to Homo sapiens putative p150,accession number U93572,Smith-Waterman Score=105.

SEQ ID NO: 14934 - DNA, 963 bp, Homo sapiens; identical to SEQ ID NO: 10113
  SIMILAR (268)..(729): 971254mologous to Homo sapiens putative p150,accession number U93563,Smith-Waterman Score=753.

SEQ ID NO: 14935 - DNA, 2931 bp, Homo sapiens
  SIMILAR (865)..(2016): 971254mologous to Homo sapiens putative p150,accession number U93572,Smith-Waterman Score=1909.
atggaagatgaaatgaatgaaatgaagcaagaagagaagtttagagaaaaaagaataaaaagaaatgagcaaaccctccaagaaatatgggactatgtgaaaagaccaaatctacatctgattggtgtacctgaaagtgatggggagaatggaaccaagttggaaaacactctgcaggatattatccaggagaacttccccaatctagcaaggcaggccaacgttcagattcaggaaatacagagaatgccacaaagatactcctcgagaagagcaactccaagacacataattgtcagattcaccaaagttgaaatgaaggaaaaaatgttaagggcagccagagagaaagacagatcaatgagacaaaaagtcaacaaggatacccaggaattgaactcagctctgcaccaagcggacctaatagacatctacagaactctccaccccaaatcaacagaatatacatttttttcagcaccacaccacacctataccaaaattgaccacatacttggaagtaaagctctcctccgcaaatgtaaaagaacagagattataacaaactatctctcagaccacagtgcaatcaaactagaactcaggattaagaatctcactcaaaaccgctcaactacatggaaactgaacaacctgcttctgaatgactactgggtacataacaaaatgaaggcagaaataaagatgttctttgaaaccaacgagaacaaagacacaacataccagaatctctgggacgcattcaaagcaaaatacaaactaccatcaaggaatactacaaacacctctatgcaaataaactcgaaaatctggaagaaatggataaattcctggacacataacactctcccaagactaaaccaggaagaagttgaatctctgaatagaccaataacaggagctgaaattgtggcaataatcaatagtttaccaaccaaaaagagtccaggaccagatggattcacagccgaattctaccagaggtacaaggaggaactggtaccattccttctgaaactattccaatcaatagaaaaacagggaatcctccctaactcattttatgaggccagcaccattctgataccaaagccgggcagagacacaaccgaaaaagagaattttagaccaatatccttgatgaacattgatgcaaaaatcctcaataaaatactggcaaaacgaatccagcagcacatcaaaaagcttatccaccatgatcaagtgggcttcatccctgggatgcaaggctggttcaatatacacaaatcaataaatgtaatccagcatataaacagagccaaagacaaaaaccacatgattatctcaatagatgcagaaaaagcctttgacaaaattcaacaacgcttcatgctaaaaactctcaataaattaggtattgatgggacgtatttcaaaataataagagctatctatgacaaacccacagccaatatcatactgaatgggcaaaaactggaagcaatccctttgaaagctggcacaagacagggatgtcctctctcaccactcctattcaacatagtgttggaagttctggccagggtaattaggcaggagaaggaaataaagggtattcaattaggaaaagaggaagtcaaattgtccctgtttgcagatgacatgattgtatatctagaaaaccccattgtcacagcccaaaatctccttaagctgataagcaacttcagcaaagtctcaggatacaaaatcaatgtacaaaaatcacaagcattcttatacaccaacaacagacaaacagagagccaaatcatgagtgaactcccattcacaattgcttcaaagagaataaaatacctaggaatccaacttacaagggatgtgaaggacctcttcaaggagaactacaaaccactgctcaaggaaataaaagaggatacaaacaaatggaagaacattccatgctcatgggtaggaagaatcaatatcatgaaaatggccatactgcccaagccatatgtggatggcaaagctgaaagagcactgattgtaacactctttctggggcttcaggggtcatggccccacccccgccagatgctgctgcagatccacatgaagttttgctcctgccagcacccaaaagcactcgccctggttcctgcacctgctcacctgcactccccgtcctgtgatgggtggaaggcagtgggaccaagcaagtggagtccatccctgccagcactgaagcagccagctagttctagcacccctgcactcgagttcctgcctgcaaagggaaatcttcaccctggacaagccccagtctcactcctgcctctccaacagatgcctggtgaatttgaccccactccagtggtccagaccaccattaccatccaggagccccaggtagttctgaaaatcaaagggaggaaagtggacctccttttggacactggggttggtctctcagctctcctctccaatccgggccccttctcttctcttagcacaaatgagaggggtatctcagaaaggctcttaatccggtattttttccaactctttagttgtagctggggagacttgttgttcacccatgcctttctaattatacctgagagcccaactcctctgctgaaccggtatattctggccagtatggggaccaccattctggtggcctctgaacaaactatttgtctccccctagtgaagactgatattaacacagaagtttgggcaattcaagggaaaattggccaatccacaaatgccataccagtccaggttcaccttaaggatcccacctcatttcctaatcagaaacaatatcccctgaaaccagaagttaggaaaggactagaagccatcattgataacaaggttgcagggcctcctcaaaccctgcaacagcccttgtaa

SEQ ID NO: 14936 - DNA, 1785 bp, Homo sapiens; identical to SEQ ID NO: 4460
  SIMILAR (1)..(894): 971254mologous to Homo sapiens putative p150,accession number U93563,Smith-Waterman Score=1482.

SEQ ID NO: 14937 - DNA, 4884 bp, Homo sapiens
  SIMILAR (226)..(3024): 951254mologous to Homo sapiens putative p150,accession number U93567,Smith-Waterman Score=4626.
atggggaaaaaacagaacagaaaaactggaaactctaaaaagcagagtgcctctcttcctccaaaggaacgcagcttctcaccagcaactgaacaaagctggacggagaatgactttgatgagctgagagaagaaggcttcagacgatcaaattactatgagctacgggaggacattcaaaccaaaggcaaagaagttgaaaactttgaaaaaaatttagaagaatcaccacaccacacctattccaaaattgaccacatacttggaagtaaagctctcctcagcaaatgtaaaagaacagaaattataacaaactatctctcagaccacagtgcaatcaaactagaactcaggattaagaatctcactcaaaaccgctcaactacatggaaactgaacaacctgctcctgaatgactactgggtacctaacgaaatgaaggcagaaataaagatgttctttgaaaccaacgagaacaaagacacaacataccagaatctctgggaggcattcaaagcagtgtgtagagggaaatttatagcactaaatgcccacaagagaaagcaggaaagagctaaaattgacaccctaacatcacaattaaaagaactagaaaagcaagagcaaacacattcaaaagctagcagaaggcaagaaataactaaaatcagagcagaactgaaggaaagagagacacaaaaaacccttcaaaaaattaatgaatccaggagctggttttttgaaaggatcaacaaaattgatagaccactcgcaagactaataaagaaaaaaagagagaagaatcaaatagaggcaataaaaaatgataaaggggttatcaccaccgatcccacagaaatacaaactaccatcagagaatactacaaacacctctacacaaataaactagaaaatctagaagaaatggataaattccttgacacatacactctcccaagaccaaaccaggaagaagttgaatctctgaatagaccaataacaggatctgaaattgtggcaataatcaatagcttaccaaccaaaaagagtccaggaccagatggattcacagccaaattctaccagaggtacaaggaggaactggtatcattccttctgaaactattccaatcaatagaaaaagagggaatcctccctaactcattttatgaggccagcatcattctgaaaccaaagccgggcagagacataaccaagaaagagaattttagaccaatatccttgatgaacattgatgcaaaaatcctcaataaaatactggcaaaacgaatccagcagcacatcaaaaagcttatccaccatgatcaagtgggcttcatccctgggatgcaaggctggttccatataagcaaatcaataaatgtaatccagcatataaacggagccaaagacaaaaaccacatgattatctcaatagatgcagaaaaggcctttgacaaaattaaacaacacttcatgctaaaaactctcaataaattaggtattgatgggaggtatttcaaaataataagagctatctatgacaaacccacagccaatatcatactgaatgggcacaaactggaagcattccctttgaaaactggcacaagacagggatgccctctctcaccactcccattcaacatagtgttggaagttctggccagggcaattaggcaggagaaggaaataaagggtattcaattaggaaaagaggaagtcaaattgtctctgtttgcagacgacatgattgtatatctagaaaaccccatcgtctcagcccaaaatctccttaagctgataagcaacttcagcaaagtctcaggatacaatatcaatgtgcaaaaatcacaagcattcctgtacaccaacaacagacaaacagagagccaaatcatgagtgaactcccattcacaatggcttcaaagagaataaaatacctaggaatccaacttacaagggatgtgaaggacctcttcaaggagaactacaaaccactgctgaaggaaataaaagaggatacaaacaaatggaagaacattccatgctcatgggtaggaagaatcaatatcgtgaaaatggccatactgcccaaggtaatttacaggttcagtgccatccccatcaagctaccaatgactttcttcacagaattggaaaaaactactttaaagttcatatggaaccaaaaaagagcccgcatcgtcaagtcaatcctaagccaaaagaacaaagctggaggcaccacactacctgacttcaaactatactacaaggctacagtaaccaaaatagcatggtactggtaccaaaacagagatatagatcaatggaacagaacagagccctcagaaataatgccgcatatctacaactatctgatctttgacaaacctgagaaaaacaagcaatggggaaaggattccttatttaataaatggtgctgggaaaactggctagccatatgtagaaagctgaaactggatcccttccttacaccttatacaaaaatcaattcaagatggattaaagacttaaacgttagacctaaaaccataaaaaccctagaagaaaacctaggcattaccattcaggacataggcatgggcaaggacttcatgtctaaaacaccaaaagcaatggcaacaaaacccaaaattgacaaatgggatctaatgaaactaaagagcttctgcacagcaaaagaaactaccatcagagtgaacaggcaacctacaaaatgggagaaaatttttgcaacctactcatctgacaaagggctaatatccagaatctacaatgaactcaaacaaatttacaagaaaaaaacaaacaaccccatcaaaaagtgggcaaaggacatgaacagacacttctcaaaagaagacatttatgcagccaaaaaacacatgaaaaaatgctcaccatcactggccatcagagaaatgcaaatcaaaaccacaatgagataccatctcccaccagttagaatggcaatcattaaaaagtcaggaaacaacagtcttgctagtggtctatcaattgacaaaattcaacaacccttcatgctaaaaactctcaataaattaggtattgatgggacgtatttcaaaataataagagctatctatgacaaacccacagccaatatcatactgaatgggcaaaaactggaagcattccctttgaaaactggcacaagacagggatgccctctctcaccgctcctattcaacatagtgttggaagttctggccagggcaatcaggcaggagaaggaaataaagggtattcaattaggaaaagaggaagtcaaattgtccctctttgcagacgacatgattgtttatctagaaaaccccatcgtctcagcccaaaatctccttaagctgataagcaacttcagcaaagtctcaggatacaaaatcaatgtacaaaaatcacaagcattcttatacaccaacaacagacaaacagagagccaaatcatgagtgaactcccattcacaattgcttcaaagagaataaaatacctaggaatccaacttacaagggatgtgaaggacctcttcaaggagaactacaaaccactgctcaaggaaataaaagaggatacaaacaaatggaagaacattccatgctcatgggtaggaagaatcaatatcgtgaaaatggccatactgcccaaggtaatttatagattcaatgccatccccatcaagctaccaatgactttcttcacagaattggaaaaaactactttaaagttcatatggaaccaaaaaagagcccgcattgccaagtcaatcctaagccaaaagaacaaagccggaggcatcacactacctgacttcaaactatactacaaggctacagtaaccaaaacagcatggtactggtaccaaaacagagatatagatcaatggaacagaacagagccctcagaaataacgccgcttacctacaactatctgatctttgacaaacctgagaaaaacaagcaatggggaaaggattccctatttaataaatggtgctgggaaaactggctagccatatgtagaaagctgaaactggatcccttccttacaccttatacaaaaatcaattcaagatggattaaagatttaaacgttagacctaaaaccataaaaaccctagaagaaaacctacgcattaccattcaggacatagggatgggcgaggacttcatgtccaaaacaccaaaagcaatggcaacaaaagccaaaattgacaaatgggatctaattaaactaaagagcttctgcacagcaaaagaaactaccatcagagtgaacaggcaacctacaaaatgggagaaaattttcgcaacctactcatctgacaaagggctaatatccagaatctacaatgaactcaaaccaatttacaagaaaaaaacaaacaaccccatcaaaaagtgggcgaaggacatgaacagacacttctcaaaagaagacatttatgcagccaaaaaacacatgaaaaaatgctcatcatcactggccatcagagaaatgcaaatcaaaaccacaatgagatatcatctcacaccagttagaatggcaatcattaaaaagtcaggaaacaacagaagtaaagacataaaagatagagaagatcctttggcttatggagtttttgctccagtcgtaagggtggaatcaagtttacaggaaggaagctggtgggtttcattttggacagaacgaggacgagctatgtgggagaacattcaaatagagctaggattcaggaagaagcaggacccaggatgccaccttacgtggaaatgtggatactacttctatgatggacgaagaggaggaagttgtttgcagatgcaactgactctgtag

SEQ ID NO: 14938 - DNA, 5962 bp, Homo sapiens
  SIMILAR (196)..(2970): 941254mologous to Homo sapiens putative p150,accession number U93570,Smith-Waterman Score=4544.
atgtcaagtgaatgggagtggttgaggtgctcagaagttaaaggtcagagagacgtgaggccagggtgtttggggtgggactttcgtgtgtatattgttgaggacacccaggatgaggacagaacttggagtgtcaaggaagcctgtgagctggtccttagagttcaggaaatgatcatcacaagggtggtagatgctgcaccacaccacacctattccaaaattgaccacatagttggaagtaaagctctcctcagcaaatgtaaaagaacagaaattataacaaactgtctctcagaccacagtgcaatcaaactagaactcaggattaagaatctcactcaaagccgctcaactacatggaaactgaacaacctgctcctgaatgactactgggtacataacgaaatgaaggcagaaataaagatgttctttgaaaccaacgagaacaaagacaccacataccagaatctctgggacgcattcaaagcagtgtgtagagggaaatttatagcactaaatgcctacaagagaaagcaggaaagatccaaaattgacaccctaacatcacaattaaaagaactagaaaagcaagagcaaacacattcaaaagctagcagaaggcaagaaataactaaaatcagagcagaactgaaggaaatagagacacaaaaaacccttcaaaaaatcaatgaatccaggagctggttttttgaaaggatcaacaaaattgatagaccgctagcaagactaataaagaaaaaaagagagaagaatcaaatagacgcaataaaaaatgataaaggggatatcaccaccgatcccacagaaatacaaactaccatcagagaatactacaaacaactctacgcaaataaactagaaaatctagaagaaatggatacattcctcgacacatacactctcccaagactaaaccaggaagaagttgaatctctgaatagaccaataacaggctctgaaattgtggcaataatcaatagtttaccaaccaaaaagagtccaggaccagatggattcacagccgaattctaccagaggtacaaggaggaactggtaccattccttctgaaactattccaatcaatagaaaaagagggaatcctccctaactcattttatgaggccagcatcattctgataccaaagccaggcagagacacaaccaaaaaagagaattttagaccaatatccttgatgaacattgatgcaaaaatcctcaataaaatactggcaaaccgaatccaacagcacatcaaaaagcttatccaccatgatcaagtgggcttcatccctgggatgcaaggctggttcaatatacgcaaatcaataaatgtaatccagcatataaacagagccaaagacaaaaaccacatgattatctcaatagatgcagaaaaggcctttgacaaaattcaacaacccttcatgctaaaaactctcaataaattaggtattgatgggacgtatgtcaaaataataagagctatctatgacaaacccacagccaatatcatactgaatgggcaaaaactggaagcattccctttgaaaactggcacaagacagggatgccctctctcaccgctcctattcaacatagtgttggaagttctggccagggcaatcaggcaggagaaggaaataaagggtattcaattaggaaaagaggaagtcaaattgtccctgtttgcagacgacatgattgtttatctagaaaaccccatcgtctcagcccaaaatctccttaagctgataagcaacttcagcaaagtctcaggatacaaaatcaatgtacaaaaatcacaagcattcttatacaccaacaacagacaaacagagagccaaatcatgggtgaactcccattcacaattgcttcaaagagaataaaatacctaggaatccaacttacaagggatgtgaaggacctcttcaaggagaactacaaaccactgctcaaggaaataaaagaggatacaaacaaatggaagaacattccatgctcatgggtaggaagaatcaatatcgtgaaaatggccatactgcccaaggtaatttatagattcaatgccatccccatcaagctaccaatgactttcttcacagaattggaaaaaactactttaaagttcatatggaaccaaaaaagagcccgcattgccaagtcaatcctaagccaaaagaacaaagctggaggcatcacactacctgacttcaaactatactacaaggctacagtaaccaaaacagcatggtactggtatcaaaacagagatatagaccaatggaacagaacagagccctcagaaataatgccacacatctacaactatctgatatttgacaaacctgacaaaaacaagcaatggggaaaggattccctatttaataaatggtgctgggaaaactggctagacatatggagaaagctgaaactggatcccttccttacaccttatacaaaaattaattcaagatcgattaaagacttacatgttagacctaaaaccataaaaaccctagaagaaaacctaggcgataccattcaggacataggcatgggcaaggacttcatgtctaaaacatcaaaagcaatggcaacaaaagccaaaattgacaaatgggatctaattcaactcaagagcttctgcacagcaaaagaaactaccatcagagtgaacaggcaacctacagaatgggagaaaatttttgcaatctactcatctgataaaggactaatattcagaatctacaaagaactcaaacaaatttacaagaaaaaaacaaacagccccatcaaaaagtgggtgaaggatatgaacagacacttctcaaaagaagccatttatgcagccaaaagacacatgaaaaaatgctcatcatcactggccatcagagaaatgcaaatcaaaaccacactctcgttgccagctcaagtgtctgtggtggtcatgggctttccttctgctgggattccagaggcctgtggcaagagcgggctgttccttgcctattcaattaacccattccctcagagtcactgggaccaggaacaagtcatgcattggttgtgtgatgtgccgtcaagcattgtcgtggtgaattgggccctttctgttgaccaatgccggctgcaggcattgcggttttcagtgcatctcatcgatttgctgagcatgcttctcagatgtaatggtttcactgggattcagaaagctgtagaggatcataaccggcagcagatcccagtgaccatgaccttttttggtacaagtttggctttgggactttggagcttctttcttgatccaatcactgagctgttcgtgaccagcgtcctggaggaaagaggtcacacgaacaaattggagatggtaaatgcaggggattttattgccaatgaaagtggctctcagagggaagcctctcattccatgctttcccttctcatggcataatgtaccccatacccttccctacccctccatttccccacaagagccagggttctccctcttctcaggacttgctggtgcagggctgctgaggtttgctgggcatctgctccagtccctagttgcctcagattttctggtacctgaagatatcaccagtgaagcctgcaaaacagcaaagtggcagcctgcccctttctctgggagctccattccagtggggtacagacatgttgccagcccaaatgcacctgcaggaggtcgctggagaccctggtacttcatcccaaagagaaatcgaaactctgtctacaggagaacacaggcagaggtggctgtaggccccagtttggaggtcctgcccagagatgatgaatggattgggatcctgtttaaagaaatggtctggccaaatttttgtggagcagctgtgctgtgctgggggatcccttctctccccagtcagtctggactctctgaagcctgcaggctggaaaagctgggtcattcaaacagcaaagatagtggcccacccctcccgtcaggaacaccaacctgtcctgggaaggcacaacactattgccagggactggctggaattccaagccaggcaatcaggcaggagaaggaaataaagggtattcaattaggaaaagaggaagtcaaattgtccctgtttgcagacgacatgattgtttatctagaaaaccccatcgtctcagcccaaaatctccttaagctgataagcaacttcagcaaagtctcaggatacaaaatcaatgtacaaaaatcacaagcattcttatacaccaacaacagacaaacagagagacaaatcatgagtgaactcccattcacaattgcttcaaagagaataaaatacctaggaatccaacttacaagggatgtgaaggacctcttcaaggagaactacaaaccactgctcaaggaaataaaagaggacacaaacaaatggaagaacattccatgctcatgggtaggaagaatcaatatcgtgaaaatggtcatactgcccaaggtaatttacaggttcaatgccatccccatcaagctaccaatgactttcttcacagaattggaaaaaactactttaaagttcatatggaaccaaaaaagagcccgcatcgccaagtcaatcctaagccaaaagaacaaagctggaggcatcacactacctgacttcaaactatactacaaggctacagtaaccaaaacagcatggtactggtaccaaaacagagatatagatcaatggaacagaacagagccctcagaaataacgccgcatatctacaactatctgatctttgacaaacctgagaaaaacaagcaatggggaaaggattccctatttaataaatggtgctgggaaaactggctagccatatgtagaaagctgaaactggatcccttccttaccccttatacaaaaatcaattcaagatggattaaagacttaaacgttagacctaaaaccataaaaaccctagaagaaaacctaggcattaccattcaggacataggcgtgggcaaggacttcatgtccaaaacaccaaaagcaatggcaacaaaagccaaaattgacaaatgggatctaattaaactaaagagcttctgcatagcaaaagaaactaccatcagagtgaacaggcaacctacaacatgggagaaaattttcacaacctactcatctgacaaagggctaatatccagaatctacaatgaactcaaacaaatttacaagaaaaaaacaagcaaccccatcaaaaagtgggcaaaggacatgaacagacacttctcaaaagaagacatttatgcagccaaaaaacacatgaaaaaatgctcatcatcactggccatcagagaaatgcaaatcaaaaccactatgagatatcatctcacaccagttagaatggcaatcattaaaaagtcaggaaacaacaggaattccactcctggcatttttgctcaaagaaataatcctaaggacaacagacgccttagacatgacagtgttcattatttcatgattcataaaagtaaaaacaaaaataaaacacctaaaagtctaaaagcacaggaaaggcaagactggcccactcttcagttcctgattttgttaaacaagtgcactgctgtcgacatgacaaaaggtcttccaggtggggcctggggagtgtggactgacagaggccacttcctgggcttctccattggctctacccccaccaaaggtgagcatgagctgagggagggtgcttttcatgcttctccattgtttctgcccatgctaagggtaaacacatgcaaagagcctcttgctggctcttacttctcagcatcatctactggctggaagcctgaattacacctccaaataaaagtaaatcactacaacaataaacttgaggaagacactgcatatctgcaaccaaggagcccttacagagccttggtcctctga

SEQ ID NO: 14939 - DNA, 2054 bp, Homo sapiens
  SIMILAR (671)..(1222): 931254mologous to Homo sapiens putative p150,accession number U93574,Smith-Waterman Score=854.
atgaaggcagaaataaagatgttctttgaaaccaacaagaacaaagacacaacataccagaatctctgggacgcattcaaagcagtgtgtagagggaaatttatagcactaaatgcccacaagagaaagcaggaaagatccaaaattgacaccctaacatcacaattaaaagaactagaaaagcaagagcaaacacattcaaaagctagcagaaggcaagaaataactaaaatcagagcagaactgaaggaaatagagacacaaaaaacccttcaaaaaattaatgaatccaggagctggttttttgaaaggatcaacaaaatagatagaccactagcaagactactaaagaaaaaaagagagaagaatcaaatagacgcaataaaaaatgataaaggggatatcaccaccgatcccacagaaatacaaactaccatcagagaatactacaaacacctctacgcaaataaactagaaaatctagaagaaatggataaattcctcgacacatacactctcccaagactaaaccaggaagaagttgaatctctgaatagaccaataacaggagctgaaattgtggcaataatcaatagcttaccaaccaaaaaaaagtccaggaccagatggattcacagccgaattgtaccagaggtacaaggaaggagctgtgttggaagttctggccagggcaatcaggcaggagaaggaaataaagggtattcaattaggaaaagaggaagtcaaattgtccctctttgcaggtgacatgattgtatatctagaaaaccccattgtctcagcccaaaatctccttaagctgataagcaacttcagcaaagtctcaggatacaaaatcaatgtgcaaaaatcacaagcattcttatacaccaataacagacaaacagagagccaaatcatgagtgaactcccattcacaattgcttcaaagagaataaaatacctaggaatccaacttacaagggatgtgaaggacctcttcaaggagaactacaaaccactgctcaatgaaataaaagaggatacaaacaaatggaagaacattccatgctcatgggtaggaagaatcaatatcgtgaaaatggccatactgcccaaggtaatttacggattcaatgccatccccatcaagctaccaatgactttcttcacagaattggaaaaaaactacttaaaagttcatatggaaccaaaaaagagcccgcatcgccaagtgaatcctaagccaaaagaacaaagctggaggcatcacactacctgacttcaaactgtactacaaggctacagtaaccaaaacagcatggtactggtaccaaaacagagatatagatcaatggagcagaacagagccctcagaaataatgccgcatatctacaactatctgatctttgacaaacctgacaaaaacaagaaatggggaaaggattccctgtttaataaatggtgccgggaaaactggctagccatatgtagaaagctgaaactggatcccttccttacaccttatacaaaaattaattcaagatggattaaagacttaaatgttagacctaaaaccataacaaccctagaagaaaaactaagcaataccattcaggacataggcatgggcaaggattccatgtctaaaacaccaaaagcaatggcaacaaacgtcaaaattcaaaaatgggatctaataaaactaaagagcttctgcacagcaaaagaaactaccatcagagtgaacaggcaacctacaacatgggagaaaattttcgcaacctactcatctgacaaagggctaatatccagaatctacaatgaactcaaacaaatttacaagaaaaaaacaaacaaccccatcaaaaagtgggtgaaggacatgaacagacacttctcaaaagaagacatttatgcagccaaaaaacacatgaaaaaatgctcaccatcactggccatcagagaaatgcaaatcaaaaccacaatgagataccatctcacaccagttagaatggcaatcattaaaaagtcaggaaacaaccggtgctag

SEQ ID NO: 14940 - DNA, 3230 bp, Homo sapiens; identical to SEQ ID NO: 14539
  SIMILAR (414)..(2981): 981254mologous to Homo sapiens putative p150,accession number U93563,Smith-Waterman Score=4383.

SEQ ID NO: 14941 - DNA, 5544 bp, Homo sapiens
  SIMILAR (1)..(1077): 911254mologous to Homo sapiens putative p150,accession number U93563,Smith-Waterman Score=1706.
atgggagactttaacaccccactgtcaacattagacagagcaacgagacagaaagtcaacaaggatacccaggaattgaactcagctctgcaccaagcagacttaatagacatctacagaactctccaccccaaatcaacagaatatacatttttttcagcaccacaccacacctattccaaaattgaccacatacttggaagtaaagctctcctcagcaaatgtaaaagaacagaaattataacaaactatctctcagaccacagtgcaatcaaactagaactcaggattaagaatctcactcaaaaccgctcaattacatggaaactgagcaacctgctcctgaatgactactgggtacataacgaaatgaaggcagacataaagatgttctttgaaaccaatgagaacaaagacacaacataccagaacctctgggacacattcaaagcagtgtgtagagggaaatttttagcactaaatgcccacaagaaaaagcaggaaagatccaaaattgacaccctaacatcacaattaaaagaactagaaaagcaagagcaaacacattcaaaagctagcagaaggcaagaaataactaaaatcggagcagaactgaaggaaatagagacacaaaaaacccttcaaaaaattaacgaatccaggagctggttttttgaaaggatcaacaaaattgataaaccgctagcaagactaataaagaaaaaaagagagaagaatcaaatagacgcaataaaaaatgataaaggggatatcaccaccgatcccacagaaatacaaactaccatcagagaatacaacaaacacctctatgcaaataaactagaaaatctagaagaaatggataaattcctcgacacatactctctcccaagactaaaccaggaagaagttgaatctctgaatagaccaataacaggagctgaaattgtggcaataatcaatagcttaccaactaaaaagagtccaggaccagatggattcacagccaaattctaccagaggtacaaggaggaatgtaaaatactggcaaaccaaatccagcagcacatcaaaaagcttacccaccaggatcaagtggacttcatccctgggatgcaaggctggttcaatatacgcaaatcaataaatgtaatccagcatataaacagaagcaaagacaaaaaccacatgattatctcaatagatgcagaaaaggcctttgacaaaattcaacaacccttcatgctaaaaactctcaataaattacgtattgatgggacgtatctcaaaataataagagctatctatgacaaacccacagccaatatcatactgaatgggcaaaaactggaagcattccctttgaaaactggcacaagacagggatgctctctctcaccactcctattcaacatagtgttggaagttctggccagggcaattaggcaggagaaggaaataaagggtattcaattaggaaaagaggaagtcaaattgtccctgtttgcagacaacattattgtatatctagaaaaccccattgtctcagcccaaaatctccttaagctgataagcaacttcagcaaagtctcaggatacaaaatcaatgtacaaaaatcacaagcattcttatacaccaacaacagacaaacagagagccaaatcatgagtgaactcccattcacaattgcttcaaagagaataaaatacctaggaatccaacttacaagggatgtgaaggacctcttcaaggagaactacaaaccactgctcaaggaaataaaagaggatacaaacaaatggaagaacatcccatgctcatgggtaggaagaatcaatatcgtgaaaatggccatactgcccaagataatttacagattcaatgccatccccatcaaactaccaatgactttcttcacagaattggaaaaaactactttaaagttcatatggaaccaaaaaaggagcctgcattgccaagtcaatcctaagccaaaagaacagagctggaggcatcacgctatctgacttcaaactgtactacaaggctacagtaaccaaaacagcatggtactggtaccaaaacagagatatagatcaatggaacaaaacagagccctcagaaataatgccacatatctacaactatctgatctttgacaaacctgagaaaaacgagcaatggggaaaggattccctatttaataaatggtgctgggaaaactggctagccatatgtagaaagctgaaactggatcccttccttacaccttatacaaaaatcaattcaagatggattaaagacttaaacgttagacctaaaaccataaaaaccctagaagaaaacctaggcattaccattcaggacataggcatgggcaaggacttcatgtctaaaacaccaaaagcaatggcaacaaaagccaaaattgacaaatgggatctaattaaactaaagaacttctgcacagcaaaagaaactaccatcagagtgaacaggcaacctacaaaatgggagaaaattttcacaacctactcatctgacaaagggctaatatccagaatctacaatgaactccaacaaatttacaagaaaaaaacaaacaaccccatcaaaaagtgggcaaaggacatgaacagacacttctcaaaagaagacatttatgcagccaaaaaacacatgaaaaaatgctcaccatcactggccatcagagaaatgcaaatcaaaaccacaatgagataccatgtcacaccagttagaatggcaaccattaaaaagtcaggaaacaacagctggaggtcatgcctgcaaccatgggcagcacattcaacaacttaccggcacccaggaaccatggagaaaaaaaccagcagcggggacacccccactgtcttcccatccaccctgggtcgcaagaaaagcacaagtgctcaactaactgaactgacagctcttacacttgagttaagcaagggaaaggtaagaaacgccccttcaaagttagatctaagcccttttgagatgctgtatggatggccttttctcaccaatgatttcttattagaccaagagacctctgaattgggcaagcatgtaaactctctggctcgttttcaacaggaattaactcaagtagcagaagcccaaccccaagaagtaggaccacctttatttaacccaggatatttggtattgcccaagcagggagggccttacaccattctcctttcaatgccctcagcagtaaaagttacaggtattgattcctggatacatcatgctcaagttaaagcctggaaaactgagagagcaatccccggcagcccagcggaatgtcttggataccaatgtgaggaaataagagacctgaagctgaaaatcaaaagagataagaaaatgagcaagggctactcatcctactcagttccagtcatccattcagtcatccagtcatccagtctttgtacaactggtacacagaagtcaagaattgaggtttgggaacctctgcctagatttccgaagatgtatggatatgcctggattcctagacaaaagtttgctgcaggggcagggccctcatggagaacctctgttaaggcagtgcagaagggaaatgtggggtcgaagccccaccacagagaccctactggggcactgcctagtggagctgtgagaagaggaccaccatcctccagacctcagaatggtagatccactggcagcttgcaccgtgtgcctggaaaagttgcaggcacccaatgccagtctgtgaaaccagccaatgggtctgtatccttgggcagtatggccattttcacgatattgattcttcctacccatgagcgtggaatgttcttccatttgtttgtatcctcttttatttccttgagcagtggtttgtagttctccttgaagaggtccttcacatcccttgtaagttggattcctaggtattttattctctttgaagcaattgtgaatgggagttcactcatgatttggctctctgtttgtctgttgttgatgtataagaatgcttgtgatttttgcacattgattttgtatcctgagactttgctgaagttgcttatcagcttaaggagattttgggctgagacgatggggttttctagatatacaatcatgtcatctgcaaacaaggacaatttgacttcctcttttcctaattgaatgccctttatttccttctcctgcctgattgccctggccagaacttccaacactatgttgaataggagtggtgagagagggcatccctgtcttgtgccagttttcaaagggaatgcttccagtttttgtccattcagtatgatattggctgtgggtttgtcatagatagctcttattattttgagatatgtcccatcaatacctaaattattgagagtttttagcatgaagggttgttgaattttgtcaaaggccttttctgcatctattgagataataatgtggtttttgtctttggttctgtttatatgcagctccttcttgtacctctggtagaattcggctgtgaatccatctggtcctggactttttttggttggtaagctattaattattgcttcaatttcagagcctgttattggtctattcagagattcaatttcttcctggtttagtcttgggagggtgtatgtgttgaggaatttatccatttcttctagattttctagtttatttgtgtagagatgtttatagtattctctgatagtagtctggatttctgtgggatcagtgatgatatctcctttgtcattttttattgcatctatttgattcttctctcttttcttctttattagttttgctagtggtctatcaattttgttgaccttttcaaaaaaccagcccctggattcattgattttttgaagggttttttgtgtctctatttccttcagttctgctctgattttagttatttcttgccttctgctagcttttgaatgtgtttgctcttgcttctctagctcctttaattgtgatgttagggtgtcaattttagatttttcctgctttctcttgtgggcatttagtgctataaatttgcctctacacactgctttgaatgtgtcccagagattctggtatgttgtgtctttgttctcattggtttcaaagaacatctttatttctgccttcatttcgttatgtacccagtagtcattcaggagcagattgttcagtttccatgtagttgagtggttttgagtgagtttcttaatcctgagttctagtttgattgcactgtggtctgagagacagtttgttataatttctgttcttttacatttgctgaggagtgctttacttccaagtatgtggtcaattttggaataggtgtggtgtggtgctgaaaagaatgtatattctgttgatttgtggtggaaagttctgtagatgtctattaggtccacttggtgcagagctgagttcaattcctggatatccttgttaactttctgtctcattgatctgtctaatgttgacagtggggtgttaaagtctcccat

SEQ ID NO: 14942 - DNA, 4008 bp, Homo sapiens
  SIMILAR (712)..(2883): 991254mologous to Homo sapiens unknown,accession number AF148856,Smith-Waterman Score=3781.
atggggaaaaaacagaacagaaaaactggaaactctaaaacgcagagcgcctctcctcctccaaaggaacgcagttcctcaccagcaacagaacaaagctggatggagaatgattttgacgagctgagagaagaaggcttcagacgatcaaattactctgagctatgggaggacattcaaaccaaaggcaaagaagttgaaaactttgaaaaaaatttagaagaatgtataactagaataaccaatacagagaagtgcttaaaggagctgatggagctgaaaaccaaggctcgagaactacgtgaagaatgcagaagcctcaggagccgatgcgatcaactggaagaaagggtatcagcaatggaagatgaaatgaatgaaatgaagcgagaagggaagtttagagaaaaaagaataaaaagaaatgagcaaagcctccaagaaatatgggactatgtgaaaagaccaaatctacgtctgattggtgtacctgaaagtgatgtggagaatggaaccaagctggaaaacactctgcaggatattatccaggagaacttccccaatctagcaaggcaggccaacgttcagattcaggaaatacagagaacgccacaaagatactcctcgagaagagcaactccaagacacataattgtcagattcaccaaagttgaaatgaaggaaaaaatgttaagggcagccagagagaaagaaatacaaactaccatcagagaatactacaaacacctctacgcaaataaactagaaaatctagaagaaatggatacattcctcgacacatacactctcccaagactaaaccaggaagaagttgaatctctgaatagaccaataacaggctctgaaattgtggcaataatcaatagtttaccaaccaaaaagagtccaggaccagatggattcacagccgaattctaccagaggtacaaggaggaactggtaccattccttctgaaactattccaatcaatagaaaaagagggaatcctccctaactcattttatgaggccagcatcattctgataccaaagccgggcagagacacaaccaaaaaagagaattttagaccaatatccttgatgaacattgatgcaaaaatcctcaataaaatactggcaaaccgaatccagcagcacatcaaaaagcttatccaccatgatcaagtgggcttcatccctgggatgcaaggctggttcaatatacgcaaatcaataaatgtaatccagcatataaacagagccaaagacaaaaaccacatgattatctcaatagatgcagaaaaagcctttgacaaaattcaacaacccttcatgctaaaaactctcaataaattaggtattgatggtacatatttcaaaataataagagctatctatgacaaacccacagccaatatcatactgaatgggcaaaaactggaagcattccctttgaaaactggcacaagacagggatgccctctctcaccgctcctattcaacatagtgttggaagttctggccagggcaatcaggcaggagaaggaaataaagggtattcaattaggaaaagaggaagtcaaattgtccctgtttgcagacgacatgattgtttatctagaaaaccccattgtctcagcccaaaatctccttaagctgataagcaacttcagcaaagtctcaggatacaaaatcaatgtacaaaaatcacaagcattcttatacacgaacaacagacaaacagagagccaaatcatgggtgaactcccattcacaattgcttcaaagagaataaaatacctaggaatccaacttacaagggatgtgaaggacctcttcaaggagaactacaaaccactgctcaaggaaataaaagaggacacaaacaaatggaagaacattccatgctcatgggtaggaagaatcaatatcgtgaaaatggccatactgcccaaggtaatttacagattcaatgccatccccatcaagctaccaatgactttcttcacagaattggaaaaaactactttaaagttcatatggaaccaaaaaagagcccgcattgccaagtcaatcctaagccaaaagaacaaagctggaggcatcacactacctgacttcaaactatactacaaggctacagtaaccaaaacagcatggtactggtaccaaaacagagatatagatcaatggaacagaacagagccctcagaaataatgccgcatatctacaactatctgatctttgacaaacctgagaaaaacaagcaatggggaaaggattccctatttaataaatggtgctgggaaaactggctagccatatgtagaaagctgaaactggatcccttccttacaccttatacaaaaatcaattcaagatggattaaagatttaaacgttaaacctaaaaccataaaaaccctagaagaaaacctaggcattaccattcaggacataggcgtgggcaaggacttcatgtccaaaacaccaaaagcaatggcaacaaaagacaaaattgacaaatgggatctaattaaactaaagagcttctgcacagcaaaagaaactaccatcagagtgaacaggcaacctacaacatgggagaaaatttttgcaacctactcatctgacaaagggctaatatccagaatctacaatgaactcaaacaaatttacaagaaaaaaacaaacaaccccatcaaaaagtgggcgaaggacatgaacagacacttctcaaaagaagacatttatgcagccaaaaaacacatgaagaaatgctcatcatcactggccatcagagaaatgcaaatcaaaaccactatgagatatcatctcacaccagttagaatggcaatcattaaaaagtcaggaaacaacagggacaacacaaaggaagcactgctgtgtaacaacttggtggctgaagtcttggaggccaaacaggctcagaagcttcaaggcaaagcagccgtcctcagcctctcaaaaatctatgcgatcacagagacaaatgctgagacacccaacaggaagatgaaaattaaactgaagagacccatgaccaaattgcacccaagcatccaaatgttggtggtcacatccaggcctatgaaatgggaaatctgcctgatggggcattttaaccaggagaatctaaatgagcaaccgaatttagaaatcactaggcgggaacagaaagagcaaacacacaatccaagaaccacttctcctacccctttgtccatgacagacattaataatcaacatgagcactctttccctcagaacgcagccaaagctcaggagactatttcccttgtttccgctggtgtcatcctctcagccacactcacctctccaccacccacccccctttttgaccctgcaacttccttccaaatgcaggaggaaaccgcccagcttactcacaagggccccagccaacagagtgcagataagacaagcaccttggcagcgagacaatcctctcattgcatcattcagcatttcagccttagatgccatgaaggggacagtgctcagaccctctgcccttcagagagaccatcccgtactctgttgctgaatgggagaccacacggctcctctgggcgactcttccagaacagtctgggactgagctccaccacagatcctgggtgtggctggttcacaggcttggactgcccagagcacagctggccaggaaaaacagggcagaaggaatgttggtggcagggaggaagcagagaacagcatctgctcttcttacctcatttaggccccttattactatctctctccttcaccaagaatatagagaaaggagcgggccacagcacatgggcagcaggatcggatgctcagcatggagcagccatagacccaccccctcctctgcagctgcatgtgtgcttttcagaaaccaccaaattcaaaaccccaaactgccaaggtcgaatcttccgggaaaggccaattcagcctgcggttattcatgtttga

SEQ ID NO: 14943 - DNA, 2710 bp, Homo sapiens
  SIMILAR (944)..(1666): 971254mologous to Escherichia coli PENICILLIN-BINDING PROTEIN 1A (PBP-1A),accession number D90882,Smith-Waterman Score=1254.
ggtggacttctaactttttctgcacaggaatttggaagactttgttatggcaggtgccgtactcttactttacaaacaaacattaggggcagcccaggcagcacacctttctggatttaccaaaaatacacattttcctattctactgttgctttaccacatggttcagttgtagcctcagaattactttatggaagaaactgagtgtagacagagagtatgaggtctgatggtcatggaataattgttttgagtccacagcatcatggaaacctcttgggaatagagtataggcttcccagtgatgttagtcttatccatcctcctctatacatgtgagatgtttcaggattcagtggcctttgaggatgtggctgtgaccttcacccaagaggagtgggctttgctggatccttcccagaaaaatctctgtagagatgtgatgcaagaaaccttcaggaacctggcctctatagatgacatgattgtatatttagaaaaccctatcatctcagcccaaaatctccttaagctgataagcaacttcagcaaagtctcaggatacaaaatcaatgtgcaaaaatcacaagcattcctatacaccaacaacagacaaacagagagccaaatcatgagtgaactcccattcacaattgcttcaaagagaataaaatacctaggaatccaacttacaagggatgtgaaggacctcttcaaggagaactacaaaccgctgctcaaggaaataaaagaggatacaaacaaatggaagagcattacatgcacatgggtaggaagaatcaatatcgtgaaaatggccatactgcccaaggactcagtggtctttgaggatgtagatgtgagcttcacccaggaggagtgggctttgctggatccttcccagaagaatctctacagagatgtgatgcaggaaaccttcgggaacctgtcctctatagtgctggaagcttatggaccgaaacggtttgcggcaaagttacgcaatgttggattgccgttatatttgcccaacgggtgtgcgccgaatctttcactcattctcggcggcgctggtgcaaaactggaagatatggcggcagcgtataccgcgtttgctcgccacggcaaggcaggcaaattgcgcttacagcctgacgatccgctgcttgaacggcctttaatgtcgtcgggggcggcgtggatcattcgccggattatggctgatgaagcgcaacccttgccggatagtgccttgccgcgcgtcgccccactggcatggaaaacgggcaccagctatggctatcgtgacgcctgggcgattggggttaacgctcgctatgtcattgggatctggactggcagaccggacggcacgcccgttgttggtcagtttggctttgccagtgccgtaccattgttgaatcaggtcaataatatcttactgtcgcgcagtgcgaatctgccggaagacccgcgcccgaactcagtcactcgtggcgttatctgctggccgggcggacagtctttgccggaaggtgacggtaactgtcgccgccgcctggcaacctggctgctggacgggagtcagccgccaactctattactgccggagcaggaaggcattaatggcattcgtttccccatctggctggatgaaaatggcaaactatatggttcccaacgtcgagccaatcctattagcgccttcagaacgctatgccgtcgagagaaccgcgttacgggtattcgaaacgtcacagcccgcgtggataatacagccatcacagtgatgttccagcgtagagaggtcgtaggcctgatgtccgcaggtaacattgcccctaacatgcaagctttaaggggtgacccaaggctacctgaagaacaggttttccctgccattccggcaacgggaaaccagcggaaatccgtcgcccatcacgtgacggattccgtaggtcccaaactaccgtcgtcaggcccccggcagggtaccggttccaaaaggaccggcgtcatcatgctggattcaatatgcagtgagccacaaataacccctggcaccgccgaaggcttcgtggtgaacatgtatgccactggctacgaaatcacccgtacccgtgatgccatcaacaacgtcgaagctttacttggagcggaatctgcggtggttaaacaaggttcccgttccgaacaggtaataccggcttccgaaacttgcggcaacgcaacctgcggagttccactgccatccgtcgataccattaacgcgctcaaccgcctgaaagcttacgacaagctgtcgcttgatcaacgtagccagatgcgccgcattatgctgtgcgtttctgacactatcgacaaagtggtgaagatccctggcgtgagtgctgacgatcagcgcctgttgaagaaactgaagtccgacatgcttagcaccatcgagtatgcaccggtgtggatcatcatggcggtcgcgctggcgttaggtatcggtacgatgattggtggcgccgtgtggcaacgactatcggtgagaaaatcgtcacggcgaatcgtcgagttgttgtacgagccaagaagagcttcagacgacagcatcaccaggggagacatcacgcaccagcgtacaacgatacacgcatgcatagaacgcagcaagtcatatcgagttcatgacagcggactcgactatagcgcgagcagatag

SEQ ID NO: 14944 - DNA, 4605 bp, Homo sapiens
  SIMILAR (712)..(3636): 991254mologous to Homo sapiens unknown,accession number AF149422,Smith-Waterman Score=5041.
atggggaaaaaacagaacagaaaaactggaaactctaaaacgcagagcgcctctcctcctccaaaggaacgcagttcctcaccagcaacagaacaaagctggatggagaatgattttgacgagctgagagaagaaggcttcagacgatcaaattactctgagctacgggaggacattcaaaccaaaggcaaagaagttgaaaactttgaaaaaaatttagaagaatgtataactagaataaccaatacagagaagtgcttaaaggagctgatggagctgaaaaccaaggctcgaaaactacgtgaagaatgcagaagcctcaggagccgatgcgatcaactggaagaaagggtatcagcaatggaagatgaaatgaatgaaatgaagcgagaagggaagtttagagaaaaaagaataaaaagaaatgagcaaagcctccaagaaatatgggactatgtgaaaagaccaaatctacgtctgattggtgtacctgaaagtgatgtggagaatggaaccaagttggaaaacactctgcaggatattatccaggagaacttccccaatctagcaaggcaggccaacgttcagattcaggaaatacagagaacaccacaaagatactcctcgagaagagcaactccaagacacataattgtcagattcaccaaagttgaaatgaaggaaaaaatgttaagggcagccagagagaaagacagatcaacgagacagaaagtcaacaaggatacccaggaattgaactcagctctgcaccaagcagacctaatagacatctacagaactctccaccccaaatcaacagaatatacatttttttcagcaccacaccacacctattccaaaattgaccacatagttggaagtaaagctctcctcagcaaatgtaaaagaacagaaattataacaaactatctctcagaccacagtgcaatcaaactagaactcaggattaagaatctcactcaaagccgctcaactacatggaaactgaacaacctgctcctgaatgactactgggtacataacgaaatgaaggcagaaataaagatgttctttgaaaccaatgagaacaaagacacaacataccagaatctctgggacgcactcaaagcagtgtgtagagggaaatttatagcactaaatgcccacaagggaaagcaggaaagatctgaaattgacaccctaacatcacaattaaaagaactagaaaagcaagagcaaacacattcaaaagctagcagaaggcaagaaataactaaaatcagagcagaactgaaggaaatagagacacaaaaaacccttcaaaaaatcaatgaatccaggagctggttttttgaaaggatcaacaaaattgatagaccgctagcaagactaataaagaaaaaaagagagaagaatcaaatagacacaataaaaaatgataaaggggatatcaccaccgatcccacagaaatacaaactaccatcagagaatactacaaacacctctacgcaaataaactagaaaatctagaagaaatggatacattccttgacacatacactctcccaagactaaaccaggaagaagttgaatctctgaatcgaccaataacaggctctgaaattgtggcaataatcaatagtttaccaaccaaaaagagtccaggaccagatggattcacagccgaattctaccagaggtacaaggaggaactggtaccattccttctgaaactattccaatcaataggaaaagagggaatcctccctaactcattttatgaggccagcatcattctgacaccaaagccgggcagagacacaaccaaaaaagagaattttagaccaatatccttgatgaacattgatgcaaaaatcctcaataaaatactggcaaaccgaatccagcagcacatcaaaaagcttatccaccatgatcaagtgggcttcatccctgggatgcaaggctggttcaatatacgcaaatcaataaatgtaatccagcatataaacagagccaaagacaaaaaccacatgattatctcaatagatgcagaaaaagcctttgacaaaattcaacaacccttcatgctaaaaactctcaataaattaggtattgatgggacgtatttcaaaataataagagctatctatgacaaacccacagccaatatcatactgaatgggcaaaaactggaagcattccctttgaaaactggcacaagacagggatgccctctctcaccgctcctattcaacatagtgttggaagttctggccagggcaatcaggcaggagaaggaaataaagggtattcaattaggaaaagaggaagtcaaattgtccctgtttgcagacgacatgattgtttatctagaaaaccccatcgtctcagcccaaaatctccttaagctgataagcaacttcagcaaagtctcaggatacaaaatcaatgtacaaaaatcacaagcattcttatacaccaacaacagacaaacagagagccaaatcatgggtgaactcccattcacaattgcttcaaagagaataaaatacctaggaatccaacttacaagggatgtgaaggacctcttcaaggagaactacaaaccactgctcaaggaaataaaagaggacacaaacaaatggaagaacattccatgctcatgggtaggaagaatcaatatcgtgaaaatggccatactgcccaaggtaatttacagattcaatgccatccccatcaagctaccaatgactttcttcacagaattggaaaaaactactttaaagttcatatggaaccaaaaaagagcccgcatcgccaagtcaatcctaagccaaaagaacaaagctggaggcatcacactacctgacttcaaactatactacaaggctacagtaaccaaaacagcatggtactggtaccaaaacagagatatagatcaatggaacagaacagagccctcagaaataatgccgcatatctacaactatctgatctttgacaaacctgagaaaaacaagcaatggggaaaggattccctatttaataaatggtgctgggaaaactggctagccatatgtagaaagctgaaactggatcccttccttacaccttatacaaaaatcaattcaagatggattaaagatttaaacgttagacctaaaaccataaaaaccctagaagaaaacctaggcattaccattcaggacataggcgtgggcaaggacttcatgtccaaaacaccaaaagcaatggcaacaaaagccaaaattgacaaatgggatctaattaaactaaagagcttctgcacagcaaaagaaactaccatcagagtgaacaggcaacctacaacatgggagaaaattttcgcaacctactcatctgacaaagggctaatatccagaatctacaatgaactcaaacaaatttacaagaaaaaaacaaacaaccccatcaaaaagtgggcgaaggacatgaacagacacttctcaaaagaagacatttatgcagccaaaaaacacatgaagaaatgctcatcatcactggccatcagagaaatgcaaatcaaaaccactatgagatatcatctcacaccagttagaatggcaatcattaaaaagtcaggaaacaacagctcgagggaagcagccccgaagcctccgcggcggcggcggcggcggtcgcggatcctctccaggctgctcgcaaagtccggccggccggaggcagccgccaactcctctcaacttctgccgatccgctgggcgaagcaacacgcttcctgcgcgtctctcctaggggctgagccggtctccgagggtctcggccgcctccactccctggcgctgcacacaacttacgtggaggccaggcccgcgcggggggcccagagaaagccggcgccgggcgaggctcttgcaggttctcagacccgaacacagacctgggttagagttggggacttgcctgtaataagtgacttacccattgccctcaacctaaggaagccttgccatttaaaacctcccaatggagcctatcaaagcgtgcttcaaagtgtgagggaggctgagagaggaattacagaaccgcctgacattggctgcaacctgatggggagatctgactcaaggaacagtacgatggccattgatgtccccgcccacgcactctgtagaagccttgggaatcttttcaaagcactgcccccacccgagagcatcatgacttctgttgctgggacaaaggtaagaatcattaggaaacacgatcacagtagtgcacctgcttacgcacgatatccagcccagagaaggtcccgcttcctaagccctcctgagactcaccagccacaagcccacatctatactaagttctttcgaaggccctctttactgctggacattcttcctttgtgcaacacgttaataaacccaacttggttcagccacagcgctgcaatgaacattcacggcataaaaaggaatgagagcatgtcttttgcaggagcatggatggagctggaggttatcatccttagcaaactaacacaagaacagaaaaccaaataccgcaagttctcacttataagtgggcactaa

SEQ ID NO: 14945 - DNA, 4809 bp, Homo sapiens
  SIMILAR (265)..(2976): 841254mologous to Homo sapiens putative p150,accession number U93572,Smith-Waterman Score=3919.
atggtaaagggatcaattcaacaagaggagctaactatcctaaatatttatgcacccaatacaggagcacccagattcataaagcaactcctgagtgacctacaaagagacttagactcccacacattaataatgggagactttaacaccccactgtcaacattagacagatcaacgagacagaaagtcaacaaggatacccaggaattgaactcagctctgcaccaagcagacctaatagacatctacagaactctccaccccaaatcaacagaatatacattgttttcagcaccacaccacacctattccaaaattgaccacatacttggaagtaaagctctcctcagcaaatgtaaaagaacagaaattataacaaactatctctcagaccacagtgcaatcaaactagaactcaggattaagaatctcactcaaagccgctcaactacatggaaactgaacaacctgctcctgaatgactactgggtacataacgaaatgaaggcagaaataaagatgttctttgaaaccaacgagaacaaagacaccacataccagaatctctgggacgcattcaaagcagtgtgtagagggaaatttatagcactaaatgcctacaagagaaagcaggaaagatccaaaattgacaccctaacatcacaattaaaagaactagaaaagcaagagatcaacaaaattgatagaccgctagcaagactaataaagaaaaaaagagagaagaatcaaatagacacaataaaaaatgataaaggggatatcaccaccgatcccacagaaatacaaactaccatcagagaatactacaaacacctctacacaaataaactagaaaatctagaagaaatggatacattcctcgacacatacactctcccaagactaaaccaggaagaagttgaatctctgaatagaccaataacaggatctgaaattgtggcaataatcaatagtttaccaaccaaaaagagtccaggaccagatggattcacagccgaattctaccagaggtacaaggaggaactggtaccattccttctgaaactattccaatcaatagaaaaagagggaatcctccctaactcattttatgaggccagcatcattctgataccaaagccgggcagagacacaaccgaaaaagagaattttagaccaatatccttgatgaacattgatgcaaaaatcctcaataaaatactggcaaaccgaatccagcagcacatcaaaaagcttatccaccatgatcaagtgggcttcatccctgggatgcaaggctggttcaatatacgcaaatcaataaatgtaatccagcatataaacagagccaaagacaaaaaccacatgattatctcaatagatgcagaaaaagcctttgacaaaattcaacaacccttcatgctaaaaactctcaataaattaggtattgatgggatgtatttcaaaataataagagctatctatgacaaacccacagccaatatcatactgaatgggcaaaaactggaagcattccctttgaaaactggcacaacacagggatgccctctctcaccgctcctattcaacatagtgttggaagttctggccagggcaatcaggcaggagaaggaaataaagggtattcaattaggaaaagaggaagtcaaattgtccctgtttgcagacgacatgattgtttatctagaaaaccccatcgtctcagcccaaaatctccttaagctgataagcaacttcagcaaagtctcaggatacaaaatcaatgtacaaaaatcacaagcattcttatacaccaacaacagacaaacagagagccaaatcatgagtgaactcccattcacaattgcttcaaagacaataaaatacctaggaatccaacttacaagggatgtgaaggacctcttcaaggagaactacaaaccactgctcaaggaaataaaagaggacacaaacaaatggaagaacattccatgctcatgggtaggaagaatcaatatcgtgaaaatggccatactgcccaaggtaatttacagattcaatgccatccccatcaagctaccaatgactttcttcacagaattggaaaaaactactttaaagttcatatggaaccaaaaaagagcccgcatcgccaagtcaatcctaagccaaaagaacaaagctggaggcatcacactacctgacttcaaactatactacaaggctacagtaaccaaaacagcatggtactggtaccaaaacagagatatagatcaatggaacagaacagagccctcagaaataatgccgcatatctacaactatctgatctttgacaaacctgagaaaaacaagcaatggggaaaggattccctatttaataaatggtgctgggaaaactggctagccatatgtagaaagctgaaactggatcccttccttacaccttatacaaaaatcaatccaagatggattaaagatttaaacgttagacctaaaaccataaaaaccctagaagaaaacctaggcattacctttcaggacataggcgtgggcaaggacttcatgtccaaaacaccaaaagcaatggcaacaaaagccaaaattgacaaatgggatctaattaaactaaagagcttctgcacagcaaaagaaactaccatgagagtgaacaggcaacctacaacatgggagaaaattttcgcaacctacgcatctgacaaagggctaatatccagaatctacaatgaactcaaacaaatttacaagaaaaaaacaaacaaccccatcaaaaagtgggcgaaggacatgaacagacacttctcaaaagaagacatttatgcagccaaaaaacacatgaagaaatgctcatcatcactggccatcagagaaatgcaaatcaaaaccactatgagatatcatctcacaccagttagaatggcaatcattaaaaagtcaggaaacaacaggagctggtattttgaaaagatcaacaaaattgatagactgctagcaagactaataaagaaaaaaagagagaagaatcaaatagacgcaataaaaaatgataaaggggatatcaccactgatcccacagaaatacaaactaccaccagagaatactataaacacctctatgcaaataaactagaaaatctagaagaaatggataaattcctcgacacatacaacctcccaagactaaagcaggaagaagttgaatctctgaatagaccaataagaggctctgaaattgtggcaataatcaatagcttaccaaccaaaaaaagtccaggaccagatggattcacagccgaattctaccacaggtacaaagaggagctggtaccattgcttctgaaactattccaatcaatagaaaaagaggtaatcctccctaactcattttatgaggccagcatcatcctgataccaaagcctgacagagacacagcaaaaaaagagaattttagaccaatatccttgatgaacatcgatgcaaaaatcctcaataaaatactggcaaaccgaatccagcagcacatcaaaaagcttatccaccatgatcaagtgggcttcatccctgggatgcaaggctggttcaacatacgcaaatcagtaaatgtaatccagcatataaacagaaccaaagacaaaaaccacatgatcatctcaatagatgcagaaaagtcctttgataaaattcaacaacacttcatgctaaaaactctcaataaattaggtattgatgggtcatatctcaaaataataagagctacctatgacaaacccacagccaatatcatactgaatgggcaaaaactggaagcattccctttgaaaactggcacaagacacggatgccccctctcaccactcctattcaacatagtgttggaagttctggccagagcaatcaggcaggagaaggaaataaagggtattcaattaggaaaagaggaagtcaaattgtccctgttcatagatgacatgattgtatatctagaaaaccccatcatctcagcccaaaatctccttaagctgataagcaacttcagcaaagtctcaggatacaaaatcaatgtacaaaaatcacaagcattcttatacaccaacaacagacaaacagagagccaaatcatgagtgaactcccattcacaattgcttcaaagagaataaaatacctaggaatccaacttacaagggatgtgaaggacctcttcaaggagaactacaaaccactgctcgaggaaataaaagaggatccaaacaaatgtaagaacattccatgctcatgggtaggaagaatctatatcgtgaaaatggccatactgcccaagtgctcaagctctgctaagggacagactgcctctgcaagtgggtccctgacccccctgcctcctgatggggagagacctcccaaaacgggtcgacagacacctcatacaggagagctccggctggcatcagggcagtaccctgcagggatggagcttccagaggaaggagcaggcagcaatctttgctgctctgcagccaccactgcaagagaccaaaactggatggagaatcagtttgatgaactgacagaggtaggctttggaaagtgggtaataacaaactcttctgagctaaaagagcatgttctaattcaatgcaaggaagctaagaaccttcataaaaggttacaggaactgctaactagaataaccagtttagagagaaacataaatgacctgatggagctgaaaaacacagtacgagaacttcgtgaagcatacacaagtatcaatagccaaatcaattga

SEQ ID NO: 14946 - DNA, 5931 bp, Homo sapiens
  SIMILAR (2431)..(3939): 961254mologous to Homo sapiens putative p150,accession number U93564,Smith-Waterman Score=2549.
atggggaaaaaacagaacagaaaaactggaaactctaaaacgcagagtgcctctcctcctccaaaggaacgcagttcctcaccagcaacggaaaaaagctggatggagaatgactttgacgagctgagagaagaaggtttcagacgatcaaattactctgagctacgggaggacattcaaaccaaaggcaaagaagttgaaaactttgaaaaaaatttagaagaatgtataactagaataaccaatacagagaagtgcttaaaggagctgatggagctgaaaaccaaggctcgagaactacgtgaagaatgcagaagcctcaggagccgatgtgatcaactggaagaaagggtatcagcaatggaagatgaaatgaatgaaatgaagcgagaagggaagtttagagaaaaaagaataaaaagaaatgagcaaagcctccaagaaatatgggactatgtgaaaagaccaaatctacgtctgactggtgtacctgaaagtgacggggagaatggaaccaagttggaaaacactctgcaggatattatccaggagaacttccccaatctagcaaggcaggtcaatgttcagattcaggaaatacagagaacgccacaaagatactcctcgagaagagcaactccaagacacataattgtcagattcaccaaagttgaagtgaaggaaaaaatgttaagggcagccagagagaaaggtcgggttaccctcaaagggaagcccatcagactaacagcggatctctcggcagaaaccctacaagccagaagagagtgggggccaatattcaacattcttaaagaaaagaattttcaacccagaatttcatatccagccaaactaagcttcataagtgaaggagaaataaaacactttacagacaagcaaatgctgagagattttgtcaccaccaggcctgccctaaaagagctcctgaaggaagtgctaaacatggaaaggaacaaccagtaccagccgctgcaaaatcatgccaaaatacagatcaacgagacagaaagtcaacaaggatacccaggaattgaactcagctctgcaccaagcggacctaatagacatctacagaactctccacaccaaatcaacagaatatactttttttcagcaccacaccacacctattccaaaattgaccacatagttggaagtaaagctctcctcagcaaatgtaaaagaacagaaattataacaaactatctctcagaccacagtgcaatcaaactagaactcaggattaagaatctcaatcaaagccgctcaactacatggaaactgaacaacctgctcctgaatgactactgggtacataacgaaatgaaggcagaaataaagatgttctttgaaaccaacgagaacaaagacacaacataccagaatctctgggacgcattcaaagcagtgtgtagagggaaatttatagcactaaatgcccacaagagaaagcaggaaagatccaaaattgacaccctaacatcacaattaaaagaactagaaaagcaagagcaaacacattcaaaagctagcagaaggcaagaaataactaaaatcagagcagaactgaaggaaatagagacacaaaaaacccttcaaaaaatcaatgaatccaggagctggttttttgaaaggatcaacaaaattgatagaccgctagcaagactaataaagaaaaaaagagaggagaatcaaatagacacaataaaaaatgataaaggggatatcaccaccgatcccacagaaatacaaactaccatcagagaatactacaaacacctctatgcaaataaactagaaaatctagaagaaatggataaattccttgacacatacactctcccaagactaaaccaggaagaagttgaatctctgaatagaccaataacaggagctgaaattgtggcaataatcaatagtttaccaaccaaaaagagtccaggaccagatggattcacagctgaattctaccagaggtacaaggaggaactggtaccattccttctgaaactattccaatcaatagaaaaagagggaatcctccctaactcattttaatgaggccagcatcattctgataccaaagccgggcagagacacaaccaaaaaagagaattttagaccaatatccttgatgaacattgatgcaaaactcctcaataaaatactggcaaaccgaatccagcagcacatcaaaaagcttatccaccatgatcaagtgggcttcatccctgggatgcaaggctggttcaatatacgcaaatcaataaatgtaatccagcatataaacagagccaaagacaaaaaccacatgattatctcaatagatgccgaaaaagcctttgacaaaattcaacaacccttcatgctaaaaactctcaataaattaggtattgatgggacatatatttcaaaataataagagctatccatgacaaacccacagccaatatcatactgaatgggcaaaaactggaagcattccctttgaaaactggcacaagacagggatgccctctctcaccactcctattcaacatagtgttggaagttctggccagggcaattaggcaggagaaggaaataaagggtattcaattaggaaaagaggaagtcaaattgtccctgtttgcagacgacatgattgtatatctagaaaaccccattgtctcagcccgaaatctccttaagctgataagcaacttcagcaaagtctcaggatacaaaatcaatgtgcaaaaatcacaagcattcttatgcaccaacaacacacaaacagagagccaaatcatgagtgaactcccattcacaattgcttcaaagagaataaaatacctaggaatccaacttacaagggatgtgaaggacctcttcaaggagaactacaaaccactgctcaaagaaataaaagaggatacaaacaaatggaagaacattccatgctcatgggtaggaagaatcaatattgtgaaaatggccatactgcccaaggtaatttctagattcaatgccatccccatcaagctaccaatgactttcttcacagaattggaaaaaactactttaaagttcatatggaaccaaaaaagagcccgcatcaccaagtcaatcctaagccaaaagaacaaagctggaggcatcacactacctgacttcaaactatactacaagcctacagtaaccaaaacagcatggtactggtaccaaaacagagatatagatcaatggaacagaacagagccctcagaaataacgccgcatacctacaactatctgatctttgacaaacctgagaaaaacaagcaatggggaaaggattccctatttaataaatggtgctgggaaaactggctagccatatgtagaaaactgaaactggatcccttccttacaccttatacaaaaatcaattcaagatggattaaagatttaaacgttagacctaaaaccataaaaaccctagaagaaaacctaggcattaccattcaggacataggcgtgggcaaggacttcatgtccaaaacaccaaaagcaatggcaacaaaagccaaaattggcaaatggtacctaattaaactaaagagcttctgcacagcaaaagaaactaccatcagagtgaacaggcaacctacaacatgggagaaaattttcgcaacgtactcatctgacaaagggctaatatccagaatctacaatgaactcaaacaaatttacaagaaaaaaacaaacaaccccatcaaaaagtgggcgaaggacatgaacagacacttctcaaaagaagacatttatgcagccaaaaaatacgtgaaaaaatgctcatcatcactggccatcagagaaatgcaaatcaaaaccactatgagataccatctcacaccagttagaatggcaatcattaaaaagtcaggaaacaacagcaaaaagaacaaagctggaggaatcatgccagctgacttcaaactatactacaaggctatgggaacaaaaacagcatgggacatggatgaaactgaaaaccatcatgctcagcaaactaacacaagaacagaaaaacaaacaccacatgttctcactcataagtgggagttgaacaatgagaacacatggacacagggaaggaaacatcacacatcagggcctgtcaacagttgtctggagaaacaggaagagccaccatcattgcttcgtctaaataatcggatcaaacagctactcccaccggtagatttaacggaactgttacttgagatagatgcccagacaggatttacacatgagtttgcgcatgtcagtgaatctggtgctcgagcgcaagatttgcacatcagtttatgtgcggtattgatggctgaagcctgtaatatcggactggaaccgctgataaagcacaatataccagcactgacccgccatcggctcagttgggtgaaacagaattaccttcgtgcagaaacgctggtcagggccaatgcccgcctggttgattttcagtccacactggagcttgctggtcgttggggaggtggagaagtggcatcagctgacggcatgcgccttgtcacaccagtgaagaccatcaactcaggatctaacagaaaatatttttgttctggacgagggatcacctggtataacttcgtatctgatcggtactctgggttccatggcattgtggtacccggtacattacgggattcgatttttgtacgggaaggacttcttgagcagcagacagggctgaatccagttgaaatcatgacagacattgcgggtagcagcgatattattttcggtctgttctggctactggggtatcagttttccccccggcttgccgatgcaggtgaggcggtgttctggcgggtgaataaatcggcaaactacggagtactggataagttggcccgaggatatgcagatctgtcaaaagcggagagtcagtgggatgagatgatgcgaaccgctggttcgctgaagttgggtacaattcatgcgtcagaactcattcgctctttactgaaaagctcgcgcccatcaggactggcacaggcaattatggaagtagggcgtgtaaacaaaacgctatatctcctcaattatattgatgatgaagattatcgtcggcggatcctgacgcagcttaatcgaggagaaggccgccacgctgtggctcgtgcgatttgttacggacaacgcggagagatcagaaagcgttatcgtgaagggcaggaagatcaactgggggcgctgggcctggttactaatgcagtggttctgtggcacacgctctatatggaggaagcgttgagttggatgcgccgcaatggcgaagaaattatagatgaagatatcgcttggctatctcccctgatgcacgggcatatcaatatggcaatcaggcaggagaaagaaataaagggtattcaattaggaaaagaggaagtcaaatggtccctgtttgcagatgacatgattgtatatttagaaaaccccatcgcctcagcccaaaatctccttaagctgataagcaacttcagcaaagtctcaggatacaaaatcaatgtgcaaaaatcacaagcattcttatacaccaataacagacaaacagagagccaaatcatgagtgaactcccattcacaattgcttcaaagagaataaaatacctaggaatccaacttacaagggatgtgaaggacctcttcaaggagaactacaaaccaatgctcaatgaaataaaagaggatacaaacaaatggaagaacattccatgctcatggataggaagaatcaacatcgtgaaaatggcaatactgcccaagctaatttatagattcaatgccatccccatcaagctaccaatgactttcttcacagaattggaaaaaactactttaaagttcatatga

SEQ ID NO: 14947 - DNA, 8710 bp, Homo sapiens
  SIMILAR (5852)..(8434): 951254mologous to Homo sapiens putative p150,accession number U93563,Smith-Waterman Score=4230.
  misc_feature (1)...(8710): n = a,t,c or g
atgtcgtacagcagcaagtctgctttgcacttgaaaatccttcaggcaggacaggaggttcttaagtgtgacaatctaaaaacttgtcacacttcacatggatctgtcatggcggaaacagcggttatcaatcacaagaaacgtaaaaatagcccgcgaatcgtccagtcaaacgacctcactgaggcggcatatagtctctcccgggatcaaaaacgtatgctgtatctgttcgttgaccagatcagaaaatctgatggcaccctacaggaacatgacggtatctgcgagatccatgttgctaaatatgctgaaatattcggattgacctctgcggaagccagtaaggatatacggcaggcattgaagagtttcgcggngaaggaaagtgttttttatcgccctgaagaggatgccggcgatgaaaaaagctatgaatcttttccttggtttatcaaacgtgcgcacagtccatccagagggctttacagtgtacatatcaacccatatctcattcccttctttatcgggttacaagacccggttacgcagtttcggcttagtgaaacaaaagaaatcaccaatcctgttggaagttctggccagggaaatcaggcaggagaaggaaataaagggtattcaattaggaaaagaggaagtcaaattgtccctgtttgcagatgacatgattgtatatctagaaaaccccattgtctcagcccaaaatctccttaagctgataagcaactttagcaaagtctcaggatacaaaatcaatgtacaaaaatcacaagcattcttatacaccaacaacagacaaacagagagccaaatcatgagtgaactcccattcacaattgcttcaaagagaataaaatacctaggaatccaacttacaagggatgtgaaggacctcttcaagcagaactacaaaccactgctcaatgaaataaaagaggatacaaacaaatggaagaacattccatgctcatgggtaggaagaatcaatatcgtgaaaatggccatactgcccaaggaacgcagctcctcaccagcaacggaacaaagctggatggagaatgactttgatgagttgagagaagaaggcttcagacgatcaaacttctccgagctaaaggagaaagttcgaacccatcacaaacaagataaaaaccttgaaaaaaatttagaagaatgtataactagaataaccaatacagagaagtgcttaaaggagctgatggagctgaaaaccaaggctcgagaactacatgaagaatgcagaagcctcaggagccgatgtgatcaactggaagaaagggtatcagcaatggaagatgaaatgaatgaaatgaagggagaagggaagtttagagaaaaaagaataaaaagaaacgagcaaagcctccaagaaatatgggactatgtgaaaagaccaaatctacatctgattggtgtacctgaaagtgatggggagaatggaaccaagttggaaaacactctgcaggatattatccaggagaacttccccaatctagcaaggcaggccaacgttcagattcaggaaatacagagaatgccacaaagatactcctcgagaagagcaactccaagacacataattgtcagattcaccaaagttgaaatgaaggaaaaaatattaaaggcagccagagagaaagacagatcaacgagacagaaagtcaacaaggatacccaggaattgaactcagctctgcaccaagcagacctaatagacatctacagaactctccaccccaaatcaacagaatatacatttttttcagcaccacaccacacctattccaaaattgaccacatacttggaagtaaagctctcctcagcaaatgtgaaagaacagagattataacaaactatctctcagaccacagtgcaatcaaactagaactcaggattaagaatctcactcaaaaccgctcaactacatggaaactgaacaacctgctcctgaatgactactgggtacataacgaaatgaaggcagaaataaagatgttctttgaaaccaatgagaacaaagacacaacataccagaatctctgggatgcattcaaagcagtgtgtagagggaaatttatagcactaaatgcccacaagagaaagcaggaaagatccaaaattgacaccctaacatcacaattaaaagaactagaaaagcaagagcaaacacattcaaaagctagcagaaggcaagaaataactaaaatcagagcagaactgaaggaaatagagacacaaaaaacctttcaaaaaattaatgaatccaggagctggttttttgaaaggatcaacaaaattgatagaccgctagcaagactaataaagaaaaaaagagagaagaatcaaatagacacaataaaaaatgataaaggggatatcaccaccaatcccacagaaatacaaactaccatcagagaatattacaaacacctctacgcaaataaactagaaaatctagaagaaatggataaattcctcgacacaaacaccctcccaagactaaaccaggaagaagttgaatctctgaatagaccaataacaggatctgaaattgtggcaataatcaatagtttactaaccaaaaagagtccaggaccagatggattcacagccgaattctaccagaggtacaaggaggaactgctgggcagagacacaaccaaaaaagagaattttagaacaatatccttggtgaacattgatgcaaaaatcctcaataaaatactggcaaaacgaatccagcagcacgtcaaaaagcttatccactatgatcaagtgggcttcatccctgggatgcaaagctggttcaatatacgcaaatcaataaatgtaatccagcatataaagagagccaaagacagaaaccacatgattatctcaatagatgcagaaaaagcctttgacaaaattcaacaacccttcatgctaaaaactctcaataaattaggtattgatgggacgtatttcaaaataataagagttatctatgacaaacccacagccaatatcatactaaatgggcaacaactggaagcattccctttgaaaactggcacaagacagggatgccctccctcaccactcctgttcaacatagtgttggaagttctggccagggcaattaggcaagagaaggaaataaagggtattcaattaggaaaagaggaagtcaaattgtccctgtttgcagaccacatgattgtatatctagaaaaccccattgtctcagcccaaaatctccttaagctgataagcaacttcagcaaagtctcaggatacaaaatcaatgtacaaaaatcacaagcattcttatacaccaacaacagacaaacagagagccaaatcatgagtgaactcccattcacaattgcttcaaagagaataaaatacctaggaatccaacttacaagggatgtgaaggacctcttcaaggagaactacaaaccactgctcaaggaaataaaagaggatacaaacaaatggaagaacattccatgctcatgggtaggaagaatcaatatcgtgaaaatggccatactgcccaaggtaatttatagattcaatgccatccccatcaagttaccaatgcctttcttcacagaattggaaaaaactactttaaggttcatatggaaccaaaaaagagcctgcatcgccaaggcaatcctaagccaaaagaacaaagctggaggcatcacactacctgacttcaaactatactacaaggctacagtaaccaaaacagcatggtactggtaccaaaacagagatatagatcaatgcaacagaacagagccctcagaaataacgctgcatatctgcaactatctgatctttgacaaacctgagaaaaacaagcaatggggaaaggattccctatttaataaatggtgctgggaaaactggctagccatatgtagaaagctgaaactggatcccttccttacaccttatacaaaaatcaattcaagatggattaaagacttaaacgttagacctaaaaccataaaaaccctagaagaaaagctaggcattaccattcaggacataggcattggcaaggacttcatgtctaaaacaccaaaagcaatggcaacaaaagacaaaattgacaaatgggatctaattaaactaaagagcttctgcacagcgaaagaaactaccatcagagtgaacaggcaacctacaaaatgggaggaaattttcgcaacctactcatctgacaaagggctaatatccagaatctacaatgggctcaaacaaatttacaagaaaaaaacaaacaaccccatcaaaaagtgggcgaaggacatgaacagacacttctcaaaagaagacatttatgcagctaaaaaacacgtgaaaaaatgctcatcatcactggccatcagagaaatgcaaatcaaaaccacaatgagataccatctcacaccagttagaatggcaatcattaaaaagtcaggaagcaacagatgctggagaggatgtggagaaataggaacacttttacactgttggtgggactgtaaactagttcaaccattgtggaagtcagtgtggcgattcctcagggatctagaactagaaataccatttgacccagccatcccattactgggtatatacccaaacgactataaatcatgctgctataaagacacatgcacattgagtctaccagaaatccgcaactgcccaacgaaaagtgtcccagtccccttctctgttgatgaaactcagtatcatgttgaagatactagtcctgtaagctggcaagtaaaagttctaggcaagcatatacatcagggaagcagctatgaagatgtttggctgcctcagcgcatgcaaggaaaactaacaaacagaaaggacatccacaccaaaaacccatctgtacatcaccatcatcaaagaccaaaagtagataaaaccacaaagatggggaaaaaacagaacagaaaaactggaaactctaaaaagcagagcgcctctcctcctccaaaggaacgcagttcctcaccagcaatgcaacaaagctggacggagaatgactttgacgagctgagagaagaaggcttcagacgatcaaattactctgagctacgggaggacattcaaaccaaaggcaaagaagttgaaaactttgaaaaaaatttagaagaatgtataactagaataaccaatacagagaagtgcttaaaggagctgatggagctgaaaaccaaggctcgagaactacgtgaagaatgcagaagcctcaggagccgatgcgatcaactggaagaaagggtatcagcaatggaagatgaaatgaatgaaatgaagcgagaagggaagtttagagacaaaagaataaaaagaaatgagcaaagcctccaagaaatatgggactatgtgaaaagaccaaatctacgtctgattggtgtacctgaaagtgatgtggagaatggaaccaagttggaaaacactctgcaggatattatccaggagaacttccccagtctagcaaggcaggccaacgttcagattcaggaaatacagagaacgccacaaagatactcctcgagaagagcaactccaagacacataattgtcagattcaccaaagttgaaatgaaggaaaaaatgttaagggcagccagagagaaaggtcgggttaccctcaaaggaaagcccatcagactaacagcggatctctcggcagaaaccctacaagccagaagagagtgggggccaatattcaacattcttaaagaaaagaattttcaacccagaatttcatatccagccaaactaagcttcataagtgaaggagaaataaaatactttatagacaagcaaatgctgagagattttgtcaccaccaggcctgccctaaaagagctcctgaaggaagcgctaaacatggaaaggaacaaccggagaaagcaggaaagatccaaaattgacaccctaacatcacaattaaaagaactagaaaagcaagagcaaacacattcaaaagctagcagaaggcaagaaataactaaaatcagagcagaactgaaggaaatagagacacaaaaaacccttcaaaaaatcaatgaatccaggagctggttttttgaaaggatcaacaaaattgatagaccgctagcaagactaataaagaaaaaaagagagaagaatcaaatagacacaataaaaaatgataaaggggatatcaccactgatcccacagaaatacaaactaccatcagagaatactacaaacacctctacgcaaataaactagaaaatctagaagaaatggatacattcctcgacacatacactctcccaagactaaaccaggaagaagttgaatctctgaatagaccaataacaggctctgaaattgtggcaataatcaatagtttaccaaccaaaaagagtccaggaccagatggattcacagccgaattctaccagaggtacaaggaggaactggtaccattccttctgaaactattccaatcaatagaaaaagagggaatcctccctaactcattttatgaggccagcatcattctgataccaaagccgggcagagacacaaccaaaaaagagaattttagaccaatatccttgatgaacattgatgcaaaaatcctcaataaaatactggcaaaccgaatccagcagcacatcaaaaagcttatccaccatgatcaagtgggcttcatccctgggatgcaaggctggttcaatatacgcaaatcaataaatgtaatccagcatataaacagagccaaagacaaaaaccacatgattatctcaatagatgcagaaaaagcctttgacaaaattcaacaacccttcatgctaaaaactctcaataaattaggtattgatgggaagtatttcaaaataataagagctatctatgacaaacccacagccaatatcatactgaatgggcaaaaactggaagcattccctttgaaaactggcacaagacagggatgccctctctcaccgctcctattcaacatagtgttggaagttctggccagggcaatcaagcaggagaaggaaataaagggtattcagttaggaaaagaggaagtcaaattgtccgtgtttgcagacgacatgattgtttatctagaaaaccccatcgtctcagcccaaaatctccttaagctgataagcaacttcagcaaagtctcaggatacaaaatcaatgtacaaaaatcacaagcattcttatacaccaacaaccgacaaacagagagccaaatcatgagtgaactcccattcacaattgcttcaaagagaataaaatacctaggaatccaacttacaagggatgtgaaggacctcttcaaggagaactacaaaccactgctcaaggaaataaaagaggacacaaacaaatggaagaacattccatgctcatgggtaggaagaatcaatatcgtgaaaatggccatactgcccaaggtaatttacagattcaatgccatccccatcaagctaccaatgactttcttcacagaattggaaaaaactactttaaagttcatatggaaccaaaaaagagcccgcatcgccaagtcaatcctaagccaaaagaacaaagctggaggcatcacactacctgacttcaaactatactacaaggctacagtaaccaaaacagcatggtactggtaccaaaacagagatatagatcaatggaacagaacagagccctcagaaataatgccgcatatctacaactatctgatctttgacaaacctgagaaaaacaagcaatggggaaaggattccctatttaataaatggtgctgggaaaactggctagccatatgtagaaagctgaaactggatcccttccttacaccttatacaaaaatcaattcaagatggattaaagatttaaacgttagacttaaaaccataaaaaccctagaagaaaacctaggcattaccattcaggacataggcgtaggcaaggacttcatgtccaaaacaccaaaagcaatggcaacaaaagccaaaattgacaaatgggatctaattaaactaaagagcttctgcacagcaaaagaaactaccatcagagtgaacaggcaacctacaacatgggagaaaattttcgcaacctactcatctgacaaagggctaatatccagaatctacaatgaactcaaacaaatttacaagaaaaaaacaaacaaccccatcaaaaagtgggcaaaggacatgaacagacacttctcaaaagaagacatttatgcagccaaaaaacacatgaagaaatgctcatcatcactggccatcagagaaatgcaaatcaaaaccactatgagatatcatctcacaccagttagaatggcaatcattaaaaagtcaggaaacaacagacgcacagcaactttaagtttgctgccagctatacgtcatgaaagggaagcttttcatcaaagggaagaagaaaaggaagggggaagaatcctacttttacaaaacagagtaattctttgctcctgctccctttgcccacatctctcacctgcgtccaaaccaaaacacaggggcctaggtcgctttaagtcacaaagcacctctatgttctcaggtgtgctcagcgttcggaattctctgcatgctcctcaggttgtttcctggttgcagcgctaa

SEQ ID NO: 14948 - DNA, 3259 bp, Homo sapiens
  SIMILAR (64)..(1290): 981254mologous to Homo sapiens putative p150,accession number U93569,Smith-Waterman Score=2081.
atggaggaagatctaccaagcaaatggaaaacaaaaaaaggcaggggttgcaatcctagtctcgataaaacagactttaaaccaacaaagatcaaaagagacaaagaaggccattacataatggtaaagggatcaattcaacaagaggagctaactatcctaaatatttatgcacccaatacaggagcacccagattcataaagcaagtcctgagtgacctacaaagagacttagactcccacacattaataatgggagactttaacaccccactgtcaacattagacagattaatgagacagaaagtcaacaaggatacccaggaattgaactcagctctgcaccaagtggacctaatagacatctacagaactctccaccccaaatcaacagaatatacatttttttcagcaccacaccacacctattccaaaattgaccacatacttggaagtaaagctctcctcagcaaatgtaaaagaacagaaattataacaaactatctctcagaccacagtgcaatcaaactagaactcaggattaagaatctcactcaaagccgctcaactacatggaaactgaacaacctgctcctgaatgactactgggtacataacgaaatgaaggcagaaataaagatgttctttgaaaccaacgagaacaaagacaccacataccagaatctctgggacgcattcaaagcagtgtgtagagggaaatttatagcactaaatgcctacaagagaaagcaggaaagatccaaaattgacaccctaacatcacaattaaaagaactagaaaagcaagagcaaacacgttcaaaagctagcagaaggcaagaaataactaaaatcagagcagaactgaaggaaatagagacacaaaagacccttcaaaaaatcaatgaatccaggagctggttttttgaaaggatcaacaaaattgatagaccgttagcaagactaataaagaaaaaaagagagaagaatcaaatagacacaataaaaaatgataaaggggatatcaccactgatcccacagaaatacaaactaccatcagagaatactacaaacacctctacgcaaataaactagaaaatctagaagaaatggatacattcctcgacacatacactctcccaagactaaaccaggaagaagttgaatctctgaatagaccaataacaggatctgaaattgtggcaataatcaatagtttaccaaccaaaaagagtccaggaccagatggattcacagccgaattctaccagaggtacaaggaggaactgcatataaacagagccaaagacaaaaaccacatgattatctcaatagatgcagaaaaagcctttgacaaaattcaacaacccttcatgctaaaaactctcaataaattaggtattgatgggacgtatttcaaaataataagagctatttatgacaaacccacagccaatatcatactgaatggggccaaaaactggaagcattcccctttgaaaaactggcacaagaacagggatgcccctctctcacccactccctattcaacatagtgttggaagttctggcccgggcaattaggcaggataaggaaataaagggtattcaattaggaaaagaggaagtcaaattgtccctgtttgcagacgacatgactgtatgtatagaaaaccccattgtctcagcccaaaatctccttaagctgataagcaacttcagcaaagtctcaggatacaaaatcaatgtacaaaaatcacaagcattcttatacaccgataacagacaaacagagagccaaatcatgagtgaactcccattcacaattgcttcaaagagaataaaatacctaggaatccaacttacaagggatgtgaaggacctcttcaaggagaactacaaaccactgctcaaggaaataaaagaggatacaaacaaatggaagaacattccatgctcatgggtaggaagaatcaatattgtgaaaattggccataatgcccaaggtaatttatagattcaatgccatccccatcaagctaccaatgcctttcttcacagaattggaaaaaactactttaaagttcatatggaaccaaaaaagagcccgcatcaccaagtcaatcctaagccaaaagaacaaagctggaggcatcacactacctgacttcaaactatactacaaggctacagtaaccaaaacagcatggtactggtaccaaaacagagatatagatcaatggaacagaacagagccctcagaaataacaccgcatatctacaactatctgatctttgacaaacctgagaaaaacaagcaatggggaaaaggattccctattcaataaatggtgctgggaaaactggctagccatatgtagaaagctgaaactggatcccttccttacaccttatacaaaaatgaattcaagatggattaaagacttaaacgttagacctaaaaccataaaaaccctagaagaaaacctaggcattaccattcaggacataggcatgggcaaggacttcatgtctaaaacaccaaaagcaatggcaacaaaagccaaaattgacaaatgggatctaattaaactaaagagcttctgcacagcaaaagaaactaccatcagagtgaacaggcaacctacaaaatgggagaaaattttcccaacctactcatctgacaaagggctaatatccagaatctacaatgaactccaacaaatttacaagaaaaaaacaaacaaccccatcaaaaagtgggcgaaggacatgaacagacacttctcaaaagaagacatttatgcagccaaaaaacacatgaaaaaatgctcatcatcgctggccatcagagaaatgcaaatcaaaaccgcaatgagataccatctcacaccagttagaatggcaatcattaaaaagtcaggaaacaacaggtgctggagaggatgtggagaaataggaacacttttacactgttggtgggaccgtaaactagttcaaccattgtggaagtcagtgtggcgattcctcagggatctagaactagaaataccatttgacccagccatcccattactgggtatatacccaaatgactataaatcatgctgctataaagacacatgcacacagctttcagctgacgagaattgtgctgatagcatttggaggggaagggatgactgcgaacacctctgcatacccactggaggtcaaggttttggggatgaacaggaagtaccagcagggaatgattag

SEQ ID NO: 14949 - DNA, 3509 bp, Homo sapiens
  SIMILAR (1359)..(3182): 961254mologous to Homo sapiens putative p150,accession number U93574,Smith-Waterman Score=3052.
atggagctgaaaaccaaggctcgagaactacgtgaagaatgcagaagcctcaggagcccatgcaatcaactggaagaaagggtatcagcgatggaagatgaaatgaatgaaatgaagcgagaagggaagtttagagataaaagaataaaaagaaatgagcaaagcctccaagaaatatgggactttgtgaaaagaccaaatctacgtctgattggtgtacctgaaagtgatggggagaatggaaccaagttggaaaacactctgcaggatattatccaggagaacttccccaatctagcaaggcaggccaacattcagattcaggaaatacagagaacgccacaaagatactcctcgagaagagcaactccaagacacataattgtcagattcaccaaagttgaaatgaaggaaaaaatgttaagggcagccagagagaaagcaccacaccacacctattccaaaattgaccacatacttggaagtaaagttctcctcagcaaatgtaaaagaacagaaattataacaaactatctctcagaccacagtgcaatcaaactagaactcaggataaagaatctcactcaaaaccactcaactacatggaaactgaacagcctgctcctgaatgactactgggtacacaacgaaatgaaggcagaaataaagatgttctttgaaaccaacgagaacaaagacacaacataccagaatctctgggacacattcaaagcagtgtgtagagggaagtttatagcactaaatgcccacaagagaaagcaggaaagatccaaaattgacaccctaacatcacaattaaaagaactagaaaagcaagagcaaacacattcaaaagctagcagaaggcaagaaataactaagatcagaggagaactgaaggaaatagaggcacaaaaaacccttcaaaaaatcaatgaatacaggagctggttttttgaaaggatcaacaaaatagatagaccgctagcaagactaataaagaaaaaaagagagaagaatcaaatagacacaataaaaaatgataaaggggatatcaccactgatcccacagaaatacaaattaccatcagagaatactacaaacacctctacgcaaataaactagaaaatctagaagaaatggataaattcctcgacacatacactctcccaagactaaaccaggaagtagttgaatctctgaagagaccaataacaggagctgaaattgtggcaataatcaatagcttaccaaccaaaaagagtccaggaccagatggattcacagccgaattctaccagaggtacaaggaggaactgcatcatcctgataccaaagcctggcagagacacaacaaaaaaaagagaattttagaccaatatccttgatgaacattgatgcaaaaatcctcaataaaatactggcaaaccgaatccagcagcacatcaaaaagcttatccaccatgatcaagtgggcttcatccctgggatgcaaggctggttgaatatatgcaaatcaataaatgtaatccagcatataaacagagccaaagacaaaaaccacatgattatctcaatagatgcagaaaaagcctttgacaaaattcaacaacccttcatgctaaaaactctcaataaattaggtattgatgggatgtatttcaaaataataagagctatctatgacaaacccacagccaatatcatactgaatgggcaaaaactggaagcattccctttggaaactggcacaagacagggatgccctctctcaccactcctattcaacatagtgttggaagttctggccagggcaattaggcaggagaaggaaataaagggtattcaattaggaaaagaggaagtcaaattgtccctgtttgcagatgacatgattgtatatctagaaaaccccattgtctcagcccaaaatctccttaagctgataagcaacttcagcaaagtctcaggatacaaaatcaatgtgcaaaaatcacaagcattcttatacaccaacaacagacaaacagagagacaaatcatgagtgaactcccattcacaattgcttcaaagagaataaaatacctaggaatccaacttacaagggatgtgaaggacctcttcaaggagaactacaaaccactgctcaaggaaataaaagaggatacaaacaaatggaagaacattccatgctcatgggtaggaggaagaatcaatctcgtgaaaatggccatactgcccaaggtaatttacagattcaatgccatccccatcaagctaccaatgactttcttcacagaattggaaaaaactactttaaagttcatatggaaccaaaagagagccctcattgccaagtcatccctaagccaaaagaacaaaactggaggcatcacgctacctgacttcaaactatactacaaggctacagtaaccaaaacatcatggtactggtaccaaaacagagatatagatcaatggaacagaacagagccctcagaaataatgccacatatctacaactatctgatctttgacaaacctgacaaaaacaagcaatggggaaaggattccctatttaataaatggtgctgggaaaactggctagccatatgtacaaagctgaaactggatcccttccttacaccttatacaaaaatcaattcaagatggatcaaagatttaaacgttagacctaaaaccataaaaaccctagaagaaaacctaggcattaccattcaggacataggcgtgggcaaggacttcatgtccaaaacaccaaaagcaatggcaaccaaagccaaaattgacaaatgggatctaattaaactaaagagcttctacacagcaaaagaaactaccatcagagtgaacaggcaacctacagaatgggagaaaatttttgcaacctactcatctgacaaagggctaatatccagaatctacaatgaactcaaacaaatttacaagaaaaaaacaaacaaccccatcaaaaagtgggcgagggacatgaacagacacttctcaaaaaaagacatttatgcagccaaaaaacacatgaaaaaatgctcatcatcactggccatcagagaaatgcaaatcaaaaccactatgagatatcatctcacaccagttagaatggcaatcattaaaaagtcaggaaacaacagaatcagaaggcatttccagccaagatcagccatgttcttctgctgctgccctgggggcgagggctcagggctgcagtgggagctgctgctggcagcatggactgtgctcccctacccctgccctgcagccacagttgggagattcctcaagcaggcacagactgctgaccattccttcctgggccatgtttggagggtgcccagcagcaggagctggactgataaagaaatcctgagcttggtcgtcaacagacagaaccaggaagttgtgcagctcatagggggcctctgtgggacacacaccatctcgcccacacagcacccagccacgggttga

SEQ ID NO: 14950 - DNA, 4787 bp, Homo sapiens
  SIMILAR (1)..(1755): 911254mologous to Homo sapiens putative p150,accession number U93572,Smith-Waterman Score=2740.
atgtaccaagcaaatggaaaacaaaaaaaggcaggggttgcaatcctagtctctgataaaacagactttaaaccaacaaagatcaaaagagacaaagaaggccattacataatggtaaagggatcaattcaacaagaagagctaactatcctaaatatatatgcacccaatacaggagcacccacattcatacagcaagtcctgagtgatctacaaagagacttagactcccacacattaataataggagactttaacaccccactgtcaacatcagacagatcaacgagacagaaagtcaacaaggatacccaggaattgaactcagctctgcaccaagcagacctaatagacatctacagaaccctccaccccaaatcaacagaatatacatttttttcagcaccacaccacacctattccaaaattgaccacatacttggaagtaaagcactcctcagcaaatgtaaaagaacagaaattataacaaactatctctcagaccacagtgcaatcaaactagaactcatgattaagaatctcactcaaaaccactcaaccatatggaaactgaacaacctgctcctgaatgactactgggtacataaggaaatgaaggcagaaataaagatgttctttgaaaccaacgagaacaaagacacaacataccagaatctctgggacacattcaaagcagtgtgtagagggaaatttatagcactaaatgcccacaagagaaagcaggaaagatccaaaattgacaccctaacatcacaattaaaagaactagaaaagcaagagcaaacactttcaaaagctagcagaaggcaagaaataactaaaatcagagcagaactgaaggaaatagagacacaaaaaacccttcaaaaaattaacgaatccaggagcaggttttttgaaaggatcaacaaaattgatagcctgctagcaagactaataaagaaaaaaagagagaagaatcaaatagatgcaataaaaaatgataaaggggatatcaccaccaatcccacagaaatacaaactaccatcagagaatactacaaacacctctacgcaaataaactagaaaatctagaagaaatggataaattcctcgacacatacactctcccaagactaaaccaggaagaagttgaatctctgaatagaccaataacgggagctgaaattgtggcaataatcaatagcttaccaaccaaaaagagtccaggaccagatggattcacagccgaattctaccagaggtacaaggaggaacaggtaccattccttctgaaactattccaatcaatagaaaaagagggaatcctccctaactcattttatgtgtccagcatcatcctgataccaaagccgggcagagacacaaccaaaagagagaattttagaccaatatccttgatgaacattgatgcaaaaatcctcaataaaatactggcaaaccgaatccagcagcacatcaaaaagcttatccaccatgatcaagtgggcttcatccctgggatgcaaggctggttcaatatatgcaaatcaataaatgtaatccagcatataaacagaaccaaagacaaaaaccacatgattatctcaatagatgcagaaaaggcctttgacaaaattcaacaacctttcatgctaaaaactctcaataaattagatattgatgggttggaagttctggccagggcaatcaggcaggagaaggaaataaagggcattcaatcaggaaaagaggaagtcaaattgtccctgtttgcagatgacatgattgcatatctagaaaaccccatcgtctcagcccaaaatctccttaagctgataagcaacttcaacaaagtctcaggatacaaaatcaatgtgcaaaaatcacaagcattcttatgcaccaataacagacaaacagaaagccaaatcatgagtgaactcccattcacaattgcttcaaagagaataaaatacctaggaatccaacttacaagggatgtgaaggacctccttcaaggagacctacaaaccactgctcaatgaaataaaagaagatacaaacaaatggaacaacattccatgctcatgggtaggaagaatcaatatcatgaaaatggccatactgcccaaggtaatttatagattcagtgccatcgccatcaagctaccaatgactttcttcacagaactggaaaaaactactttaaagttcatatggaaccaaaaaagagcccgcattgccaagtcaatcctaagccaaaagaacaaagccggaggcatcatgctacctgacttcaaactatactacaaggctacagtaaccaaaacagcatggtactggtaccaaaacagagatattgatcaatggagcagaacagagccctcagaaataacaccgcatacctacaactatctgatctttgacaaacctgagaaaaacaagcaatggggaaaggattccctatttaataaatggtgctgggaaaactggctagccatatgtagaaagctgaaactggatcccttccttacaccttatacaaaaatcaattcaagatggattaaagatttaaatgttagacctaaaaccataaaaaccctagaagaaaacctaggcattaccattcaggacataggcatgggcaaggacttcatgtccaaaacaccaaaagcaatggcaacaaaagccaaaattgacaaatgggatctaattaaactaaagagcttctgcacagcaaaagaaactaccatcagagtgaacaggcaacctacaacatgggagaaaattttcacaacctactcatctgacaaagggctaatatccagaatctacaatgaactcaaacaaatttacaagaaaaaaacaaacaaccccatcaaaaagtgggtgaaggacatgaacagacacttctcaaaagaagatatttatgcagccaaaaaacacatgaaaaaatgctcatcatcactggccatcagagaaatgcaaatcaaaagcttccagaggaaggatcaggcagcaatatttgctattctgcagcctccactggtgataaccaggcaaacagggtctggagtggacctgaagcaaactccaacagacctgaagctgagggacctaactgttagaagaaaaatgaacaaacagaaaggacatccacaccaaaaccccatctctagcagaagacaagaaataactaagatcagagcagaactgaagaagatagagacacaaaaacccttcaaaaaaatcaatgaatccaggagctggttttttgaaaagatcaacaaaattgatagactgctagcaagactaataaagaagaaaatagagaagaatcaaatagatgcaataaaaaatgataaagggaatatcaccaccaatcccacagaaatacaaactaccatcagagaatactataaacacctctatgcaaataaactagaacacctagaagaaatggataaattcctggacatatacaccctcccaagactaaaccaggaagaagttgaatctgtgaatagaccaataacaggttctgaaattgaggcaataattaatagtctaccaaccaaaaaaagtccaggaccagacagattcacagctgaactctaccagaggtacaaagaggagctggtaccattccttctgaaactattccaatcaatagaaaaagagggaatcctccctaattcattttatgaggccagcatcatcctgatatcaaagcctggcagagacacaacaaaaaaagagaattttagaccaatatccctgatgaacatcgatgcaaaaatcctcaataaaatactggcaaaccaaatccagcagcacatcaaaaagcttatccaccaccatcaagttggcttcatccctgggatgcaaggctggttcaacatactcaaatcaataaacgtaatccatcatataaacagaaccaaagacaaaaaccacatgattatctcaatagaagcagaaaaggcctttgacaaaattcaacagccctttatgctaaaaactctcaataaactaggtattgatgggacatatctgacatatctcaaaataataagagctatttatgacaaacccacagccaatatcatactgaatgggcaaaaactggaagcattcccttttaagactggcacaagacagggatgtcctctctcaccactcctattcaacatagtgttggaagctctggccagggcaatcaggcaagagaaagaaataaagggtattcaattaggaaaagaggatgtcaaattgtccctgtttgcagatgacatgattgtatatttagaaaaccccatcgtctcagcccaaaatctccttaagctgataagcaacttcagcgaagtctcaggatacaaaatcaatgtgcaaaaatcacaagcattcctatacaccaataacagacagacagagagccaaatcatgagtgaactcccattcacaattgcttcaaagagaataaaatacctaggaatacaacttacaagggatgtgaaggacctcttcaaggagaactacaaaccactgctcaatgaaataaaagaggacacaaacaaatggaagaacattccatgctcatggataggaagaatcaatattgtgaaaatggccatactgcccaagactctcaatcagaaattctcatactggttcagagtcaacaaacactacattcaccagaggacttttcccctcaaagagacagaattcaacaccatagcaacgctttataatggtgcttctccagcacagcaccaaaaag

SEQ ID NO: 14951 - DNA, 6506 bp, Homo sapiens
  SIMILAR (442)..(927): 751254mologous to Mus musculus Pro-Pol-dUTPase polyprotein,accession number Y12713,Smith-Waterman Score=713.
atggtgaagggatcaattcaacaagaggagctaactatcctaaatatttatgcacccaatacaggagcacccagattcataaagcaagtcctgagtgacctacaaagagacttagactcccacacattaataatgggagactttaacaccccactgtcaacattagacagatcaacgagacagaaagtcaacaaggatacccaggaattgaactcagctctgcaccaagcagacctaatagacatcaacagaactctccaccccaaatcaacagagtatacatttttttcagcaccacaccacacctattccaaaattgaccacatagttggaagtaaagctctcctcagcaaatgtaaaagaacagaaattataacaaactatctctcagaccacagtgcaatcaaactagaactcaggattaagaatctcactcaaagccgctcaactccatggaaactgaacaacctgctcctgaatgactactgggtacataacgaaatgaaggcagaaataaagatgttctttgaaaccaacaagaacaaagacaccacataccagaatctctgggacgcattcaaagcagtgtgtagagggaaatttatagcactaaatgcctacaagagaaagcaggaaagatccaaaattgacaccctaacatcacaattaaaagaactagaaaagcaagagcaaacacattcaaaagctagcagaaggcaagaaataacgaaaatcagagcagaactgaaggaaatagagacacaaaaaacccttcaaaaaatcaatgaatccaggagctggttttttgaaaggatcaacaaaattgatagaccgctagcaagactaataaagaaaaaaagagagaagaatcaaatagacacaataaaaaatgataaaggggatatcaccaccgatcccacagaaatacaaactaccatcagagaatactacaaacacctctacgcaaataaactagaaaatctagaagaaatggatacattcctcgacacatacactctcccaagactaaaccaggaagaagttgaatctctgaatagaccaataacaggctctgaaattgtggcaataatcaatagtttaccaaccaaaaagagtccaggaccagatggattcacagccgaattctaccagaggtacaaggaggaactgcatataaacagagccaaagacaaaaaccacatgattatctcaatagatgcagaaaaggcctttgacaaaattcaacaacgcttcatgctaaaaactctcaataaattagtgttggaagttctggccagggcaattaggcaggagaaggaaataaagggtattcaattaggaaaagaggaagtcaaattttccctgtttgcagacgacatgattgtatatctagaaaaccccattgtctcagcccaaaatctccttaagctgataagcaacttcagcaaagtctcaggatacaaaatcaatgtacaaaaatcacaagcattcttatacaccaacaacagacaaacagagagccaaatcatgagtgaactcccattcataattgcttcaaagagaataaaatacctaggaatccaacttacaagggatgtgaaggacctcttcaaggagaactacaaaccactgctcaaggaaataaaagaggatacaaacaaatgcaagaacattccatgctcatgggtaggaagaatcaatatcgtgaaaatggccatactgcccaaggtaatttacagattcaatgccatccccatcaagctaccaatgcctttcttcacagaattggaaaaaactactttaaagttcatatggaaccaaaaaagagcccgcatcgccaagtcaatcctaagccaaaagaacaaagctggaggcatcatgctacctgacttcaaaccatactacaaggctacagtaaccaaaacagcatggtactggtaccaaaagagagatatagatcagtggaacagaacagagccctcagaaataacgccgcatatctacaactatctgatctttgacaaacctgagaaaaacaagcaatggggaaaggattccctatttaataaatggtgctgggaaaactggctggccatatgtagaaagctgaaactggatcccttccttacaccttatacaaaaatcaattcaagatggattaaagacttaaacgttagacctaaaaccataaaaaccctagaagaaaacctaggcaataccattcaggacataggcatgggcaaggacttcatgtctaaaacaccaaaagcaatggcaacaaaagacaaaattgacaaatgggatctaattaaacttaagagcttctgtacagcaaaagaaactaccatcagagtgaacaggcaacctacaaaatgggagaaaattttcacaacatactcatctgacaaagggctaatatccagaatctacaatgaactcaaacaaatttacaagaaaaaaacaaacaaccccatcaaaaagtgggcaaaggatatgaacagacacttctcaaaagaagacatttatacagccaaaagacacatgaaaaaatgctcatcatcactagccatcagagaaattcaaatcaaacccacaatgagatactatctcacaccagttagaatggcgatcattaaaaagtcaggaaacaacaggtcacagcttcaaaatattgttcagagaacttgcagtgaaagcaacataaaaaggagagcagggatagaaaaaggaatccagtgggcaaaagatgccaactgttcccaagagagtccagtgcgaccatcgcaacaggtgggtgcccctctgggacgaagcttccagaggaaggatcaggcagcaatatttgctgttctgcagcctctgctggtgatacccaggcaaacaaggtctggagtggacctccagcacattccagcaggcctgcagcagaggggcctgactgttagaagaaaaactaacaaacagaaaggaatagcatcaacatcaacaaaagccacatccacacagaaaccccatccaaaagtcaccaacatcaaagaccaaagtattggaagttctggccagggcaatcaggcaagagaaagaaataaagggtattcaattaggaaatgaggaagtcaaattgtccctgcttgcagatgacatgattgtatatttagaaaaccccatcatctcagcccaaaatctccttaagctgataagcaagttcagcaaagtctcaggatacaaaatcaatgcgcaaaaatcacaagcattcctatacaccaataacagacaaacagagagccaaatcatgagtgaactcccattcacaattgctacaaggagaataaaatacctaggaatccaacttaacaagggatgtgaaggacctcttcaaggagaactacaaactactcactgatcaaggaaataagagaggacacaaacaaatggaaaaacattccatgctcatggataggaagaatgaatatcatgaaaatggccatactgcccaaagtaatttacagattcaagtttccattgacaacagatcaagaaaatgtggtcagattaacgagacagaaagttaacaagggtatccaggaattgaactcagctctgccccgagtggacctaatagacatctacagaactctccagcccaaatcaacagaatatacattcttttcagtaccacaccacaactattccaaaattgaccacatagttggaagtaaagcactcctcagcaaatgtaaaagaacagaaattataacaaactgtctctcagaccacagtgcaatcaaactagaactcaggattaagaagcacactcaaaaccgctcaactacatggaaactgaacaacctgctcctgaatgactactgggtacataacaaaatgaaggcagaaataaagatgttctttgaaaccaatgagaacaaagacacaacataccaaaatctctgggacacattcaaagcagtatgtagagggaaatttatagcactaaatgcccacaagagaaagcaggaaagatctaaaattgacaccctaacatcacaattaaaagaactagaaaagcaagagcaaacacattcaaaagctagcagaaggcaacaaataactaagatcagagcagaactgaaggaaatagagacacaaaaaaacccttcaaaaaatcaatgaatccaggagctggttttttgaaaggatcaacaaaattgatagaccgctagcaagactaataaagaagaaaagagagaagaatcaaatagacgcaataaaaaatgataaaggggatatcactaccagtcccacagaaatacaaacaaccatcagagaatactacaaacacctctacgcaaataaactagaagatctagaagaactggataaattcctcgaaacatacaccctcccaagactaaaccaggaagaaggtgactctctgaatagaccaataacaggatctgaaattgtggcaataatcaatagcttgccaaccaaaaagagtccaggaccagatggattcacagccgaattctaccagaggtacaaggaggaactggtaccattccttctgaaacgattccaatcaatagaaaaagagggaatcctccctaactcattttatgaggccaacatcatcctgataccaaagtcggccagagacacaaccaaaaaagataattttaggccaatatccttgatgaaccttgatgcaaaaatcctcaataaaatactggcaaaacgaatccagcagcacatcaaaaagcttatccaccatgatcaagtgggcttcatccctgggatgcaaggctgtgttggaagttctggccagggcaattaggcaggagaaggaaataaagggtattcaattaggaaaagaggaagtcaaattgtccctgtttgcagatgacatgattgtatatctagaaaaccccattgtctcagcccaaaatctccttaagctgataagcaacttcagcaaagtctcaggatacaaaatcaatgtacagaaatcacaagcattcttatacaccaataacagacaaacagagagccaaatcatgagtgaactcccattcacaattgcttcaaagagaataaaatacctaggaatccaacttacaagggatgtgaaggacctcttcaaggagaactacaaaccactgctcaatgaaataaaagaggatacaaacaaatggaagaacattccatgctcatgggtaggaagaatcaatatcgtgaaaatggccatactgcccaaggtaatttatagattcaatgccatccccatcaagctaccaatgactttcttcacagaattggaaaaaactactttaaagttcatatggaaccaaaaaagatcctgcatcgccaagtcaatcctaagccaaaagaacaaagctggaggcatcacactacctgacttcaaactatactacaaggctacagtaaccaaaacagcatggtactggtaccaaaacggagatatagatcaatggaacagaacagagccctcagaaataacgccgcacatctacaactatctgatctttgacaaacctgagaaaaacaagcaatggggaaaggattccctatttaataaatggtgctgtgaaaactggctagccatatatagaaagctgaaactggatcccttctttacaccttatacaaaaatcaattcaagatggactaaagacttaaatgttagacctaaaaccataaaaaccctagaagaaaacctaggcattaccattcaggacataggcatgggcaaggacttcatgtctaaaacaccaaaagcaacggcagcaaaagcccaaattgacaaatgggatctaattaaactaaagagcttctgcacagcaaaagaaactaccatcagagtgaataggcaacctacaaaatgggaggaaattttcgcaacctactcatctgacaaagggctgatatccagaatctacaatgaactcaaacaaatttacaagaaaaaaacaaacaaccccatcaaaaaaataaaagctggagagtgcagttttttagctgctgaagattctgagctgtgctgtagattagctagacattacaaaaagcccctcctgagtcagctaaacagtgaaatgaagttcctcaaagttggtttagcactgttaacgtggacccagaataaagttgagaaaagtcagctaccaattgaagaaaattctcagctttatggggcttatgtggttagatcccagaatggtacatccatcgacagcttgcactgtgcacctggagaagccacagatactcaatgccagcctgtgaaagcagccaggaaggaggctgtaccctgcaaagccacaggggtggagctgcccaagaccatgggaacccgcctcttgcatcagcatgacccagatgtgagacctggcgtcaaaggagatcattttggagctttaaggtttgactgccctgatggatttcggacttgcgtgtggctggtacatgctaaagatgcagacttttag

SEQ ID NO: 14952 - DNA, 7643 bp, Homo sapiens
  SIMILAR (1108)..(1350): 301254mologous to Gallus gallus avenaIII,accession number AB035523,Smith-Waterman Score=90.
atggagctgaaaaccaaggctcgagaactacgtgaagaatgcagaagcctcaggagccgacgcaatcaactggaagaaagggtatcagcaatggaagatgaaatgaatgaaatgaagcgagaagggaagtttagagaaaaaagaataaaaagaaatgagcaaagcctccaagaaatatgggactatgtgaaaagaccaaatctacgtctgattggtgtacctgaaagtgatgcggagaatggaaccaagttggaaaacactctgcaggatattatccaggaggacttccccaatctagcaaggcaggccaacgttcagattcaggaaatacagagaacgccacaaagatactcctcgagaagagcaactccaagacacataattgtcagattcaccaaagttgaaatgaagcaaaaaatgttaagggcagccagagagaaagactttaaaccaacaaagatcaaaagagacaaagaaggccattacataatggtaaagggatcaattcaacaagaggagctaactatcctaaatatatatgcacccaatacaggagcacccagattcataaagcaagtcctgagtgacctacaaagagacttagactcccacacattaataatgggagactttaacaccccactgtcaacattagacagatcaacaagacagaaagtcaacaaggatacccaggaattgaactcagctctgcaccaagcagacctaatagacatctacagaactctccaccccaaatcaacagaatatacatttttttcagcaccacaccacacctattccaaaattgaccacatagttggaagtaaagctctcctcagcaaatgtaaaagaacacaaattataacaaactatctctcagaccacagtgcaatcaaactagaactcaggattaagaatctcactcaaagccgctcaactacatggaaactgaacaacctgctcctgaatgactacttgggtacataacgaaatgaaggcagaaataaagatgttctttgaaaccaacgagaacaaagacacgacataccagaatctctgggacgcattcaaagcagtgtgtagagggaaatttctagcactaaatgcccacaagagaaagcaggaaagatccaaaattgacaccctaacatcacaattaaaagaacaagaaaagcaagagcaaacacattcaaaagctagcagaaggcaagaaataactaaaatcagagcagaactgaaggaaatagagacacaaaaaaacctttcaaaaaatcaatgaatccaggagctggttttttgaaaggatcaacaaaattgatagaccgctagcaagactaataaagaaaaaaagagagaagaatcaaatagacacaataaaaaatgataaaggggatatcaccaaccgatcccacagaaatacacactaccatcagagaatactataaaaacctctacgcaaagaaactagaaaatctagaagaaatggataaattcctggagacatacaccctcccaagaccaaaccaggaagaagttgaatctctgaatagaccaataacaggatctgaaattgtggcaataatcaatagcttaccaaccaaaaagagtccaggaccagatggattcacagccgaattctaccagaggtacaaggaggaactggtaccattccttctgaaactattccaatcaatagaaaaagaaggaatcctccctaactcatttgatgaggccagcatcatcctgataccaaagctgggcagagacacaaccaaaaaagagaattttagaccaatacccttgatgaacactgatgcaaaaatcctcaataaaatactggcaaaccgaatccagcagcacatcaaaaagcttatccaccatgatcaagtgggcttcatccctgggatgcaaggctggttcaatgtacgcaaatcgataaatgtaatccagcatataaacagaaccaacgacaaaaaccacatgattatctcaatagatggagaaaaggcctttgacaaaattcaacaacccttcatgctaaaaactctcaataaattcggtattgatgggatgtatctcaaaataataagagctatctatgacaaactcacagccaatatcatactgaatgggcaaaaatgggaagcattccctttgaaaactggcacaagacagggatgccctctctcaccactcctattcaacatagtgttggaagttctggccagggcaattaggcaggagaaggaaaccaagggtattcaattaggaaaagaggaagtcaaattgtccctgtttgcagatgacatgattgtatatctagaaaaccccattgtctcagcccaaaatctccttaagctgataagcaacttcagcaaagtctcaggatacaaaatcaatgtacaaaaatcacaagcattcttatacaccaataacagacaaacagagagccaaatcatgagtgaactcccagttcacaattgcttcaaagagaataaaatacctaggaatccaacttacaagggatgtgaaggacctcttcaaggagaactacaaaccactgctcaaggaaataaaagaggatacaaacaaatggaagaacattccatgctcatgggtaggaagaatcaatatcgtgaaaatggccatactgcccaaggtaatttacagattcaatgccatccccatcaagctaccaatgactttcttcacagaattggaaaaaaactactttaaagttcatatggaaccaaaaaagagccctggcaaaaaattgccaagtcaatcctaagccaaaagaacaaagctagaggcatcacgctacctgacttcaaactatactacaaggctacagtaaccaaaacagcatggcactggtaccaaaacagcatggtactggtaccaaaacagagatatagatcaatggaacagaacagagccctcagaaataatgccgcatatctacactattctgatcctttggacaaacctttgcttgagaaaaacaagcaatggggaaaggattccctaatttataaaatggctgctggggaaaactggctagcccatatgtaggaagctgaacctggcatcccttcccttaccccttatacaaaaatcaattcaagatggattaaagatttaaacgttagacctaaaaccataaaaaccctagaagaaaacctaggcattaccattcaggacataggcgtgggcaaggacttcatgtccaaaacaccaaaagcaatggcaacaaaagccaaagttgacaaatgggatctaattaaactaaagagcttctgcacatctgcacagcaaaagaaactaccatcagagtgaacaggcaacctacaacatgggagaaaatttttgcaacctactcatctgacaaagggctaatatccagaatctacaatgaactcaaacaaatttacaagaaaaaaacaaacaaccccatcaaaaagtgggcgaaggacatgaacagacacttctcaaaagaagacatttatgcagccaaaaaacacatgaaaaaaatgctcatcatcactggccatcagagaaatgcaaatcaaaaccactatgagatatcatctcacaccagttagaatggcaatcattaaaaagtcaggaaacaacagagatcagagagctgggaagatcagtgaaagacttgtgattacctcagaaatgattgaaaatatccaatctgttaaggcatactgctgggaagaagcaatggaaaaaatgattgaaaacttaagacaaacagaactgaaactgactcggaaggcagcctatgtgagatacttcaatagctcagccttcttcttctcagggttctttgtggtgtttttatctgtgcttccctatgcactaatcaaaggaatcatcctccggaaaatattcaccaccatctcattctgcattgttctgcgcatggcggtcactcggcaatttccctgggctgtacaaacatggtatgactctcttggagcaataaacaaaatacaggatttcttacaaaagcaagaatataagacattggaatataacttaacgactacagaagtagtgatggagaatgtaacagccttctgggaggagggatttggggaattatttgagaaagcaaaacaaaacaataacaatagaaaaacttctaatggtgatgacagcctcttcttcagtaatttctcacttcttggtactcctgtcctgaaagatattaatttcaagatagaaagaggacagttgttggcggttgctggatccactggagcaggcaagacttcacttctaatggtgattatgggagaactggagccttcagagggtaaaattaagcacagtggaagaatttcattctgttctcagttttcctggattatgcctggcaccattaaagaaaatatcatctttggtgtttcctatgatgaatatagatacagaagcgtcatcaaagcatgccaactagaagaggacatctccaagtttgcagagaaagacaatatagttcttggagaaggtggaatcacactgagtggaggtcaacgagcaagaatttctttagcaagagcagtatacaaagatgctgatttgtatttattagactctccttttggatacctagatgttttaacagaaaaagaaatatttgaaagctgtgtctgtaaactgatggctaacaaaactaggattttggtcacttctaaaatggaacatttaaagaaagctgacaaaatattaattttgcatgaaggtagcagctatttttatgggacattttcagaactccaaaatctacagccagactttagctcaaaactcatgggatgtgattctttcgaccaatttagtgcagaaagaagaaattcaatcctaactgagaccttacaccgtttctcattagaaggagatgctcctgtctcctggacagaaacaaaaaaacaatcttttaaacagactggagagtttggggaaaaaaggaagaattctattctcaatccaatcaactctatacgaaaattttccattgtgcaaaagactcccttacaaatgaatggcatcgaagaggattctgatgagcctttagagagaaggctgtccttagtaccagattctgagcagggagaggcgatactgcctcgcatcagcgtgatcagcactggccccacgcttcaggcacgaaggaggcagtctgtcctgaacctgatgacacactcagttaaccaaggtcagaacattcaccgaaagacaacagcatccacacgaaaagtgtcactggcccctcaggcaaacttgactgaactggatatatattcaagaaggttatctcaagaaactggcttggaaataagtgaagaaattaacgaagaagacttaaaggagtgcttttttgatgatatggagagcataccagcagtgactacatggaacacataccttcgatatattactgtccacaagagcttaatttttgtgctaatttggtgcttagtaatttttctggcagagtgggctcctgtgcggcccgagcctccccgatgagcaccaccccctgctccacggcacccagtcccatcgaccacccaagggctgaggaatgtgagcgcacggcgcaggactggcaggcagctccacctgcagccccggtgtgggatccactaggtgaagccagctgggctcctgagtctggaactaacatttccattacacctggaaatgccacatttgtgacccgggtgcagggacaggcttggtttgcctcatgtatcactggtcatgatatgtctagtttaaaaacttccagtgtcgtggtattaaggagacaatctgaggcacttctaccagccaatttgacatgcaattggcaagattcttctgcccttgccaccttagaaagtgccctgtcccaggtcagacacaaaagattcacatttacacttatggtctttacaggctcagccatagtcattatggcaactgttagcattgctgttgtatctattactgaatcagtacaaacaactgcttttgtagataatctggccaaaaatatatgtgatgaacttctcctacaggacatggatgaagctggaaaccaacattctcagcaaaataacacaagaacagaaaaccaaacaccacatgttctcactcataagtgggagttgaacaatgagaacatacggatacagggaggggaacattacatactggggcctgttggtggcaggttgccaacatccaaactcgctgttgattgccagctcctgctccttgcagcagcccagcatgctctctgctggtgccaaaatacccttccaccaaaccccgctaacttctggaactgtcctagagggtttcctaccctagcaagtgagcttgcctatgtcagccctaaccttgctcttgtcattcagctgagccagaggaaaaaatttgagctattctggggtggtctacagagaaccatcttctttcccttcagtgttctcagaatattgactgttgatgaacaagccaatgatgtgagtgtggctgcagcaaggacccttcaaattttcagagatgacatgattgtatatctagaaaaccccattgtctcagcccaaaatctccttaagctgataagcaacttcagcaaaatctcaggatacaaaatcaatgtacaaaaatcacaagcattcttatacaccaacaacagacaaacagagagccaaatcatgagtgaactcccattcacaactgcttcaaagagaataaaatacctaggaatccaacttacaagggatgtgaaggacctcttcaaggagaactacaaatcactgctcaaggaaataaaagaggatacaaacaaatggaagaacattccatgctcatgggtaggaaaaatcaatatcgtgaaaatggccatactgcccaaggtaatttacagattcagtgccatccccatcaagctaccaatgactttcttcacagaattggaaaaaactactttaaagttcatatggaaccaaaaaagagcccacactgccaagtcaatcctaagtcaaaagaacaaagctggaggcatcacactacctgacttcaaactatactacaaggctacagtaaccaaaacagcatggtactggtaccaaaacagagatatagatcaatggaacagaacagagccctcagaaataacgctgcttatctacaactatctgatctttgacaaacctgagaaaaacaagcaatggggaaaggattccctatttaataaatggtgctgggaaaactggctagccatatgtaggaagctgaaactggatcccttccttataccttatacaaaaatcaattcaagatggattaaagacttaaatgttagacctaaaaccataaaaaccctagaagaaaacctaggcattaccattcaggacataggcatgggcaaggacttcttgtctaaaacaccaaaagcaatggcaacaaaagacaaaattgacaaatgggatctgattaaactaaagagcttctgcacagccaaagaaactaccatcagagtgaacaggcaacctacaaaatgggaaaaaattttcgcaacctactcatgtgaaaaagggctaatatccagaatctacaatgaactcaaataa

SEQ ID NO: 14953 - DNA, 4557 bp, Homo sapiens
  SIMILAR (829)..(449): 741254mologous to Homo sapiens ninjurin2,accession number AF205633,Smith-Waterman Score=422.
atggggaaaaaacagaacagaaaaactggaaactctaaaaagcagagcgcctctcctcctccaaaggaacgcagttcctcaccagcaacggaacaaagctggatggagaatgactttgacgagatgagagaagaaggcttcagacgatcaaattactctgagctacgggaggacattcaaaccaaaggcaaagaagttgaaaactttgaaaaaaatttagaagaatgtataactagaataaccaatacagagaagtgcttaaaggagctgatggagctgaaaaccaaggctcgagaactacgtgaagaatgcagaagcctcaggagccgatgcgatcaactggaagaaagggtatcagtgatggaagatgaaatgaatgaaatgaatgatggggagaatggaaccaagttggaaaacactctgcaggatattatccaggagaacttccccaatctagcaaggcaggccaacgttcagattcaggaaatacagagaacgccacaaagatactcctcgagaagagcaactccaagacacataattgtcagattcaccaaagtggaaatgaaggaaaaaatgttaagggcagccagagagaaagactttaaaccaacaaagatcaaaagagaaaaagaaggccattacataatggtaaagggatcaattcaacaagaagagctaactatcctaaaaatatatgcacccaatacaggagcaccaagattcacaaagcaagtcctgagtgacctacaaagagacttagactcccacacattaataatgggagactttaacaccccactgtcaacattagacacatcaacgagacagaaagtcaagaaggatacccaggaattgaactcagctctgcaccaagcggacctaatagacatctacagagctctccaccccaaatcaacagaatatacatttttttcagcaccacaccacacctattccaaaattgaccacatagttggaagtaaagctctcctcagcaaatgtaaaagaacagaaattataacaaactatctctcagaccacagtgcaatcaaactagaactcaggattaagaatctcactcaaaaccactcaactacatggaaactgaacaacctgctcctgaatgactactgggtacataacgaagtgaaggcagaaataaaggtgttctttgaaacgaaggagaacaaagacacaacataccagaatctctgggacgcattcaaagcagtgtgtagagggaaatttatagcactaaatgcccacaagagaaagcaggaaagatccaaaattgacaccctaacatcacaattaaaagaactagaaaagcaagagcaaacacattcaaaagctagcagaaggcaagaaataactaatatcagagcagaactgaaggaaatagagacacaaaaaacccttcaaaaaattaatgaatccaggagctgaaatacaaactaccatcagggaatactacaaacacctctatgcaaataaactagaaaatctagaagaaatggataaattcctggacacatacactctcccaagactaaaccaggaagaagttgaatccctgaatagaccaataacaggctctgaaattgtggcaataatcaatagcttaccaaccaaaaagattccaggaccagatggattcacagccgaattctaccagaggtacaaggaggaactggtaccattccttctgaaactattccaatcaatagaaaaagagggaatcctccctaactcattttatgaggccagcatcattctgataccaaagccaggcagagacacaacaaaaaaagagaattttagaccaatatccttgatgaacattgatgcaaaaatcctcaataaaatactagcaaaacgaatccagcagcacatcaaaaagcttatcccccatgatcaagtgggcttcatccctgggaatgcaaggctggttcaatatatgcaaatcaataaatgtaatccagcatataaacagaaccaaaggcaaaaaccacatgattatctcaatagatgcagaaaaggcctttgacaaaattcaacaacccttcctgctaaaaactctcaataaattaggtattgatgggacgtatctcaaaataataagagctatctatgacaaacccatagccaatatcatactgaatgggcaaaaactggaagcattccctttgaaaactggcacaagacagggatgccctctctcccccactcctattcaacatagtgttggaagttctggccagggcaattaggcaggagaaggaaataaagggtattcaattaggaaaagaggaagtcaaatttgtccctgttggcagatgacatgatggtatatcttagaaaatcccaatgtctcagccccaaaatcttctttaaggctggttaagcaacttcagcaaaagtcttcaggttacaaaatcaatgtgcaaaaatcaccaagcattcctatacaccaacaacagacaaacagagagccaaatcatgagtgaactcccatttcacaattgcttccaagagaattaaatacctaggaatccaccttacaagggacgtgaaggacctcttcaaggagaactacaaaccactgctcaacgaaataaaaagaggacacaaacaaatggaagaacattccatgctcatgggtaggaagaatcaatattgtgaaaaatggccatacttgcccaaggtaaatttatagattcaatgccatccccatcaagctaccaatgactgttttcacagaattggaaaaaaactactttaaagttcatacggaaccaaaaaaagagcccgtattgccaagtcaatcctaagccaaaagaataaagctggaggaggcatcgtggctacctgacctcaaactataccacaaggttacagtaaccaaaacagcatggtactggtaccaaagacagagataatagatcaatggaacagaacagagccctcagaaataagacaccatacatctacaaccatctgatctttgacaaacctgagaaaaacaagcaatgggggaaaggattccctatttaataaatggtgctgggaaaactggctagccatatgtaggagaaagctgaaactggatcccttccttacaccttatacaaaaattaattcaagatggattaaagacttaaatgttagacctaaaaccataaaaaccctagaagaaaacctaggcaataccattcaggacataggcatgggcaaggacttcatgtctacaacaccaaaagcaatggcaacaaaagccaaaattgacaaatgggatctaattaaactaaagagcttctgcacagcaaaagaaactaccatcacagtgaacaggcaacctacagaatgggagaaaatttttacaatctacccatctgacaaagggctaatatccagaatctacaaagaactcaaacaaatttacaagaaaaaaaaaaaaacaaccccatcaaaaagtggacgaaggcacatgaacagacacttctcaaaagaagacatttatgcagccaaaaaaacacatgaaaaaaatgctcatcatcactggccatcagagaaatgcaaatcaaaaccacagtgagataccatctcacaccagttagaatggcaatcatgaaaaaagtcaggaaacaacagaaccaatgacaaaaaccaagtgattatctcaatagatgcagcaaaggccttcgagaaaattcaacaccccttcatgctaaaaactctcaaatgaattaggtattgatgggacatattcttcaaaataataagagctatctatgacaaacccaccagccagtatcagacttgaatgggcaaaaactaggaaggattccctttgaaaaccggcacaagacaaggatgctctttctcaccactcctactcaacatagtattggaagttctggtcagggcaaacaggcaagagaaagaaagaaagcatattcaaataggaaaagaggaagtcaaattgtctctgtttgcagatgacatgattgtatatttagaaaaccccatcatctcagcccaaaatctccttactctgataagcaacttcggcaaagtttcaggatacaaaatcaatgtgcaaaaatcacaagcattcttatacaccaataacagacaaacagagagccaaatgatgagtgaactcccattcacaattgcttcaaagagaataaaatacctaggaatccaacttacaagggatgtgaaggacctcttcaaggagaactacaaaccactgctcaaggaaataaaagaggatacaaacaaatggaagaacattccacgctcatgggtaggaagaatcaatatcgtgaaaatggccatactgcccaagcaatcactggtgacacctccaggtaaaggagggactgaggcaaataaggtctgcagtggtcccccagcaaactgcagcagcccaattgaagaggggcttgactgtgtcaaagaaaaacaaacaaaaagaaagaaacaacatcaacaacaaaagaccccacaaaaatcccatccgaaggtcagcagcctcaaagatcccag

SEQ ID NO: 14954 - DNA, 1898 bp, Homo sapiens
  SIMILAR (787)..(1644): 961254mologous to Homo sapiens putative p150,accession number U93564,Smith-Waterman Score=1434.
atgtatagccgctttgatattgtggtcgccgagccgatttgcactttaaccactttcggtaaagaaaccgttgttagtgacagccaaacacgcacaacgaccactgatgacccgctacaggtgctccagcaggtgctggatcgcgcagacattcgcccaacgcataacgaagatttgccatttcagggcggcgcactggggttgtttggctacgatctgggccgccgttttgagtcactgccagacattgcggaacaagatatcgttctgccggatatggcagtgggtatctacgattgggcgctcattgtcgaccaccagcgtcatacagtttctttgctgagtcataatgatgtcaatgcccgtcgggcctggctggaaagccagcaattctcgccgcaggaagatttcacgctcacttccgactggcaatccaatatgacccgcgagcagtacggcgaaaaatttcgccaggtacaggaatatctgcacagcggtgattgctatcaggtgaatctcgcccaacgttttcatgcgacctattctggcgatgaatgccaggcattccttcagcttaatcacggcaaccgcgcgccatttagcgcttttttacgtcttgaacagggtgcaattttaaagctttcgccagagcggtttattctttgtgataatagtgaaatccagacccgcccgattaaaggcacgctaccacgcctgcccgatcctcaggaagatagcaaacaagcagtaaaactggcgaactcagcgaaagatcgtgccgaaaatctgatgattgtcgatttaatgcgtaatgatatcggtcgtgttgccgtagcaggttcggtaaaagtaccagagctgttcgtggtggaacccttccctgccgtgcatcatctggtcagcaccataacggcgcaactaccagaacagttacacgccagcgatctgctgcgcgcagcttttcctggtggctcaataaccggggctccgaaagtacgggctatggaaattatcgacgaactggaaccgcagcgacgcaatgcctggtgcggcacattggctatttgagcttttgcggcaacatggataccagtattactatccgcacgctgactgccattaacggacaaattttctgctctgcgggcggtggaattgtcgccgatagccaggaagaagcggaatatcaggaaacttttgataaagttaatcgtatcctgaagcaactggagaactatcgccgcgcgctgcgcgacctgaaagaagaggtcgctatacggctttcgccgtttgagttatcggcgttctgcagcccgtcgatagcgtccatggctaccaggtaccccaatggtcggcatattccgccggatctgcgtctccccaaggaacgcggtattatcatcgtctttaccggcaatggaaaaggcaaaaccaccgcggcatttggtacggcaacacgcgcagttggtcacggaaaaaaagtaggcgtcgtgcagtttattaaaggcacctggcctaatggcgaacgcaatctgctggagccacatggcgttgagtttcaggtgatggcaacgggctttacctgggatacacaaaaccgcgagtctgataccgccgcctgccgcgaagtctggcaacatgcaaagcggatgcttgctgattcctcactggatatggttttgcttgatgaactgacgtatatggtggcgtatgactatttgccactggaagaagtggtgcaggcgttaaatgaacgtccacatcaacagacggtgattatcacgggtcgtggttgtcatcgggatattcttgaactggcagatacggtaagtgaattacgccccgtcaaacatgcgtttgatgccggtgtaaaagcgcagatagggatcgattattaa

SEQ ID NO: 14955 - DNA, 1626 bp, Homo sapiens
  SIMILAR (1039)..(1389): 901254mologous to Escherichia coli Regulatory protein KdpD,accession number D90708,Smith-Waterman Score=547.
atggggcggctggcgggcggggggctgacccccccacctccctcccggacggaagatagcaaacaagcagtaaaactggcgaactcagcgaaagatcgtgccgaaaatctgatgattgtcgatttaatgcgtaatgatatcggtcgtgttgccgtagcaggttcggtaaaagtaccagagctgttcgtggtggaaccttccctgccgtgcatcatctgctgcaggcccatgggggacctgcaagggaagcaccctggaagtggtcccaagcacacgggcagctatgcatgcctcgacactagccacctcccctgtcatgcagagcttcagctgactccactgtgggccttaggggaaggaaacaccaagatctttgagaccctgaccttagaacagtactgtcacctccctcagtacgtgaccatcgtggtcagactgatgatatggagctctgactctggtgatgacaatgggaagaaggccaacaaccccaaccactgcaactgcatcatagaccagatcttcacaggcgggttgcagtcagacgtcacctgccaagtctgccaagactacacggctctcgtcaaaccaagacttatccaagctgtgagcatgaagatgctgcaccgaggtgacgtggatgcgtcagacagaaatctccccatgagtcgtgaggacagtgatgctcacgctgtggaagcacctgcatcagagtacacctgtgtactgaggccatctggcgtgcgcctcgttctctcaacgtgtgtcctgaatcgacctaggaataggagcgggatctgcagcaatatgaatgtggtctatgacgagcagatcgtgaaggccccttgctccacatgtaaacagtctcaaaacttttcttttgagctactgacagcttttaacaattcagcatactcctatgaacaaaatttggaacatatttgtttctctctacctgattactccagaatctggaaactatttatgagtattcttatggcaatacagttatttgcatcagtgctaactgctggaactggcattgatgttttcactaccgtcaacgttcagcatctggaaagtctgaatgatgtggtcagcggcgtcaccggaattcaggtacgggaaaccgtgcccgatccttttttcgatgccgccgacgacgtggtgctggtggacttgcccccggacgatctgcgccaggctagaaagaaggcaaagtctatattgccgggcagcggacgcgccattgaacattttttccgcaaaggtaatctgatcgccctgcgcgaactggcactgcgccgtactgccgatcgcgttgatgagcaaatgcgcgcctggcgggggcatcctggcgaagagaaagtgtggcacacgcgcgacgcatccttttatgcatcggccataacaccggcagcgaaaaactggtccgcgcagcgcggctggcgtcacggctgggtctttgtggcagatggtgttttccaaaatggccacagtgatatctcccatcccacatcctctttcctgcaaggtgactttgacacttctgttgagaggaagtgtagccccagacttgctgttggaacccagctgctgtgctatcaggaagtccgggctacatga

SEQ ID NO: 14956 - DNA, 1215 bp, Homo sapiens
  SIMILAR (457)..(1053): 871254mologous to Homo sapiens putative p150,accession number U93563,Smith-Waterman Score=949.
atgttctgcgtgtccagagcgtcacccagtctcttcaatcgtgtatccaggaatccagcggtcaatgttggtcccgcacggaagcgcataggcgatgtaccagatacaatctgcgcctgcgtctttcagttcgcgacggatttttggttaacagcttccgggtcataccaggctcactcttctgggtcgaatccagtcgcaccgacttccaggccgcgcatcagcttacggcatgcccagaaactgaaattcaaagcattacaggagcgggcaaaagaaaaaattgccgacattgccgagagccgcgaactcacggtggcggagcttgaagatcggttcaccgtcagctttgatgaaaccttaaaaccgtttgtgcgtgatgtttccggcagccgcctgaaagacctgcccaaaccgaacaaaagcgatgatgaaacgcgggcgaacgatgcggttaaccgctacaaattgctgaaaaaagatgcgcgtaccatcgccgcccagcaggtagcaaggctggaatccgccatgtgcctgcgccgccgctggtcgctggaaaacttccagctcttcctggttgagcatccgctggttcgtcacttaacccgccgtctgatttggggcgtttatagcgccgaaaaccagctactggcttgctttcgcgtagcagaagataacagctccagcaccgctgacgatgatcttttcaccctgccggaaggcgatatctctatcggcactcctcacgttctggaaatatcaccaacggatgctgccgccttgctttttgccgactacgaactgctaccaccgttccgccagctcgaccgtaacagctacgccctgacagaagccgagcgcaatgccagtgaactgacccgctgggcaggcagaaaatgcccgagtggtcgggtcatggggctggcgaataaaggctggataaagggcgaaccacaggatggaggctggatcggatggatgatcaaacctttgggtcgctggtcgttaatcatggaaatcgatgaaggctttgcggtaggcatgtcgccagccgaactcagcgctgagcagctcttaagcaagctgtggctatgggaaggcaaagcagaaagatatggctgggggagtaattcaacacaggaagcgcagttctccgtaatcgatgccatcaccgccagcgagctaattaacgatattgaagccctgtttgaataa

SEQ ID NO: 14957 - DNA, 1791 bp, Homo sapiens
  SIMILAR (448)..(1512): 951254mologous to Homo sapiens putative p150,accession number U93563,Smith-Waterman Score=1745.
atgttccgcccgttccgtgccggagaatatgttgacctgggcggcgtagccggtactgtgctgagtgtgcagattttctccaccaccatgcgtactgcagacggtaaaattatcgttattccgaacggtaaaattattgccggaaatattattaacttctcccgcgagccagttcgccgtaacgaatttattattggcgtggcgtatgattccgatatcgatcaggttaagcagatcctgaccaatattatccagtctgaagatcgcattttgaaagatcgcgaaatgactgtgcgcctgaacgaacttggtgcatcgtcgattaatttcgtggtccgcgtctggagcaacagcggcgatctgcaaaacgtgtactgggatgtgctggagcgtattaaacgtgaatttgatgccgccggtatcagcttcccgtacccgcaaatggatgtgactttaagcggttatggttggcgagaaacgccaaacgtagaagaagttttccaccgctgcggtctggaaggattaagttgccggatgatggaaacctccttctttatgtcgcatgagtcgttgatcctcggcaaacgcccgtggtatttgcgtctgcgcggcaagctgtacttgctgctgcaacgtaatgcgctgcgtgcaccagatcaatttgaaatcccgccaaacagggttatcgaactgggtactcagattaaggttaagaattttcgtctgcgcgaattagccggacctcacgtcttaaatataccaacggatgctgccgcctttggtcagctttttgccgactacgaactgctaccaccgttccgccagctcgaccgtaacagctacgccctgacagaagccgagcgcaatgccagtgaactgacccgctgggcaggcagaaaatgcccgagtggtcgggtcatggggctggcgaataaaggctggataaagggcgaaccacaggatggaggctggatcggatggatgatcaaacctttgggtcgctggtcgttaatcatggaaatcgatgaaggctttgcggttacagttatgatcatcgttaccggcggcgcgggctttatcggcagcaacatcgttaaagccctgaatgataaaggcatcaccgatattctggtggtggacaacctgaaagacggcaccaagtttgtgaacctggtggatctgaatatcgcagactatatggataaggaagacttcctgatccagattatggctggcgaagagttcggcgatgtcgaagcgattttccacgaaggcgcgtgctcttccaccaccgagtgggacggcaagtatatgatggataacaactatcaatactccaaggagctgctgcactactgcctggagcgtgaaatcccgttcctgtacgcttcttccgcagccacctacggcggacgcacctccgactttattgaatcccgcgagtacgaaaaaccgttgaacgtctacggttactcaaaattcctgtttgatgaatatgttcgtcaaatcctgcctgaagcgaactcgcagattgttggcttccgttatttcaacgtttatggaccgcgtgaaggccataaaggcagcatggcgagcgtcgctttccatctcaacacccagcttaacaacggtgaatcaccgaagctgtttgaaggtagcgagaacttcaaacgcgacttcgtctatgtgggcgacgtggctgatgtgaatctgtggttcctggaacatcggcgtttccggcatcttcaatctcggtactggtcgtgcggaatccttccaggcggtagctga

SEQ ID NO: 14958 - DNA, 3051 bp, Homo sapiens
  SIMILAR (1192)..(2142): 951254mologous to Homo sapiens p40,accession number U93564,Smith-Waterman Score=1562.
atgagacggcaagataccgggagaaggggccgtaaacggcgtgacgctggccgctggcagtggcgctactggggaaaagggagttttacaccgatgaatgccacctgggatgtcgcaggaaaaggtgagtggcatgacagcacgattacgctgaccgatctctccaccggtttcgaccagttacaatacggtacgatgacggtagaaaagccgcgattaattctcgacaagcccatcgtctgggtacgtgacgcacagcatccctcctttagcggcgcgctgtcactggacgccgggcaaacgctgttcactggcggcagtgtgttaccgccatcaaccttaaaatttagcgtcgatgggcgcgatcctacctatttcctctttaaaggcgatttacatgctggtgagattggcccggttcgggtaaatggtcgctgggacggtattcgtctgcgcggtaacgcctggtggcctaaacaatcactgaccgtattccagccgctggtgccacccgactggaagatgaacttacgcgatggtgaactgtatgctcaggttgcattttctgctgcgcctgaacaaggattccgcgcgggaggacacggcgtgttgaaaggcggtagtgcctggatgccagataatcaggttaacggtgtcgattttgtcctgcctttccgttttgccgatggagcctggcatctggggactcgcggccccgttacgttgcgaattgcgaaacagaggaaggaaatgcgtaataacaacctgcgtcagttcaaactgctggggccggatgtaggctttgactccatcaacgaccgtccgatggcggaagagctgtctaagttgctgagcaagcagaatgaagaaaacctgctgccgaaaaccattctgtactgcctgaacccgcgcgataacgaagtgctgggcaccatgatcgagaacggagcttcatttgctgctaacccgctctactttgacccgaaaaacattgttgaactggcgatcgaagcgggctgtaactgtgtggcgtcaacttacggcgtgctggcgtcggtatcgcggcgttatgcgcatcgcattccattcctcgtcaaacttaatcacaacgagacgctaagttacccgaatacctacgatcaaacgctgtatgccagcgtggagcaggcgttcaacatgggcgcggttgcggttggtgcgactatctattttggctcggaagagtcacgtcgccagattgaagaaatttctgcggcttttgaacgtgcgcacgagctgggtatggatggaggctggatcggattgatgatcaaacctttgggtcgctggtcgttaatcatggaaatcgatgaaggctttgcggtaggcatgtcgccagccgaactcagcgctgagcagctcttaagcaagctgtggctatgggaaggcaaagcagaaagatatggctgggggagaaagagcatggacaaggaattaccgcggctggcggataacgcccaactggaactgaaatataaaaaaggcaaaacgccgctcagtcatcgtcgctggccgggcgaaccagtgtccgttatcactggaagtctcatccagacattgggtgatgaattgctacaaaaagctgagaagaaaaaaaacattgtctggcgttatgagaatttttcactggagtggcagtccgccatcacgcaggccatcaacttgatcggcgaacacaaaccctcaatcccggcccggacaatggcggcgctagcctgtatcgcgcaaaatgacagccaacagttgctcgacgaaatcgtccaacaagaggggctggaatatgcgactgaggtggtgattgcacgccagtttattgcgcggtgttatgagagtgatcctctggtagtgacattgcagtatcaggacgaggattatggctatggttatcgctcagaaacctataacgaattcgatctccgactgcgtaagcatctctctctggcagaggaaagctgctggcagcgttgcgccgacaaactcattgccgcactaccaggaataaacaaagttcgccgcccttttattgcgctgatcctcccggaaaaaccagaaatagccaatgagttggtaggccttgaatgcccgcgaactcattttcattctaaggagtggttaaaagttgttgctaatgaccccacagcggtgagaaaactcgaacactactggagccaggatatatttagcgatcgagaagcagctacatgtcgcatgaaacactcggctacgcgctggccgcctttgccgaacaggctggggcatccgcctcgaagttgcatagaagtgggggctccggcaactcatcgatatcgccttctgggggttaaccccctgtcgtttctctcctccctttcccccgtgttttcaatcagcgtggcaaccgtcatcgggccaacgccgccgggaacaggcgtaatgtatgaggcgcgtttagccgcgtcttcaaaatatttgatttcaccgtccacgacgtgcatacgtagcgggcagcgactaccacagttaactgtacaggcgctccagataaccttttcgtctgattttgttggaatggcgctatcgacagcatatcgccacgaaaatcagcaggatgttttgaccgaaaaaggtcaccagcaaaatttttccgtaaacggtttttacggtgaatggctggcgaagtttgatatcaaagtcacctatacatggctggggattgcggtggctatggcctttaccagcattccgtttgtggtgcgtaccgtgcagccggtgctggaagagttaggcccggaatatgaagaagcggcggaaacgcttggtgcaacgcgctggcagagtttctgcaaagtggtgctgccggagctttctccggcgctggtggcgggcgtggcgctgtcgtttacccgtagtcttggtgaatttggcgcggtgatttttatcgccggaaatatcgcgtggaagacggaagtgacgtcgctgatgatttttgtgcgcttacaggagtttgattacccggcagcgagcgcgatgtga

SEQ ID NO: 14959 - DNA, 3549 bp, Homo sapiens
  SIMILAR (403)..(1353): 951254mologous to Homo sapiens p40,accession number U93564,Smith-Waterman Score=1552.
atgggctttcatctttccgtggcgacgggcactggctttatcgccctcgccggggtcgccgccgaatttggcgtggtgatgctgatgtatttacgtcacgccatagaggccgtgccgtcgttgaataatccacaaacattcagcgagcagaagctggatgaggcgttatatcacggcgcggtcctgcgcgtgcgcccgaaagcgatgacggtggcggtgattatcgccggtctgctgccgattctgtggggaacgggggctggttcagaggtgatgagccggattgccgcgccgatgattggcggcatgatcaccgcacctttgctgtcgctgtttattatcccggcggcgtataagctgatgtggctgcaccgacatcgggtgcccctcaacaaaaaagacacacaggggaaaggcgtgaaaaacgcgtcaaccgtatcggaagatactgcgtcgaatcaagagccgacgcttcatcgcggattacataaccgtcatattcaactgattgcgttgggtggcgcaattggtactggtctgtttcttggcattggcccggcgattcagatggcgggtccggctgtattgctgggctacggcgtcgccgggatcatcgctttcctgattatgcgccagcttggcgaaatggtggttgaggagccggtatccggttcatttgcccactttgcctataaatactggggaccgtttgcgggcttcctctctggctggaactactgggtaatgttcgtgctggtgggaatggcagagctgaccgctgcgggcatctatatgcagtactggttcccggatgttccaacgtggatttgggctgccgccttctttattatcatcaacgccgttaacctggtgaacgtgcgcttatatggcgaaaccgagttctggtttgcgttgattaaagtgctggcaatcatcggtatgatcggctttggcctgtggctgctgttttctggtcacggcggcgagaaagccagtatcgacaacctctggcgctacggtggtttcttcgccaccggctggaatgggctgattttgtcgctggcggtaattatgttctccttcggcggtctggagctgattgggattactgccgctgaagcgcgcgatccggaaaacagcattccaaaagcggtaaatcaggtggtgtatcgcatcctgctgttttacatcggttcactggtggttttactggcgctctatccgaacatccccattgactcgataaacacgatgattaacacggcagtcatggtcagaatggaaacgggatcgaaaatcggcataccaaacgacatcggcgtaacaatcgcaaaccatgaagcatcatgtagcccggataaattgacttcattcatcatccacgaaagaggtcagatgggtatcatagctcaaaataaaatcagttcattgggcatgctgttcggtgccatcgcttggatgatggggattatccacttttcattcggccctttctccgcaccaccgccaacgtttgaaagcatcgtggcggacaaaacggctgaaattaaaagaggtcttctcgccggaataaaaggcgaaaaaattaccaccgtggagaaaaaagaggacgtagatgtcgataaaatcctcaatcaaagcggtatcgcactggccattgctgcgctcctttgcgcatttattggcggtatgcgtaaggaaaatcgctggggcattcgcggcgcgctggtttttggcggcgggacgctggctttccataccttgctttttggtatcggcatccattttgctgatattccttatcttttccttcctgaccggcggttcactggtttaagcagcctgaataatgcccgccgggtgatcatcagcgggcattatcgtcagaacttctgttttttctcctccaccttcaccccttgtgtcggccggtgtcatagtcgcgtacaactggcgaatagccatcttgtggacgtggacgaaacgcccccatccagcgcggccgtgcatctttacgccacggacgcagactccattggtaactgcggaacggatcgcgaattttgtccatgtaatccaataaggcgtcatgcattttgctgcgaacgtctgcaaaacggatatcatcgatcagggtatgcatttcatttgggtcattacggcgatcgtaaagttcatcactgctgtgagcgtttttctgagatctaccgccgttcacgcggcgtgtttatctcttaccagaaccggcacaatatggacgatattctgcaaaacgtgccgaaccataatattaaagtgattgtggtgactgacggtgaacgcattctggggcttggtgaccaggccatcggcgggatgggcattccgatcggtaaactgtcgctctataccgcctgtggcggcatcagcccggcgtatacccttccggtggtgctggatgtcggaacgaacaaccaacagctgcttaacgatccgctgtatatgggctggcgtaatccgcgtatcactgacgacgaatactatgaattcgttgatgaatttatccaggctgtgaaacaacgctggccagacgtgctgttgcagtttgaagactttgctcaaaaaaatgcgatgccgttacttaaccgctatcgcaatgaaatttgttcttttaacgatgacattcagggcactgcggcggtaacagtcggcacactgatcgcagcaagccgcgcggcaggtggtcagttaagcgagaaaaaaatcgtcttccttggcgcaggttcagcgggatgcggcattgccgaaatgatcatctcccagacccagcgcgaaggattaagcgaggaagcggcgcggcagaaagtctttatggtcgatcgctttggcttgctgactgacaagatgccgaacctgctgcctttccagaccaaactggtgcagaagcgcgaaaacctcagtgactgggataccgacagcgatgtgctgtcactgctggatgtggtgcgcaatgtaaaaccagatattctgattggcgtctcaggacagaccgggctgtttacggaagagatcatccgtgagatgcataaacactgtccgcgtccgatcgtgatgccgctgtctaacccgacgtcacgcgtggaagccacaccgcaggacattatcgcctggaccgaaggtaacgcgctggtcgccacgggcagcccgtttaatccagtggtatggaaagataaaatctaccctatcgcccagtgtaacaacgcctttattttcccgggcatcggactgggtgttattgcttccggcgcgtcacgtatcaccgatgagatgctgatgtcggcaagtgaaacgctggcgcagtattcaccattggtgctgaacggcgaaggtatggtactgccggaactgaaagatattcagaaagtctcccgcgcaattgcgtttgcggttggcaaaatggcgcagcagcaaggcgtggcggtgaaaacctctgccgaagccctgcaacaggccattgacgataatttctggcaagccgaataccgcgactaccgccgtacctccatctaa

SEQ ID NO: 14960 - DNA, 3393 bp, Homo sapiens
  SIMILAR (982)..(1995): 971254mologous to Homo sapiens p40,accession number U93564,Smith-Waterman Score=1699.
tcaaaaatcggctttcaacaccacgcggtaacgcgccttaccgtcgcgcacatgctggatggcgtcgttaattttcgacatcgggaacagttcggtggtcggcgcaaccttgctgcgggcggcaaaacgcatcagcttacgcagctcataaggcgtgccggtagcagaaccagagacgctgcgatcgcccgcaattaacgtaaaggccggaacagacagcggcgtgagaaccgcaccgaccgtatggaaattaccgccataggtcagcgcctcaaaatagggctgccagtcgaggctgacgttgacggtgttgataatgagatcaaactgccccgccagtgctttcagtgcctgcggatcgcggctattcaccactttatcggcacccatcgccagcacttcctgctctttcgccggattagaactaaaggctgtcacctcgcatcccattgcgtgcagaagttttatagcgatatgccccagcccgccaataccaattaccacaacgcggctggtagcagtgatatggtgcatcactccattttgatgtaaatcccggaaggtcccaatcgtcaacacataggaccggtaatagccgcttagtgcacatcggtaaagacgtagcatcgccagcatacagccgactttcatctccgggttaatgcgacgcgcagctttcaccgccagggcgctggcgacaaactggtgatgcagcacctgatacatcgtctcttccgggttttcatgctcggtatacaccacgccggagcagcagtaaccgaacagcggtgcacgccagttacgctggttgttaatttcgttgaaggtcatccagtatttgactttgtgcttatagcgttcaaataccacttccgcgaaacgtacaaagaaatcaaccactttacggttggtccagctaccgtattgctgcaccagatgcagcggcatttcaaagtgggagagggtgatcaccggttcgatgttgtatttcagcagttcatcgaacatatcatcgtagaacttcagcccttcttcgtttggctgagcttcatcgccttttggaaaaatgcgcgtccaggcaatggatgtacgaaaacatttgaagcccatttcggcaaatagcttgatgtcttccttatagtgaccataaaaatcaacggcttcatggtttggatagtattttcctggcaagacttctttggtgatttcgcgcggcacgccgtgtgcgccaccggtcagaacgtcacaaatgctcggcccttttccgcctttgttccagccgccttcgacctgatgagcggcaactgcgccgccccataagaaatctttcggtaaggtgagttttttcactatcataggctccagatgagtcaattccggtttggtatcaaggtatacgccattagcggcaacgaaacgtcggcgaatctgatggggatatccactcgcagcaccactattcgcatctatatgctctccaccggactggcaacgctggcggggattgtcttctcgatttatacccaggccggatatgcgctggcgggcgtaggtgtggaactggatgtatcgcctcagtggtaattggcggtacgcttttgagcggtggcgttggaacggtattagggacggcgtccgggaactcacggataaagcgttcgacatcttcaaccatatggtcgttgccgacaaagaatgaacggcgctggtgcagggtttccgggatgatatccagaatacgctctttgccatcgctcgctttaccgcccgcttgttccgccaggaatgccatcgggtgcactcatacagcaaacgcagtttgccgtccgggtggctggcggtgcttgggtagagataaataccgcctttcagcaggttaccatggaaatccgcccccagtgaaccgatataacgtgaggtataagggcggttggtggatttatcttcttccgtcgtcggtgcctgcagcacacagtcctgtgcgtcgaccagacgccgaaccagtaccgagaaacggacggcgtttatcccatttgatggcttcctgctgaccaacaacggcgcggcaacgcccggcacgctgagaccggcagccgccgcagcggccgcaacggcgttagcttgctcttcctgctggtgataaaccagcgacaccgccagcacgccctctacgttgcgtactgactcaatggtttggatcagcgtttcgctgtcttctgcttccaccaccacaatcaacgtcggcgcgtcgctgacagcaacttcacagccgggaaaggcgttcagttgggtgctgatgtctgaaattcgttcgcttttggccgcttcgctttccatcgccgccatcaccagcgcatggtttgccaccaccacttccgcttcctgaatctcccgacgagcgacaaaaaacgggcattcacgatagtagtaacaattgcggttgaggcagctggctttgtcggtacttaaacgacgccagagatcgtcatctatagcgatatcagtatgatcgcgcagaccatcccatttataagtatcgagatcgcccttcagcttcgcacaacgtttttgctcttcctgattgttcggcgtcagttcgtcgtcaagaaacgccagcagatcctgttgcgtgggttcagtactggcgagcgccgtcagattacgcggacaaacgtagcgcccacgcccaaaagcggcagtgaatttaagatcgggaatgatctttttcagcagcggtaaatctttgctgtaaatctgatcctgcaatgccacgttggcggtactcaccaccagcgttttttgctcttcgcgggcaatggcgatgccgggaatcaaataagagagcgttttcccaacgccggtgggggcttcaatcgccagatgtcgcccttcttctccggccagcgttttggcgacgtccgcaatcatctgccgctgcggcgcacggggaataaagtcggggatctgttcctgaagcgccttataccaggcggcaatttgcgctaccagcgccgccaataaaatgtgcaccgttgccggaacgccaaaggccgtcagtgccatcccgacacctgcgcctgccagcgtgcccaggctataaaaaccgtgcatcatcggcaaaaccgtcttattcatttctcgctcaacggcagcaccttcaacgtttatcgccacttccgcagaaccaaaacttgccccaaagacgccgagaccaacggcaaagagcaggggcgatgtcagccagagtgccagacttaatatcatcatcccgatcaatgcgcaggacatcgtgaccaggatgacattacgtgtcccaaagcgtttcactaaccacgccgagcagagaataccgctcatcgaaccgatcgacagaccaaagagaacaccgcccat

SEQ ID NO: 14961 - DNA, 1248 bp, Homo sapiens
  SIMILAR (1350)..(2429): 931254mologous to Homo sapiens putative p150,accession number U93563,Smith-Waterman Score=1767.
ttaaaccagtgaaccgccggtcaggaaggaaaagataagaatatcagcaaaatgctgcacacgatgccgataccaaaaagcaaggtaggaaagccagcgtcccgccgccaaaaaccagcgcgccgcgaatgccccacgattttccttacgcatacgccaataatgcgcaaagtagcgcagccatgcagtgcgataccaggttgattgaggatttatcgactctcgtctcttttccacggggtattctcgctttatccggggagactcttttttagcgttgtcgcgagcttcacttgcgtggtggtaaggcggtaagtgtacccctttacggtcacctgcccgatcttttgggtgaccgctacgaccgggaacatccgcgctggcgcagctgctgacacaggcggttaagaacgttccgcggccaacgtcaaagggagcgccatcttcatcgaccatggtcaggagcatctgccgataaactctggatcggcggcagaaggagttaaggaaccgagaacagaacacaggtacgatccggctcgcccatttcctgacccagacctgcttctctactacgttgcccagaatatccattgcaaataccgaggccgggaaatacaccctttctcgagcttcttcaggcgcgacaaataacacaacgcggacaacaggataggaaataatcgagagaaagcacgcgaggcagcagcttctcttcagtgactctataggatccccctgacaagccgctgcctcaaccgcaattgttactactatccgtgaatgcccgtttttgtgctcgtcgggagattcaggaagcggaagtggtggtggcaaaccatgcgcgtctgatggactggtggctgctgtgactaatggccactcaccgtgccgtactgtggcgtcgggtatgcgtcttgagcatgagtcgccgataatcaccgcgccgttggttatctgagccgctgggcaggcagaaaatgcccgagtggtcgggtcatggggcggcgaataaaggctggataaagggcgaaccacaggatggaggctggatcgatggatgatcaaacctttgggtcgctggtcgttaatcatggaaatcgagaaggctttgcggtaggcatgtcgccagccgaactcagcgctgagcagccttaagcaagctgtggctatgggaaggcaaagcagaaagatatggctggggagtaattcaacacaggaagcgcagttctccgtaatcgatgccat

SEQ ID NO: 14962 - DNA, 1313 bp, Homo sapiens
  SIMILAR (3)..(692): 891254mologous to Homo sapiens p40,accession number U93564,Smith-Waterman Score=1037.
ctctgacgggtgtctctcgcgcctgcctccgctatcccgtcagcgctcgtcactgacccgtacgtcatcgctggtgcgtgattctccatgtcacgcccacctcggctccattatctggtccacgtgtcgagatgcggcatagcggtccccagttgcgggaacagcacccccagtccccttttttccgggcctgttgtaccgctgctgctgctgtgcgcagggtaaacggcaaagaaaatccggcctccagccagcgccagagaccctatcccggtagatttaacgagtgttctgcggctgatgccccccattcgttcatttttggacataactcactccctgttctttatcgttatataaaagtttatatattgaatatttagcgcgctaacaatagagggagtctacccattttgggttaagaattattaatccatatcaatagaagggtatgagtaataaggtgggattatgttgtatgttcaaatcgccggatttgtcatatccggcgttcagtcgataatgtgttattgcggttcggcaggcgcgccatcctggttagactgcgcgggagcagagacgttaccgctggtggtgcgggtatagagaattttatgcgtatcattagcgcaataaccgacgacctgggaatcaagctgatcaacctggtcattgggaaaaacatgatctctcgcctcaaacgacctcagggccaattaatacctgacgcagcacctgatactgctggtgcccgctttccatggcgcaagaacagggagcctgtattttctttaacacccctttacgcctgtcacgtggggcaagtaccattacttggcataccgcggtctgagatcacggcgttgcgagtgcagccacgtgcgtgtatacgaatgagggacaccggcagtcgtatgttcgtgtgtgtgagtacgcctcacgtacgcgcgtatcgcaccactgttctgtgtagcgggtcttgcgctgtgaagcgatacgcatcgtctcgcccgacaggtcgtgttagagagatcccgagttcagctatttgtgcactccctgaaaattataaccgcttgtttttaccaaattcaactaatcaaacaaataatcgcatcaaaacgcttaacagcatagctattggcaagctactagctgctggtggcgtatacaacgggaacattgaaggattcagagatactgcggaaaaactggatggacgaacaatagatggctatgatcaaattctaaatgaaaaaacagcggtcatagcgaaagcaacagcagtctattcttttaacaaagcgttctaa

SEQ ID NO: 14963 - DNA, 1836 bp, Homo sapiens
  SIMILAR (712)..(1686): 911254mologous to Homo sapiens ORF2 contains a reverse transcriptase domain,accession number M80344,Smith-Waterman Score= 1540.
atgacgcaaccagttggcagcggcggctttatcgccggtcatttgccagtaaatcacccggactttgttggcgttagagatccagtcgctgtgatatttgccattccccagcaggaaagagccaatttctaccgcacggataccggcgactttatacagctcgcaggccagcgcctgtgccgggaactggtctgccgggatatgcggcaacagtttaccggcatcaacgaatgcggcgtgaccgcccgcctgctggcagacaacgccaatctcttccagaccatcgaccagatactgtacctgcgcgtagagataagccagccagtcgagattcatgccgtcatacagacctaccgccagaaaatccatcgcgcttccttccaggccgccatatgtcgggaagccttcctgcaccacgcaaagggttctgcactcggtgtacacatcaaagaagctgtcgtctttcatgcacagcaggccgcccatcggcaccatcgcatctttcttggcggacatggccagcatatcgatgcacagagagcagacactgattcagagcgcaaacctgagggagccccgaaggtttcagagcctccgtttaaaccgccgccccccgtgcttgtccggggtaaaggccgccagttgtgtagcgcgctgagctcgtgcgcacatagcagcccagcgatccggttcgataacgtgatagagcgcataatccttgtcgttgctccgggccaaaaggttcgcaaattcgcatatgacgcagaggaacgcctgcctgatacattaggttatacagtgggttgcagagactttgatgatttgcataccaggtccagatatcagccactttccagtcgtaaatggggtaaatgtaccagctatgaccgcctgtccagggtttatcgtcggcaaaacgttgtttatttaaactggcgatggcgacaaaacggttgtaggactcatccgcacggatgccgatcatcatcgccgccggacgtttttgtgaaaaccattcggcaaactcacgtacaaattgttcgaaggtcatgcctggctggtaaaagcagaaaaagtcagggtcggttatcgcatcttggggaggttgacgtacccattcgacatcaggttcccagcactgccattcgggttggtattgtgaaagggggcgcacttcaccgtacccagaatatgggcgggacacgcctgctgattgatgccgatggcgttgccgatgttccggtggaaggtaacggggctgctgtttataccaatatgtttggtaaagccgtcgtttctgacgttaacaattattatcgcaatcaggcgtatatcgacctcaacaaattgccggaaaacgccgaagcaacccagtcggtggtgcaagccacgctaactgaaggagccattggctaccgcaaatttgccgtcatcagtggtcaaaaagcgatggcggtgctgcgtttacaagatggcagccatccaccgtttggcgcagaagtaaaaaatgataacgagcagacagtgggccttgtcgatgatgacggtagtgtctatctggctggggtgaaacctgtcgaacatatgaatgtgttctggatttgtgttgcgcactgcgatatcaacctgccggacccgctgcctgccgatctgtttaacggcttgttactgccatgccagcataaaggcaacgtcgcgccggttgttcctgatgacataaagcctgtcattcaggagcagacgcaacaggtgacagcacccgtatatataataccacatctatacagggatgtaacagcatttaataagcagcattttttgtatctcgaacattaa

SEQ ID NO: 14964 - DNA, 2124 bp, Homo sapiens
  SIMILAR (658)..(1536): 951254mologous to Homo sapiens putative p150,accession number U93568,Smith-Waterman Score=1457.
tcactgcccgctttccagtcgggaaacctgtcgtgccagctgcattaatgaatcggccaacgcgcggggagaggcggtttgcgtattgggcgccagggtggtttttcttttcaccagtgagacgggcaacagctgattgcccttcaccgcctggccctgagagagttgcagcaagcggtccacgctggtttgccccagcaggcgaaaatcctgtttgatggtggttccgaaatcggcaaaatcctgcccgctttccagtcgggaaacctgtcgtgccagctgcattaatgaatcggccaacgcgcggggagaggcggtttgcgtattgggcgccagggtggtttttcttttcaccagtgagacgggcaacagctgattgcccttcaccgcctggccctgagagagttgcagcaagcggtccacgctggtttgccccagcaggcgaaaatcctgtttgatggtggttccgaaatcggcaaaatcccttctgaaatctacttctgtcaactcgtcaagctcattctctgtccagttttgttcccttgctggagaagggttgcgatcctttggaggagaagagatgttctcttttttggaagtttcagcttttctgctctggtttctccccatctttgtggttttatctacctttcgtctttgatgttggtgacaggctttgactatctgtcggatggtccagaggagatttggccctgtaaatagggatttggccatttgatgagtgttctcaatacccctatgaaaagtttggtggagggttttaagcattttccactggctggcttcgggtatgagtacctttccttcttctgtcgttaaccaccctgagggaagaaaactatgaccctgtgaaagtccccattctgtttcagtcagggaatactggggcttaatctcttggaggggattgttccataccaagggtctttccacgggtattgctaatgggaggttccacctggcagcaattttggcctcagcatctgcctgacagtttccttctgccttctcttcttcacctttttgatggctttggcagtgtaagactgccacctccttggggttttgcactgcatgcaataattccatgatttccttgtggtatttaatgggggttcccccgaggttaggagctctttttatttctatattgccgcctgggccggaatagtcagtgtagaataaacggatttttccgtcagatgtaaaggttgcagaaccggaccattcttgcgtctgatctttcaggatcggatcgttggcgtcgaacttatcgctgtctttaaagacacggcccgcgtttttccagctgtcgattgagttgtcgccgaccttttgataaaacatgtagattgatgtgtcatcagcgtctttcgggcttcccgcaagagcaaacacaacgtgatagccgttgtattcagctactgttccgtcagcgttttgcagcggccagctgtcccacacatcaagtccttttgcagactcaatatttttaatcgttgattgatcgaattgaggcacttggtatttttcgttttgctgctgtttagggatctgcagcatatcatggcgtgtaatatgagagacgccgtacgtttctttgtatgctttttggttattttctttcgcgaaggcttgagtcgctcctcccaatctggataatgcagccatctgctcatcatccagctcgccaaccagaacacgataatcactttcggtaagtgcagcagctttacgacggcgactcccatcggcaatttctatgacaccagatactcttcgaccgaacgccggtgtctgttgaccagtcagtagaaaagaagggatgagatcatccagtgcgtcctcagtaagcagctcctggtcacgttcattacctgaccatacccgagaggtcttctcaacactatcaccccggagcacttcaagagtaaacttcacatcccgaccacatacaggcaaagtaatggcattaccgcgagccattactcctacgcgcgcaattaacgaatccaccatcggggcagctggtgtcgataacgaagtatcttcaaccggttgagtattgagcgtatgttttggaataacaggcgcacgcttcat

SEQ ID NO: 14965 - DNA, 2268 bp, Homo sapiens
  SIMILAR (424)..(1188): 981254mologous to Homo sapiens similar to several hypothetical proteins: U70849 (PID:g1572765), U00043 (PID:g470341), Z50070 (PID:g899462), AL033127 (PID:g3821335), and P40034 (PID:g731464),accession number AC004849,Smith-Waterman Score=1341.
ttaatcgttgttgcatagtatcccccattcctgacgttttccttttatccgttcgttataacgctgatagttcttcgattttgtggggctaaatgataatgcccgacaccagtaatcgttattgagtaaaactttgcatatccgccgccaggaggggatatctttcgcgccaatgtccccttgctgggtttgtggaacctcgatgccttttttctgataccagtgcaaataaatggcgattttattgcggtaatgctcagctgttttttccggcatgctattgagcagcaataatgcatattcttgccagtctaaatgttctggcttgaggattttccgatgcccatagaaatgattgtcatgtccggcgtaaatgccgccactttttaccccgctgactcgtgcgcacatagcagcccagcgatccggttcgataacgtgatagagccataatccttgtcgttgctccgggccaaaaggttcgcaaattcgcatatgacgcagaggaacgcctgcctgatacattaggttatacagtgggttgcagagactttgatgatttgcataccaggtccagatatcagccactttccaatcgtaaatggggtaaatgtaccagctatgaccgcctggtgcggccgtagtccagggtttatcgtcggcaaaacgttgtttatttaaactggcgatggcgacaaaacggttgtaggactcatccgcacggatgccgatcatcatcgccgccggacgtttttgtgaaaaccattcggcaaactcacgtacaaattgttcgaaggtcatgcctggctggtaaaagcagaaaaagtcagggtcggttatcgcatcttggggaggttgacgtacccattcgacatcaggttcccagcactgccattcgggttggtattgtgaaagggaattttgcgtcgtaagcgggagcgcaacccagtaaaactcttcgatgacatcggtgtacaactcgcgcagggactgaacatagttaatggtgcaagagaattgcgcctcccagtcgataaacaaaacgcagatttttttgcccatttgtcgggcaagttcggctgtcagatgcagcattaaaccagagtctttgccgccagaaaatgagacacaaacgcggggtagggtgttgagtgtccaggtaatacgctctcgtgcagcttccagaatattgagcggaagaggaattttataaatagacatctgaagacgctctctgaacgttacagggtgatcagtgagataagtcagatcggctttgcggtgaaccaacagttcttcagcattctctgctgacatgaggatatcatggcactcaatctcgacagaggaatcttgccgtaggcagcggatcagcatactattattagagcaagaaatgagctgagggccgtagataataaagtttttctttagttcggacttattgactatattaattgtttgttcaaggcctctgagatttttctcaagatggtgatgcagatttaaccctgttgtcgtcggcgcgataccttttctcatgtaatagatagccggcgtgacatttgcccccagatcgtccatcagtttctcattgtcacttaacactttcatttgctctgtacttacgtttgcaggcacgtttagcttaagcttgccaccagaggcttcatattgttgccaggtttttgcgggatctttggaggcaagaattgccgctgctgtcgccgggctttctggcttgataaccccaaccaacaatgttcttaattgcactttgccagaatctacccacgggcgcgcctgctgccagaactgtttacaatatgggcagaacggatcggcgaagacgtagacaatgaccggcgcatcttttttaccgtcgaggagccagtgggattgttccatccgttgccacatttcgcgtccggctggtgcgtaaatttctttttcgataagtgtgttactcaggttttcacctttctcgttgtacatgtaaccagagatagcgtgcttaccatctggagtcaggtagatggtgacgcccatatcctgatactttccgagataacctttcattcctccgggggcatcgaatgttttgatgattgtaatgccctgtttttcaatcgcttttactggagcaggaagttcctctgcgaaggcgattgcaggaagcagagccagtaaaagtatcttttttaacattaatttgtccttttcagtcagtgcaaaagtcgagtaaaaggcataacctatcactgtcat

SEQ ID NO: 14966 - DNA, 3099 bp, Homo sapiens
  SIMILAR (726)..(538): 361254mologous to Homo sapiens Human secreted protein encoded by gene 57 clone HFEBF41,accession number W67863,Smith-Waterman Score=76.
atggatagccaggataagtattttgaagcaacccaaacagtgtatgaatggtgtggtgttgcgacgcaattgctcgcagcgtatattttgctatttgatgagtacaatgagaagaaagcatccgcccagaaagacattctcattaaggtactggatgacggcatcacgaagctgaatgaagcgcaaaaatccctgctggtaagctcacaaagtttcaacaacgcttccgggaaactgctggcgttagatagccagttaaccaatgatttttcagaaaaaagcagctatttccagtcacaggtagataaaatcaggaaggaagcatatgccggtgccgcagccggtgtcgtcgccggtccatttggattaatcatttcctattctattgctgcgggcgtagttgaaggaaaactgattccagaattgaagaacaagttaaaatctgtgcagaatttctttaccaccctgtctaacacggttaaacaagcgaataaagatatcgatgccgccaaattgaaattaaccaccgaaatagccgccatcggtgagataaaaacggaaactgaaacaaccagattctacgttgattatgatgatttaatgctttctttgctaaaagaagcggccaaaaaaatgattaacacctgtaatgagtatcagaaaagacacggtaaaaagacactctttgagacttatctcactgatcaccctgtaacgttcagagagcgtcttcagatgtctatttataaaattcctcttccgctcaatattctggaagctgcacgagagcgtattacctggacactcaacaccctaccccgcgtttgtgtctcattttctggcggcaaagactctggtttaatgctgcatctgacagccgaacttgcccgacaaatgggcaaaaaaatctgcgttttgtttatcgactgggaggcgcaattctcttgcaccattaactatgttcagtccctgcgcgagttgtacaccgatgtcatcgaagagttttactgggttgcgctcccgcttacgacgcaaaattccctttcacaataccaacccgaatggcagtgctgggaacctgatgtcgaatgggtacgtcaacctccccaagatgcgataaccgaccctgactttttctgcttttaccagccaggcatgaccttcgaacaatttgtacgtgagtttgccgaatggttttcacaaaaacgtccggcggcgatgatgatcggcatccgtgcggatgagtcctacaaccgttttgtcgccatcgccagtttaaataaacaacgttttgccgacgataaaccctggactacggccgcaccaggcggtcatagctggtacatttaccccatttacgactggaaagtggctgatatctggacctggtatgcaaatcatcaaagtctctgcaacccactgtataacctaatgtatcaggcaggcgttcctctgcgtcatatgcgaatttgcgaaccttttggcccggagcaacgacaaggattatggctctatcacgttatcgaaccggatcgctgggctgctatgtgcgcacgagtcagcggggtaaaaagtggcggcatttacgccggacatgacaatcatttctatgggcatcggaaaatcctcaagccagaacatttagactggcaagaatatgcattattgctgctcaatagcatgccggaaaaaacagctgagcattaccgcaataaaatcgccatttatttgcactggtatcagaaaaaaggcatcgaggttccacaaacccagcaaggggacattggcgcgaaagatatcccctcctggcggcggatatgcaaagttttactcaataacgattactggaatgtaccaatcgacatggtgatgccgctgaccaccccgagaatgaacatcgccgccgagaacagcgccaggctgtggctgaacatcaaaccggcaaccgccagcaccatcaggagaaagccaaaacgtaactgcgttttcaacgggacgatttccatcagccaggcgttgaggaagatagagattaaaatgccggcgttgaggaaggtgaagcaatggcagcgaagggggactgcacgtattgttgacaactcagctgcgctctgcagggtgcagcaaatggtgatgaatctggggctggagcagatccagaaaaatgcaccaacgctggaaaagcagctcaataatgcggtgaaaattctgcaacgtcggcaaatacgcattgaagatccgggtgttcgtgcgcaggtcgcaacaacgttaactaccgttagccaatatagcgatttgctggcgctgtatcagcaggacagtgaaatcagcaatcacctacaaactctcgcacaaaataacatcgcccagttcgcgcagtttagtagcgaagtcagtcagctggtcgacaccattgagctgcgtaatcagcacggactggcgcatctggaaaaagcgagtgcacgcgggcaatacagcctgttattgctggggatggtttcactttgcgcactgattctgatcctctggcgcgtggtttatcgctcagtcacgcgtccacttgccgaacaaacgcaggcgctgcaacggctgctggacggtgatattgactcccctttcccggaaaccgctggcctggcggcgcaggtcaaagcgcgtacagctgaattgcaggaactggtgatagaacaccgacaggcacgggcggaagcagaaaaagccagccaggcaaaatcggcgtttctggcggcgatgagccatgagatccgcacaccgctgtacggtattctcggcactgctcaactgctggcagataaccccgcacttaacgcccagcgtgatgatttgcgggcaattactgactctggtgaatcgttgctgaccatcctcaacgatattctcgattattccgctatcgaagcaggtggcaagaatgtttcggtcagcgatgagccctttgaaccgcgcccgctgctggaaagtaccctgcaattaatgagcggacgggtgaaaggtcgcccgattcgcctggcaacggcaattgccgatgatatgccgtgcgcgttaatgggcgatcacgacgtattcgtcaggttataa

SEQ ID NO: 14967 - DNA, 2415 bp, Homo sapiens
  SIMILAR (1327)..(1848): 441254mologous to Arabidopsis thaliana contains similarity to cell wall-plasma membrane linker protein~gene_id:MKA23.5,accession number AP001306,Smith-Waterman Score=483.
  misc_feature (1)...(2415): n = a,t,c or g
atgcttgcgcagtcgttacaggcgttagaacaggatggttttcttaaccgtatcgcgtatccggtggtgccgccgcatgtggaatatagcctcactccgctgggcgagcaggtgagcgaaaaggttgctgcactggcggactggattgagttgaatttgcccgaggtgttggcggtgcgggatgaacgcacccgctatgacattgcggttcccaggaaacggtatggccatgccgtttcgaggaacacgtttgccttgcgttcccaggaacggtatggccatagcgtcctggaaacggttggcaatagcggatccagtaaacagttttccatggatatcctggacccgtgtgcacgcggtccgggacagatatcgttgattacggtgaatcataaactgcacgtacgctgtgaaagtatcgcttactccgtgcagactatggtggtgaagggcggttcagcctttgcggcttttttcattgcggttgtgttatggatgattggctatgtaccgaatgttgaacagtctacgcaagccctattaggtatgcagtttattatgattgctctaccaactctgtttttcatggtaacgctgattctctacttccgtttctatcgcctcaatggtgacacgctgcgcaggatccagatccatctgctggataaatatcgcaaagtaccgcccgagcctgttcatgctgatattccggtcggtgcaaggttgtcatttgcggagcgggtgatggaaggactgagtgatggagggcagtcccttcagagcccatcagctttattctcaaagcagacactgaaaaatatgtctatttataaaattcctcttccgctcaatattctggaagctgcacgagagcgtattacctggacactcaacaccctaccccgcgtttgtgtctcattttctggcggcaaagactctggtttaatgctgcatctgacagccgaacttgcccgacaaatgggcaaaaaaatctgcgttttgtttatcgactgggaagcgcaattctcttgcaccattaactatgttcagtccctgcgcgagttgtacaccgatgtcatcgaagagttttactgggatgcgctcccgcttacgacgcaaaattccctttcacaataccaacccgaatggcagtgctgggaacctgatgtcgaatgggtacgtcaacctccccaagatgcgataaccgaccctgactttttctgcttttaccagccaggcatgaccttcgaacaatttgtacgtgagtttgccgaatggttttcacaaaaacgtccggcggcgatgatgatcggcatccgtgcggatgagtcctacaaccgttttgtcgccatcgccagtttaaataaacaacgttttgccgacgataaaccctggactacggccgcaccaggcggtcatagctggtacatttaccccatttacgactggaaagtggctgatatctggacctggtatgcaaatcatcaaagtctctgcaacccactgtataacctaatgtatcaggcaggcgttcctctgcgtcatatgcgaatttgcgaaccttttggcccggagcaacgacaaggattatggctctatcacgttatcgaaccggatcgctgggctgctataggatcccctgcggatcgagaagaggatgcagaggaatatctggaagcaatcatggaggctcgtgttaccgttgctggcatggggctggtgatggaggtgcaggattacttcgatggcgaggccgatagactggcgaaggcgtggctggccgagtacacaccgcaaatcaagtcgttgaaagatgagcgtaaagaggcctatcgtcaaatcgtcgaaatgagtaccgaaccgcaggatgtggatctggtcaggccggcgaacaagtttgaaatgaccagggtgcgtgaaggtgaaaaggaagctgaccttccagtctggaaacaccatttgttgtgtgacgaaagcgggaactatccggctctgttgaaccattgggaaaccaaggtttttgagatcgaaaccaaacgtgaaggatttgctttctggtatcgtaatccacagtacacagggcagtcgtcactgggaatcgcttatgttgaagctgaacagtacaagattgttcgtcccgatttcctgttctttgccgaacaggatggcaaaatggttgtggacntggtagatccacatagcctacatctggctgatgctttgcccaaactggaaggacttgcgctatatgccgaacatcattctgatgcttacaggcgaatcgaatctgtcgccgaagtaaagggtaaattacgagtgttagatttgaaacggcaggatgtgcaggatgctgttgctaccgctgaaaatgcagaaacgttatttagtagcggacttgctgatgactatcagtaa

SEQ ID NO: 14968 - DNA, 3963 bp, Homo sapiens
  SIMILAR (1334)..(1528): 431254mologous to Canis familiaris D4 dopamine receptor,accession number AB030235,Smith-Waterman Score=93.
ctacgtgatcgctgtcccacgaaccggacggctgacgtgcagcagcaactgcggcacatacagcatggcggcggaaatcttgtcggaaatcacttcagtcgggtggaagtgcccggcgtccaggcacagcgcagtctggcggctggtggcataccccatgtaaaactcattggagccaaccgtgtagctctctgcgccaatgccaaacaatttgctctcaacggcgtcgatatggtgcgcagggtttagcttctcgctgatcacctcatccagtgctgccagcagacgctgacgcggggcgagacggtcaacggtgatatctttcataccatccgggatccagatgttcatcaccgatggtgtgccgagttgctcgccaaaataggccgaaacgcgacggctggctttgcagtgatcaatccagaactggcgaatgctgtcgtcggcatgggaaagcgtaaagccatcggcgcttagcggatgcgaaaagcaggaggggttaaaatccagaccgagctgattggctttcgcccattcaacccagtttttgaagtgctctggtttgatctggtcgcgcgagactggcgtatctgattccagatagatggcatgtaaattaagccgtttcggccccggaatcagccgcatagcctgttccagatcggcacgtagctcactggcattacgcgctttgcccggataattgcctgtggcctgaatccccccggtcagcgaaccttccgggttttcaaaaccggaaacatcatcgccctgccagcagtgcattgaaacgggtaaacgatcaagttggcgcacgccatcctcgacatcaatccccaccgccgcgaaacgctgtttcgctagctcccaggcctgttccagttgagtggtcatgcgcaaagctcctttgtctgtcgtgtagagtgaattgtcaggattaggggtaaaggtggtcagattcgcggtggtgctgacgacctgacggaaatcatccacattgttgagttcatccagcgtcattaactggatgccgatattgccgagcgtcgaagcgcacacaatcaggcccacaatggttattgcggaagacatgcgtacatggtcaatggctagttttgaaagtggctggcgatgttcttttttcgtcagcgagttgattgctatgtcgagcagaaacgtcccgacaaaccataatgcgtatatctttaagcccaactccaaatcactcataaatcctcttggcccgtcagttaattcaaatggagcataactttcccggcgctcagcgaacccaagctcaacagacagagcgtgcagctcatgccgacgcttaatctgttccatcgcaatccagtcagcatcggcattgcgcttttgagcttgcttcggcgacaggtctaaactgtttatttcacttagtttctgctgacgcttgatgtccttctgtaactggaagttggtgatgtatatcggcccggctttcttctcagatataaacgggtatttgatgttaatttccttcgctttaatccccgtccactgggagaaaaagcctaagaagtcattggctgagcggcgggctttaatcacacgatgcgctttatcgtcgctggaaatgaccataaaaggcacctggaaattttgctgatatttatcatcatgggcaaggtattgcacgtctttaccgcgctctttaaaggccagaccgtggtcagaaaagtaaaccagcgagaagctgctgccgctgttgcgtaactgatcgtacagcttgcgcagtaaatcgtccgtttgcgtcatggtatagagatagcacgacgtttctttcgattgcacaaaggtttcgtattttccttgtgtcctgtcgcaggcctgcggatgtgagcccatcagatgtagaacaatcagctgcggttgcgagtgctcttgcgccagcacttgagcggtcatatccagtaacgcttcgtctttggtgtttttatctgcttcaaaattaccttctttcaggaagtacacttcatctgctcgtttggcgatgctggcgatagcggtatcgtattcgccgatttgaccctggttggaaaatctgccggtcggtatttgctggtcagcggtgaaaaaaatgggcggcacgcgatccttggtatcgtgcttggcgtgacactggtttctccacagctgatgaacgcttatctgctcgggcagcagctgccggaagtgtgggactttggcatgttcagcatcgccaaagtaggctatcaggcgcaggtgatcccggcactctatctggtggtggtacccgtctgttcgctgatcctcgcggtgttcctcgcccatgcgctgattggtccgtttggtcgcatgattggcgatggcgttgcctttgcggtacgtcacctgatgaccggcagctttgctccgattggcgcagcattgtttggcttcctgtacgccccgctggtgatcaccggtgtacaccagaccacgcttgctattgatttgcagatgattcaaagcattggttgtacgccagttttgccggtgaatgcgctgtcgaatatcgatctttggcacataagtatactcgtataggccctgcccggcgctgtcagacagcggcttataagttacggccatgttgccctgcgaacgggtgctgtcggtcactttcatgcccactttttccagcgccgctggcagacgttgccaaaccacattgaacggcccgcgtacgaccagcattggtaaaccggtgtcatcagctgcactttgtacgtccatagtggtggaggcacgattttgcgcacgattcgcggcgtcagtggcagatttatccagaccggcggaaataacgttcatcatctccgtgctgtaacgctgcatggaagccgcgtctgcaaccggtttgcccgcctgttccaggttcagcagtttaaccgtaaccgcctgctgataaccctgcggcttaacagagatttgataacgaccacgatactgctcgtcttcgtccagacggttccattgtacccaatcggtggtcagtgtctgaccagcatcatcacgttgggtgatggtgtagtttttcgcctgcagcacgctaaccacctgcggccacagagtattgccacgaccattttccaccagcaatgaagcggtatcgccgtgaactgggtacgcgcgccagaaaccagtgccagcggctgggcgggattgcataatcaccggagtcaccggcaaaatcattccagccggggcatgaagctccgcaagcggtgccgcttccaggtaggcttcatcaccactgacctgacgcttatagcgtgacgttactacctggatgagccattcagccgtcttgatgtggctctgcgcgataattttcgccagtgggtgttcagcgaagttcgcgccctggcgatccccgtcgttcaggtaacgcacgatctccaggatgttcctgctgatagttctgttctctctgccagctggcttgacaaaatgagcaccgaacagctcaacgcgtggatcaagcaacataacctgaaaaccgatgctccggtggcgctgtacggtaatgacaaagatgtcgacgccgtcaaaacgcgatgatgttaacagcgccaacaactcgtcagcagattccgcgacgataactggcgcgtcgggttccgttacgggttgcttcggctggcggttaaagccagtaaccagccactgggtgtcatcgtctggccgaccgatctccttgcggctgatgacacgcccggtacgcatcgcggcagcacaacctgcgtccagcgccgcacgacacgccgccagatcgccttccaccaccagcgttaagcgaccagggtcaagcacttcgtgactgagcagacgaacgttagctgctttgagcatggcatccgctgcatctatcgcggcgaccatgccgtccacttccagcaatcccagtgcattgatcat

SEQ ID NO: 14969 - DNA, 1274 bp, Homo sapiens
  SIMILAR (2075)..(2719): 951254mologous to Homo sapiens p40,accession number U93564,Smith-Waterman Score=1055.
tcaaatggccaaatccctatttacaggccaaatctcctccggaccatccgacaagtagtcaaagcctgtgatgtggccaaaggcataatcccttggcccatcgtaaggcccctcacttagaaaataataattctttccgtacgaggagtccaagcccatgtagatacgcatccctgtgacagtgacttccaggatcccacacccaagggcctgcgaggattgcccacactgcatccgagcctcagctctctgcctcttccttgcattccctgaccctgacactctagaaagagggcccagccatgtggatgggatttctccttcattgatctgatggtggtcgtggaatgtataagcaccagccagcatgaccttcgaacaatttgtacgtgagtttgccgaatggttttcacaaaacgtccggcggcgatgatgatcggcatccgtgcggatgagtcctacaccgttttgtcgccatcgccagtttaaataaacaacgttttgccgacgataacctggaccttcccgcaaacgatctacgattttctgtggttgatcggtgaagcgatcttcttcacctgccggtcggtatttgctggtcagcggtgaaaaaaatgggcggcacccgatccttggtatcgtgcttggcgtgacactggtttctccacagctgagaacgcttatctgctcgggcagcagctgccggaagtgtgggactttggccgtctgttcgctgatcctccggtgttcctcgcccatgcgctgattggtccgtttggtcgcatgattgggatggcgttgcctttgcggtacgtcacctgatgaccggcagctttgctcgattggcgcagcattgtttggcttcctgtacgccccgctggtgatcaccgtgtacaccagaccacgctggctattgatttgctgatgatgcaaagcatgggtggtacgccagtgtggccgctgattgcgctgtcgaatatcgctcagggctccgccgtgataggcattatcatttccagccgcaagcacaatgaacgcgagatcccaggtgaggtcttccccagaactggggttgggaagggaaagagtctgggctaaccactccattagctgcagccctaccgccagcacctgggggcagggagttacagtcaaactcttaaaaaacaaatagccgaaagtgcagtgaggttaagcatcccctgaggactggacgagcagacctgcctgctttgcagaagacggggaggggaaggagagcagggccatctcct

SEQ ID NO: 14970 - DNA, 465 bp, Homo sapiens
  SIMILAR (440)..(802): 441254mologous to Mus musculus zinc finger protein splice variant FIZ1-A,accession number AF126746,Smith-Waterman Score=171.
atgaacccgtcagtatcaggcaatgggcgtctggcgctgaaagtagctaacctggcggaacgcaaccggatcgtgaaatcgaaaaacgcggcccggcgattgcccaggcgttcgacgctgaaggcaaaccgagcaaagcgtcagaaggttgggcgcgtggttgcggtattaccggcgaaacaccgaagcactgctgccgaatatggttgcgacttctctggcgaaactgccgatcccgaaactgatgcgttggggcgcaacgacgtgcacttcgtgcgtccggtgcacaccgtgaccctgctgctgggcgacaaagtcattccggcaaccattctgggcattcagtccgatcgcgtgattcgcggccaccgctttatgggcgagccggaattcaccatcgataacgccgatcagtatccggaaattctgcgtgacgtgggaaagtcatcgccgattacgaagaac

SEQ ID NO: 14971 - DNA, 1788 bp, Homo sapiens
  SIMILAR (1)..(549): 921254mologous to Mus musculus zinc finger protein splice variant FIZ1-A,accession number AF126746,Smith-Waterman Score=939.
atggctgctgtatcgcgcccatgtgaagggcgaaacaccgaagcactgctgccgaatatggttgcgacttctctggcgaaactgccgatcccgaaactgatgcgttggggcgcaacgtacgtgcacttcgtgcgtccggtgcacaccgtgaccctgctgctgggcgacaaagtcattccggcaaccattctgggcattcagtccgatcgcgtgattcgcggccaccgctttatgggcgagccggaattcaccatcgataacgccgatcagtatccggaaattctgcgtgacagtgggaaagtcatcgccgattacgaagaacgtaaggcgaagattaaagccgatgccgaagaagcagcgcgtaagattggcggtaacgctgacttaagcgaaacgctgctggaagaagtggcttcgctggtggagtggccggtcgttctgacgcaaaattcgagagaaattcctgcgattagccggaccgcactggtaccctacagcgcggacaatatgtatcagttagtgaatgacgttcagtcttatcctcagtttttgccgggttgtaccggaagtcggattctggagtccactcctgggcagatgactgcggcggtagatgtctctaaggctgggatcagcaaaacgtttactacccgcaaccagttgaccagtaaccaaagtattcttatgaatctggtggatgggccgttcaagaaattgattggtggatggaagtttacgccgctgagccaggaggcgtgtcgtatcgagtttcatctcgactttgagtttaccaataagttgattgaactcgcctttggtcgcgtgtttaaagagctggcggctaatatggtccaggcttttacggttcgtgcgaaagaggtttacagtgccagcatgaggtacatctatgtcatcgtgtacatctcctatagaccacctaatctgctcgatagtcacatcataggattttcgtccattactacccactgtgccgtcactagtcatcactacaactcgtgtgatatgacgatgacgatacactcttacgtcacaccctacatctctgtacgagtatcactcacgcagacatatgcgccatctccatctcgtaatctacgtatcacagatctaactatctatcgtgctatatcgagcgagaagtcgatcgatgatacccgtcatatccacaccatcgaatctcgttgtcgagtatgtggcgcccacgacagcagagacgctgaacggctggaccgatttgcgcaaacggcagacgagatacgcattgctgaccggggattcagttcgcgtcccgaatgtatccgctcacttgcttttggagaagctgattatatcgtccgggttcactggcgaggattgcgctggttaactgcagaaggaatgcgctttgacatgatgggttttctgcgcgggctggattgcgcattaatcagtaaaacccgactgctcagcgagaatcgtcgaaaaggacgagtagttcaggcggaaacgctggaagcagcgggccatgtgctattgctaacatcattaccggaagatgaatattcagcagagcaagtggctgattgttaccgtctgcgatggcaaattgaactggcttttaagcggctcaaaagtttgctgcacctggatgctttgcgtgcaaaggaacctgaactcgcgaaagttggtatatttgctaatctactcgccgcatttttaattgacgacataatccagccatcgctggatttcccccccagaagtgccggatccgaaaagaagaactaa

SEQ ID NO: 14972 - DNA, 1965 bp, Homo sapiens
  SIMILAR (421)..(146): 641254mologous to Homo sapiens Human secreted protein sequence SEQ ID NO:195,accession number Y87156,Smith-Waterman Score =250.
atgtcgtctccgttacaccttttccacattcacaaggaaggacttaaactccggcgtctgcgtgttcgcatcaccaacgaatggcgttacagtattggcaataaagccttttttagctacgccttcatagccccagtgaatcggaataccgatggtatcgatatctttgccgttcgctttcagcgtgcgaatacgtttggtcaccaccgctttggctttgatatagccacggttggaggagactttcacggtatcgccctgggcaatgccaagtttattcgccagcgactccccgatttccacaaactgctctggctgcaaaatcgcgttcaacagcgcgtgtttggtccagtagtggaagtgctcggtcagacgataggtggttccgacatacgggaacttatcggctttacccaatgcttcggcgtcgtctttaaagatacgtgcagccgggttcgagataacgtttggatgcagcgggttagttcccagcggcgtttcaaacggctcgtagtgttccgggaacggaccttccgccatcttatcgagggcaaacagacgccccatgccttcctgctgcatgataaacggcccgacgccgctacccggaggcgctgcgctgtagtccggaatatcccagccggtccacttagtgccgtcccatttcagcaactgacgcttcggatcccacgggttaccctgcggatctgcggaggcgcggttatacagaatgcggcggttaagcggccatgcccatgcccagcccagcgtgttaccgaggccagacggatcggcgttatcacggcgtgccatctggttgccttccggcgtccagctaccggcgaaaatccagcagccacaggaggttgtaccgtcatcgcgcaattgggcgaacgaactaagttgttggcctttcttgacgattaccgcaccggttgccggatcggtaatatcggccagcgccttaccgttgctctccatcgccacttcttctgaagatggctcatgcggaatggcgtagttccatgtcatgttcagcacctggtccgggttcgcgccaccctgttcggcatacatcttgcgcaagcgcaggaagataccggagaggatctcgccgtcagtcagcgcaatccccggggcgtccgcacctttccagtgccactgtaaccagcgacctgagttaacgatagaaccgttctcttccgcgaagcaggtcgatggcagacggaacacttcggtctggatcttcgacgagtcaacttcgttcagctcaccgtggttctgccagaagttagaggtttcagtgttcagtgggtcgatggtgacgaggaacttcagtttcgacagacaaccgatcactttgtttttgttcgggaatgaggcaacagggttaaagccctggcagatatagccattgaccttggcctctttcatcatttctgtactttctgtgctctcttgtttcatattgtctttactgcgttccgtactgccgcctactggaacacggttataatatctggctaccgcttgtgttgcagaccaccgcgtaacctgccacggccgttccttcgttcgaagagtcgatgaacggtgctgcaccatgctgacaagccaaatctgtatcatggcttgccggagaacccggaaatcagcgaaaccgtgaaattctggaaaggcatctggaaaccgctcgcggctgttggctttgcggctacctttgcggccagtatcttccactacgtgggtgtcggtccgaaccgtgcggatgaggaagagaataatcactggatcaccgccttctgcttcatcctggcggcggtgagcgggctgggctttttgttcccgtccttcaactggttgatgcaaatcatgggcacaccgcagctggcgcgaattctgcacccgtttgtcggcgtggttatgtttgcctcgttcatcatcatgtttttccgttactggcat

SEQ ID NO: 14973 - DNA, 5623 bp, Homo sapiens
  SIMILAR (77)..(898): 561254mologous to Homo sapiens Similar to PDZ domain- containing guanine nucleotide exchange factor I,accession number BC001956,Smith-Waterman Score=680.
atgtctgagaaaacttttctggtggaaatcggcactgaagagctgccaccaaaagcactgcgcagcctggctgagtcctttgctgcgaactttactgcggagctggataacgctggcctcgcacacggcaccgttcaatggtttgctgctccgcgtcgtctggcgctgaaagtagctaacctggcggaagcgcaaccggatcgtgaaatcgaaaaacgcggcccggcgattgcccaggcgttcgacgctgaaggcaaaccgagcaaagcggcagaaggttgggcgcgtggttgcggtattaccgttgaccaggctgagcgtctgactaccgataaaggcgaatggctgctgtatcgcgcccatgtgaagggtagaaggcaccgaagcactgctgccgaatatggttgcgagttctgtggcgaaactgccgatcccgaaactgatgcgttggggcgcaagcgacgtgcacttcgtgcgtccggtgcacaccgtgaccctgctgctgggcgacaaagtcattccggcaaccattctgggcattcagtccgatcgcgtgattcgcggccaccgctttatgggcgagccggaattcaccatcgataacgccgatcagtatccggaaattctgcgtgagcgtgggaaagtcatcgccgattacgaagaacgtaaggcgaagattaaagccgatgccgaagaagcagcgcgtaagattggcgcgaaagcgtggggtacgaacgtcgagttccatgttcagaatcagccattcccgtgctgcacgggtggaggtgaaggccacgccgggttcatgaagatggcggtccagggttttcaggtggtggaagccattaacggtgccaccacggaggaaggggcctttgtccaggggaacaggctgcaggccggtgcctttaactactccctcaaccgggacagtgatgagagctggtatctgcgcagtgaaaatgcttatcgtgcagaagtccccctgtatgcctccatgctgacacaggcaagggactatgaccggattgtggcaggctcccgcagccatcagaccggtgtaaatggtgaaaacaacagcgtccgtctcagcattcaggggggtcatctcggtcacgataacaatggcggtattgcccgtggggccacgccggaaagcagcggcagctatggattcgtccgtctggagggtgacctgatgagaacagaggttgccgaactgctgggcggtagcccggaacaggtttgcgtggcggcggaaattggcatggaacacaaccttggtttaacctgcgacccggttgcagggcaggttcaggtgccgtgcattgagcgtaatgccattgcctctgtgaaggcgattaacgccgcgcggatggctctgcgccgcaccagtgcaccgcgcgtctcgctggataaggtcatcgaaacgatgtacgaaaccggtaaggacatgaacgccaaataccgcgaaacctcacgcggtggtctggcaatcaaagtccaggtggcccgcatgcaaaaagcacaacggatcattaaaacctatcgtcgtaatcgaatgattgtttgtacgatttgcgcactcgttacgctcgcttcgaccctgagcgtgcgatttattatattcatcgcaccgacaatagcgcccgttaccatagagcccagcacaaacgaaccaataacccgcagcggatcttcaatcgccatcgggatcgccccttcggtaatacctgccagccctaacagccaggcgcggtgcgagcatcgtggaagcggttacggtaaatgccgaaaccattttgacggaggcgaaaatggcatacgggccgtaaacgccgttcgccattgcgcccaggcagaatgcataagcggctttattcactggccctccaagaccgaccgggtgcagtttgcgatgccggagtctgatgcggaggaaaacccgtctaaacagatggaccagcagcagtgtcttgaaattgagaaaacactacctatcccggcggcgaatgtgctggagacggtgcgcggcctgttgcagcatcgctcatttaccatgagcaacccgaaccgtattcgttcgttgattggcgcgtttgcgggcagcaatccggcagcgttccatgccgaagatggcagcggttacctgttcctggtggaaatgcttaccgacctcaacagccgtaacccgcaggtggcttcacgtctgattgaaccgctgattcgcctgaaacgttacgatgccaaacgtcaggagaaaatgcgcgcggcgctggaacagttgaaagggctggaaaatctctctggcgatctcgccgccaacgaagtccagattctggccttctttcagggtgacgtaagcttttttccagtcgctacgacgaccgatacgctgtccgtgacgagcaaagacgcgcgtttcattgtaaacctcctgtatttgccggagactcacgctgaaacgtcggatggcgcttatgttcacctgaaaccaaaacactcctgtgcagaggatcccgtagacgtatacgcagtatctaccgatactcacttcacccacaaagcatggcacagcagctctgaaaccatcgctaaaatcaaatatgcgatgatcggcgacccgactggcgccctgacccgtaacttcgacaacatgcgtgaagatgaaggtctggctgaccgtgcgaccttcgttgttgacccgcagggtatcatccaggcaatcgaagttaccgctgaaggcattggccgtgacgcgtctgacctgctgcgtaaaatcaaagcagcacagtacgtagcttctcacccagcccgtcatcatctacgcagacgcgtgtacctctgccagctgacgttgcagactccggcggacgacacctacgctcggcacttccacgctctcatcttttccaacgatggaacccagcgcacaacccgtgtgcgaactttaatcgcttcggcgtcgcttggcggcgtgccaaaggccccacaacgttcaaccgctttgacgatgtttttccgccaattacttccggttggtcgacatgtgatcaggtgcacttttgccctgcatccgcacgcccgaaagtcctaccggattcttgatcccttcctgatagtcaatcgccatactcttggcggggatcacattgcagcacacgatgctcatcgcgcaataccaacatcaattacgtggacgttagcgcccgcttgttctgccagcacacacacgccggttgttccacgggtcatattttcagcctgtatggctggtcaccttactttatggagaaataagcgaccccttcctactaacacgatgcaatccacggtgcctctgcacagcagacaaaaggcatttgttagtgccactgctcctacgcttacttctttcagaggccaacttggtcttctgcttaaccagtggggatgtattctagaggatcccgtgaacccggcgattgatagcgatgcgctggcaaatcaaatcactatggcgggcctggaagttgacggtgtagaaccggttgccggcagcttccacggcgtggtcgttggtgaagtggttgagtgtgcgcagcatccgaacgctgacaaactgcgtgtgacaaaagtgaatgtcggcggcgatcgcctgctggacatcgtctgcggtgcgccaaactgccgtcagggcctgcgtgtagcggtagcgaccattggtgctgttctgccgggtgatttcaaaattaaagcggcgaaactgcgtggcgaaccgtctgaagggatgctgtgctccttctctgaactgggcatttctgacgatcacagcggcattatcgaactgcctgcggatgcgccgattggcaccgatatccgtgaatacctgaaacttgatgacaacaccatcgaaatcagcgtgacgccaaaccgtgccgactgcttaggcatcattggtgttgcgcgtgacgttgccgtgctgaaccagctgccgctggttcaaccggaaatcgttccggttggtgcgaccatcgacgacacgctgccgattacagtcgaagcgccggaagcctgcccgcgttatcttggccgtgtggcattaacggttaaggcgccaactccgctgtggatgaaagaaaaattgcgtcgttgcgggatccgttctatcgatgcagttgttgacgtcaccaactatgtgctgctcgaactgggccagccgatgcacgctttcgataaagatcgcattgaaggcggcattgtggtgcggatggcgaaagagggcgaaacgctggtgctgctcgacggtactgaagcgaagctgaatgctgacactctggtcatcgccgaccacaacaaggcgctggcgatgggcggcatcttcggtggcgaacactctggcgtgaatgacgaaacacaaaacgtgctgctggaatgcgcgttctttagcccgctgtctatcaccggtcgtgctcgtcgtcatggcctgcataccgatgcgtctcaccgttatgagcgtggcgttgatccggcactgcagcacaaagcgatggaacgtgcgacccgtctgctgatcgacatctgcggtggtgaggctggcccggtaattgatatcaccaacgaagcaacgctgccgaagcgtgcaaccatcactctacgtcgtagcaaactggatcgcctgatcggccatcatattgcggatgagcaggtaactgacattctgcgtcgtctcggctgcgaagtgaccgaaggcaaagacgaatggcaggcagttgcgccgagctggcgtttcgatatggagattgaagaaatctgcctaccgtatgtgaacgggagctgtgtgtgtttgcttttcaaaccctgggagccacttagaattccacattacaaagtcaggaaacaacaggtgcatggagaggatgtgactcaacaggaacactttcacactgttgtgcccactgttgatgtctttcagatttccacaaaagagcgatttggattgggacatcagctgaaaaatggctcacacattgaaaactggcactccatcctgaggaatggtctggttgttgcttctaatacacgattgcaggaatcaagacagaatagtacagtggaggaagattctgaaggtgacaatgattccgaagaattttattacggaggacagagaataaaatacctaggaatccaacttacaagggatgtgaaggacctcttcaaggagaactacaaaccactgctcaacgaaataaaagaggatacaaacaaatggaagaatattccatggtcatggataggaagaatcaatttcgtgaaaatagccatactgcccaaggtggtagatctactagtatccatgtgtaggtctgcgttggaatctcctagaaaagttgtgattttcgagccatatccttctgtggtagatcctaatgatcctcagatgttggccttcaaccccaggctatctgaagtccaaccagcgcttccattagtcaaacctaaccggaaggtagttggcaagggacctgtggaaatgcagcctaaaggtggaagaatgaggaatggacttgagagcaaacaaaacacaatggcctatgtgtatatccttgtcaaatgcatagtgctgttagacattttttga

SEQ ID NO: 14974 - DNA, 846 bp, Homo sapiens
  SIMILAR (3)..(257): 741254mologous to Homo sapiens golgin 67,accession number AF163441,Smith-Waterman Score=309.
ttagcgtagaagagggaatgatttaaacaagcgttcgatggcgtcgagggagtcctgtgttgaaatgccgtgtaaatctgacggataaggtacgtgatacaccgaaccagggaacgggccgaagccgattttgtacggcgcaacttttccggtcagcgccatggtcatatacgtacgaccgtgaaagccgccgctaaacgcaatcacgccagggcgtccggtatgggcgcgagcaattttcaccgcgttttccaccgcttccgcaccggtggtgaagaacgcggttttggcctgcccgctcaccggggcaagggcgttgattttctccgccagggtgacgtagctttcatacggcacaatctgatacgcggtgtgggtaaactgttgcagttgctgctccaccgccgcgaccagatcagggtggcgatgtccggtattcagcaccgcaatgcctctgttattcgttctttgtgtagtcccctcattaagtttgggggtaacgcaaaattcgaagagaaattcctcgcggtgccggctgaagcgctggtttacaccatgaaaggtgaccagaaatacttcccggtgtatgcgaacgacggcaaactgctgccgaactttatcttcgttgccaacatcgaatcgaaagatccgcagcagattatctccggtaacgagaaagtcgttcgtccgcgtctggcggatgccgagttcttcttccccagcaaacagaaataatccccacagaaagaaaaacaaccaccgaagtttaactccaccccaaagtgcgtatgtccagtcctgctgcctaggctggaaggtcctcatgagccggtgctgtgtctccat

SEQ ID NO: 14975 - DNA, 3852 bp, Homo sapiens
  SIMILAR (31)..(180): 701254mologous to Homo sapiens 88-kDa Golgi protein,accession number AF204231,Smith-Waterman Score=174.
atggatcttggggccaatggctggcaaaccttccgctacgtagtgttgccgaatctcagttcggcgttactggcaggaggaatgctggcgtttgccttgtcgttcgatgaaatcatcgttacgacctttacggcagagcaggtcgatgctgctgtgcgcgcggcagatgcagcatttgccgaatgggggcaaaccacgccgaaagtgcgtgcggaatgtctgctgaaactggctgatgttatcgaagaaaatggtcaggtttttgccgaactggagtccagtaataacacggcgtttgcgcgggcgtcatcgaatggtgatctgccgacaaaagcggacctgcaggcgcaacttgactcactaaataaacaaaaagatctttctgctcaggacaaactggtgcagcaggatctgacagatacattagccaccctcgataaaatcgatcgcataaaagaagagacagttcagctacggcaaaaagtcgctgaagcgccggaaaaaatgcgccaggcgaccgcggcgttgacagcacttagcgatgtcgataacgacgaagaaacgcgcaaaattctgagcacgctgtcgttgcgccagctggaaactcgcgttgcccaggcgctggacgatttgcaaaacgcacaaaacgatctggcgtcttataacagccagctggtttcgttacagacgcagcccgaacgcgtgcaaaatgcgatgtataacgcttcgcagcagctgcaacaaattcgcagtcgtctggatgggactgatgtcggcgagacaggcttacgtcccaggcagaaagtgttaatgcaggcgcagcaagcgttgctgaatgcggagatgaccagcagcgcgctggaagcgaaaatcgcccaactggaagcggaacaggcgcgtaagctgaagaaaaccgaaaaagattcgctgaaagacgaagtgctgcactctctgctgccgcgtgctttcagccgttttagccagacaatgatgtggatcgacacggttaacggtttgattatggtggactgcgccagtgccaaaaaagcggaagatacgctggcattactgcgtaaaagcctggggtcgttaccggttgtaccattgagcatggaaaacccgattgaactgacgctgaccgaatgggttcgctccggtagtgcggcacagggcttccagctgcttgatgaagccgagctgaaatcgttgctggaagatggcggcgtgatccgcgcgaagaaacaagatctgaccagcgaagagatcaccaatcacattgaagccggaaaagtggtgactaaactggcgctcgactggcagcagcgcattcagtttgtgatgtgcgacgatggttcgctcaagcgtctgaagttctgcgacgagctgcgcgatcaaaacgaagatatcgaccgtgaagatttcgcccagcgttttgatgccgatttcatcctgatgactggtgactggcagcgtaattcaaaagagatgacagacacacagtatattggccgcttcgccccctctccttccggcgagcttcattttggctctctgatcgccgcgctcggcagctatttgcaggctcgcgcccggcaaggtcgctggctggtacgcatagaagatatcgacccgcctcgtgaagttcccggtgccgcagaaactatcctgcgccagctggaacattacggtctgcactgggacggcgatgttctctggcaatcgcaacgtcacgacgcctatcgtgaagcactcgcctggttacatgaacaaggactaagttattactgcacctgtacgcgtgcgcgtattcaaagcattggcggtatttacgacggtcattgccgggtgttgcatcatggaccagacaacgccgcagtgcgtatccgccagcagcatccggtcacgcaatttactgaccagctgcgcggcattattcacgccgacgaaaaactggcacgggaagattttatcattcatcgccgtgatgggttgttcgcctacaacctggctgttgtggttgatgatcatttccagggcgttacagaaatagtgcgtggggctgatctgattgaaccaacaattaattcccaagggtgtgggtatttccgttgggtgttgtcgaaagtcgaataccagacgtattcgccaggcgtggcacaaccggtcatcgcacccgtattcggccagtgtagcgtaaattcgcgaccatcggccgtaattgaaaattttggggaatgcctaaggacgccccaaagcatgccaccggtagatccttgctggaatttatcgggactggataacgtggctcgcaacaggcaaccgttcaatggtttgcttgctccgcgtcgtctggcgctgaaagtagctaacctggcggaagcgcaaccggatcgtgaaatcgaaaaacgcggcccggcgattgcccaggcgttcgacgctgaaggcaaaccgagcaaagcggcagaaggttgggcgcgtggttgcggtattaccgttgaccaggctgagcgtctgactaccgataaaggcgaatggctgctgtatcgcgcccatgtgaagggcgaaagcaccgaagcactgctgccgaatatggttgcgacttctctggcgaaactgccgatcccgaaactgatgcgttggggcgcaagcgacgtgcacttcgtgcgtccggtgcacaccgtgaccctgctgctgggcgacaaagtcattccggcaaccattctgggcattcagtccgatcgcgtgattcgcggccaccgctttatgggcgagccggaattcaccatcgataacgccgatcagtatccggaaattctgcgtgagcgtgggaaagtcatcgccgattacgaagaacgtaaggcgaagattaaagccgatgccgaagaagcagcgcgtaagattggcggtaacgctgacttaagcgaaagcctgctggaagaagtggcttcgctggtggagtggccggtcgttctgaccgcaaaattcgaagagaaattcctcgcggtgccggctgaagcgctggtttacaccatgaaaggtgaccagaaatacttcccgggtattggtgccgggttactgttcggtaagttgctgtcggtgtcatttggtccggcggggcttgggctggcggcaaatttccgccagttgattaccgtgctcggcgtgcttgccggggctggcatctttaacggtgtaaccaaatacgttgcccagtaccatgataatccgcaacagctgcgccgcgtggtcggcacttcatcagcgatggtacttggtttctctacgctgatggcgctggtttttgtgctggcagctgcgccaatcagccagggattgtttggtaataccgactatcaggggctggtgcgtttagtggcgctggtgcaaatggggatcgcctggggcaacctgttactggcgctgatgaaaggctttcgcgatgccgcaggtaatgcgttatcgctgattgtcggcagcttgattggcgttctcgcgtactacgtcagttaccgtttgggcggttatgaaggggcgttgctgggtctggcgctgattcccgcgctggtggtaattcctgccgccatcatgttgatcaaacgtggtgtcatcccgttaagctatctgaaacccagctgggataacggtctggcagggcagttgagcaaatttacgctcatggcgttgattacgtcggtgaccttgcctgcggcgcggctgcgttggctgaactcagccagcgtggtaccaaatatcgcctgcgcgatttccggtttgcttaactgcaccagttgcagcacctcttcttcgctgacggtttaccgccggattttgcaacactggtaccggagctga

SEQ ID NO: 14976 - DNA, 1186 bp, Homo sapiens
  SIMILAR (740)..(1081): 441254mologous to Escherichia coli glycine-tRNA synthetase, beta subunit,accession number U00039,Smith-Waterman Score=167.
tcacatggccaccagatctatatcccacttattccagccacaatcatccatcgtgcacaggccattcgaaccgtcccggataaacagggtggtattcggccattccatttcggtggccagcaaacacatttccgcccaatttccagggccttgccgccaaaactgtttggggaaaaggggccgaatcgggttgccggggcccttctttcggctattaaccgcccaagcttgggcgaaaaagggggatatttttgccctcccattccaacccgaataccaaccggatttgcccaaactgctgcatgaacggcgtctcgaccgcgaacactacatcgaagagttcgttggtcatctgcgcgtggaccaaacacgcgctgttgaacgcgattttgcagccagagcagttgtggaaatcggggagtcgctggcgaataaacttggcattgcccaggggataccgtgaaagtctcctccaaccgtggcaggctgagcgtctgactaccgataaaggcgaatggctgctgtatcggcccatgtgaagggcgaaagcaccgaagcactgctgccgaatatggttggacttctctggcgaaactgccgatcccgaaactgatgcgttggggcgcagcgacgtgcacttcgtgcgtccggtgcacaccgtgaccctgctgctggggacaaagtcattccggcaaccattctgggcattcagtccgatcgcgtgatcgcggccaccggtaaggcgaagattaaagccgatgccgaagaagcagcgcgtagattggcggtaacgctgacttaagcgaaagcctgctggaagaagtggctcgctggtggagtggccggtcgttctgaacgcaaaattcgacgagaaattctcgcggtgccggctgaagcgctggtttacaccatgaaaggtgaccagaatacttcccggtgtatgcgaacgacggcaaacgctgccgaactttatctcgtgccaacatcgaatcgaaagatccgcaagattatctccggtaacgagaagtcgttcgtccggttggcggatgccgagttcttcttcaaacgacgtaaaaacgtctttttttaccgcaccaaaagttgccgccgagccaaatacttcaccagcagacgagaaattacgccagtttttgccatcgacatcgtgataattggacatcggcat

SEQ ID NO: 14977 - DNA, 2344 bp, Homo sapiens
  SIMILAR (331)..(1176): 691254mologous to Homo sapiens 88-kDa Golgi protein,accession number AF204231,Smith-Waterman Score=952.
tcagggggctgtgctgggctccacggtggcctctgcagcaaggagccgtttcaggcgtctgtccagcagggagtcgctggtcatgcctgtgccccggcggcactccaggtcccggtctgtggaaccctcagtgactgtggcagcagagcagcctctctttgcgaaaacccttcttttatatctctgtacggtcgcctggttgcgacttctctggcgaaactgccgatcccgaaactgatgcgttggggcgcaagcgacgtgcacttcgtgcgtccggtgcacaccgtgaccctgctgcatgggcgacaaagtcattccggcaaccattctgggcattcagtccgatcgcgtgattcgcggccaccgctttatgggcgagccggaattcaccatcgataacgccgatcagtatccggaaattctgcgtgagcgtgggaaagtcatcgccgattacgaagaacgtaaggcgaagattaaagccgatgccgaagaagcagcgcgtaagattggcggtaacgctgacgcaaaattcgaagagaaattcctcgcggtgccggctgaagcgctggtttacaccatgaaaggtgaccagaaatacttcccggtgtatgcgaacgacggcaaactgctgccgaactttatcttcgttgccaacatcgaatcgaaagatccgcagcagattatcgcatccaggcgctggctggctggattgctgaacaagattggcgctgacgttaaccacgctacccgtgcgggtctgctgtctaagtgcgacctgatgaccaacatggtcttcgagttcaccgacacccagggcgttatggggatgcactatgcgcgtcacgatggcgaagcggaagatgtcgcggtggcgctgaatgagcagtatcagccgcgttttgctggtgatgacctgccgtccaacccagtagcttgtgcgctggcgattgctgacaagatggataccctggcgggtatcttcggtatcggtcagcatccgaaaggcgacaaagacccgtttgcgctgcgtcgtgccgcgcttggcgtgctgcgaattatcgttgagaagaacctcaaccttgatctgcaaacgctgaccgaagaagcggtgcgtctgtatggcgataagctgactaatgccaacgtagttgatgatgttatcgactttatgctcggtcgcttccgcgcctggtatcaggacgaaggttataccgttgacaccatccaggcggtactggcgcgtcgtccgactcgtccggctgatttcgatgattggcacgccctcgggcgggctggcacaggtgatgttgttgtaggtgtacgcgggcggctggcaatcgtccccctcacagatggcctggacgaagcggggcacagcactggggttctgcagggcgaagtcccgcagcgccttgagagggcagccacagtcccaggggttaccctccagccacaggcgctccaggcccgggggctgcggcgtgaaggtccgcagtgagttgttcctgaggctgaggtagcgcagccgccccagtggtgccaagaggctgttgggcaatgcctccaggcggttgtgcgagacgtccagccagaaggcccgctgcagggggcccagggcgtccgccggcagctctgccaggcggttgcgggagagcagcaggtactccagcttgcccaggccctggaagaggcggtggggcaggtgcgtgagctggttggaggtcaggtcgagctccagcagctccgccagcccccacaggctctgctcctcaatgcccacgaggccgttgtccttgaggaagagtcggcggaacccccgcggcgggagagccaggtgcggcaactggcgtggatcggcgatggcgtatgggtgtccatccgcctggacttcaccctgaagctctttctttctggctgcccttaacatttttttcttcatttcaaccttggtgaatctgacgactatatgtcttggggttgctcttctcaagaagtgtctttgtgatgttctccgaattttctgaatttgaatgttggcctgtcttgctatgttggggaagttctcctggataatatcctgaattgtgttttccaaattggttccattctcccagtcactttcaggtacaccagtcaaatgtaggtttggtcttttcacatagtcccgtatttcttggaggctttgttcattccttttcattctttcttctctaatcttctcttcacgctttatttcattaagttgatcttcaatctctgatattttttcttctgcttgatcaattcggctatcgatacttgtgtatgcttcacgaagttctcgtgctgtgtttttcagctccat

SEQ ID NO: 14978 - DNA, 384 bp, Homo sapiens
  SIMILAR (1)..(150): 1001254mologous to Escherichia coli probable copper- transporting atpase,accession number U58330,Smith-Waterman Score= 246.
  misc_feature (1)...(384): n = a,t,c or g
ctgctcggtgcgtttatctacaacagtatcggtattccggtcgccgccggtattttgtggccgttcactggaacactgcttaacccggtagttgccggagcggcaatggcgctctcgtcgattaccgtagtgagtaacgccaaccggttggcgtaagcgtcgcatcaggcaatggtgctcggatgccggatgcggcgtaaacgccttatccggcctacggttcagccacagcctggcgctgttctcggcggcgatgttcattctcggggtggtcagcggcatcaccatgtcgatcggnccctgaattctttcttgtgtgagatccaagaaccccctcttggtgtctggatctggacccctttcttgtaacagcaccatccacat

SEQ ID NO: 14979 - DNA, 723 bp, Homo sapiens
  SIMILAR (73)..(519): 921254mologous to Escherichia coli K12 putative transport,accession number AE000412,Smith-Waterman Score=670.
acaaaatcacctaaaatcgcccgctcgcggcatatcccgctatgccattttatttttgaacgcaggccaatcatgactaacagcaatcgcatcaagctcacatggattagctttctctcctacgcactgactggtgcgttggttattgtccccgggatggtgatggaaaatatcgccgattatttcaatctgcctgtttccagtatgagtaataccttcaccttcctcaacgccggcattttaatctctatcttcctcaacgcctggctgatggaaatcgtcccgttgaaaacgcagttacgttttggctttctcctgatggtgctgccggtagccggtttgatgttcagccacagcctggcgctgttctcggcggcgatgttcattctcggggtggtcagcggcatcaccatgtcgattggtacattcctggtaacacaaatgtatgaagggcgtcagcgcggttaccgcctgtttttggccgcctccttattcagtatggctggagatgattttcccaatgatcgccgcgtttttactggcgcccagcagttagtggtagtgggtttatgcctgcctcgggctggcgtatgtcactatttttattatgaccttcggctgtgagttcccggcgttgggcaaacatgcgccaaaatcgtatgctccggtagagaaagtaaagtgggggatcctcgggggcgcgagcagctttcgtgcagtcga

SEQ ID NO: 14980 - DNA, 1046 bp, Homo sapiens
  SIMILAR (967)..(1683): 861254mologous to Homo sapiens putative p150,accession number U93563,Smith-Waterman Score=1061.
tgtgtgttgattttgtactctgcaactatgccaaaactatttgttagctcatagatgttttgtggattatatgctaaataatgttatctgcaaatagagtagttttacttctgcctttcaatttgaatgtcttttattttttttttcttgcctatttgctctggctagaacttttaatacagtgttgaattgcagtggtgtgaaagcactatcattgcctgttcatgatcttagggggggatctttcagtctttcactatggagtatgttacctatgagttttttgtatatgtgctttattatgtggaggaacaggcagcagtctttgctgtttggcagcctccactggtgataccgaggcaaacagggtctggagtggacctccagcaaactccagcagacctgcagcagaggggcctgactattagaaggaaaactaacaaacagaaagcaataacatcaacattaacaaaaagcacgcccatgcaaaaaacctatccaaagtgcacaaaactgaacagagaagagtatgacgaattgacagaagtaggcagaaggtgggtaataataacaaactcctttgagctaaaggagcatgttctaacccaatggaaggaagctaagaaccttgataaaaggttacaggaagggctaactagaataaccagtttagagaagaagataaatgacctgatggtgctgaaaaacacagcacgagaacttcatgaagcatacacaagtatcaatagtcgaattgatcaagcggaagaaaggatatcagagattgaagatcaacttaatgaaataaagcttgaagacaagattagaggaaaaagaataaaaaacaaacaaacaaacaaagcctctaaaaaatgtgggactatgtgaaaagaccaaacctacgattgattggtgtacctgaaagtgatgaggagaatgtaaccgagctggaaaacactcttcaggatatcatccaggagaacttccccaatctagcaagacaggccaacattcaaattcaggaaatacaaacactactaagataa

SEQ ID NO: 14981 - DNA, 1134 bp, Homo sapiens
  SIMILAR (500)..(429): 411254mologous to Homo sapiens Fragment of human secreted protein encoded by gene 89,accession number Y02883,Smith-Waterman Score=42.
atggcgaccggctttctccctgaacgatcggccactttaccggcaaataacatcgcagctgccatccccgccagatatacggagaacgcaatatgcaactgcgcttcgctggcattgagatcggcggcgatgcgcgcacaaaatcacggttataccaaagagaatgacaatcgccggaataagattgccgccccagaccgtgaacatctgattgggaaacttcttgcgagctttgattgcaagcactgcgggaataatgaccgcccagatggtggcgcacagcccggcaccgccgattccgtaaataaagccgttcgggaagatcagatacaacccgtctgggacagcaacggataccgaggcgcggggccgggggttggtttattaaaaaaaaccagcgcccgggtggttacgttactggggagcctgcgcaaaggctcatttaatggcatggttgcacggaccctgccgaaaattgctccggcgagcatggaagtcaatgcgttaccatccattgccgacattcccttgtatgacgctgacgtacagcaggaagaaggttttccagcaacggttgaagctctggcggaacagatccgtcaggctgacggtgtggtgatcgtcacgccggaatataactactcggtaccgggtgatgcgtgcatacatgacagcttttttgttgaggaagggcccgaagaactggatacttcggcacgtaatgccggggctctaacccgccgccgcgaaattcgtgatgctgcaactctgctacgtctggggctggcttacggccccggggggatgtcattacgtgaagtcactgcatgggctcagctccatgacgttgcaacattatctgacgtggctctcctgaagcggctgcggaatgccgccgactggtttggcatacttgccgcacaaacacttgctgtacgcgccgcagttacgggttgtacaagcggaaagagattgcgtcttgtcgatggaacagcaatcagtgcgcccgggggcggcagcgctgaatggcgactacatatgggatatgatcctcatacctgtcagttcactgattttgagctaaccgacagcagagacgctgaacggctggaccggcccgttacactctattag

SEQ ID NO: 14982 - DNA, 756 bp, Homo sapiens
  SIMILAR (1007)..(768): 711254mologous to Homo sapiens Human secreted protein HLYES38, SEQ ID NO:220,accession number Y86305,Smith-Waterman Score =282.
ttaaccggcggcgtgtttaacttcaccggtggtgtggtcggcataaccgttccggtggtgagaaagtacctggcacacggttacggtttcgcacctgcactggtttatatctccgccatctagttgattggcgcgctctcttatatcctgctggtgggcgatgagaagcgcgttggctaatccttcaactgtggaatatgtgccacaccactgcgcataatccactttcttaaagccggtgcggtcaagacattggctttttactatcttgccgaagagttttaaacgcatttgcgggtggcacacaaataaatcggtattgagcttctctggctgcttcagtaacaccgaacgcagaatagttgtgctatccaccgcatagctaaatccctccaacaagctggcgcttattaatcccgccgcttcaccaatcataaaaggcgttgatcttaccgcaaaccaaatacatgcattgccgacattcccttgtatgacgctgacgtacagcaggaataatgttttccagcaacggttgaagctctgggggaacagatccgtcaggctgacggtgtggtgatcgtcacgccggaatataactactctgtaccgggtgggctgaaaaatgccatctactggctttcccgcctgcgccagattctggttttcctcgatgcaatggtgatgaacaagccggaatttatgggcggcgtgattcaaaacaaagttgatccgcaaaccggaaaagtgattgatcat

SEQ ID NO: 14983 - DNA, 1320 bp, Homo sapiens
  SIMILAR (361)..(924): 981254mologous to Escherichia coli o188,accession number L10328,Smith-Waterman Score=944.
tacgaagcgcgggcgcagctcatcacgctgcgccgaagcgtgctaaaactaaccggtgatgttttgaatgacgatccgcgcgatctgcagttgctgcccattgccggacgcctgaaatgtgctcatgtaaatcatgtagaagcgttatgcgacgcggaagacgtgctggtgtggtccgtggcggtcacgcccacgattgaaaagctcagtgtctgggagttagatggcaaacacggctggaaaagcctgccggatattcacagccgcgccaacaatcctaccagccggatgatgcgttttgcccaactctctaccgtgaaggctttttcgccaaattgatagacaaccacaggagtcatcatgtctgaaaaattgcaggtggttacgttactggggagcctgcgcaaaggctcatttaatggcatggttgcacgtaccctgccgaaaattgctccggcgagcatggaagtcaatgcgttaccatccattgccgacattcccttgtatgacgctgacgtacagcaggaagaaggttttccagcaacggttgaagctctggcggaacagatccgtcaggctgacggtgtggtgatcgtcacgccggaatataactactttgtaccgggtgggctgaaaaatgccatggactggctttcccgcctgccggatcaaccgctggccggtaaaccggtattgattcaaaccagctcaatgggcgtgattggcggcgcgcgctgtcagtatcacctgcgccagattctggttttcctcgatgcaatggtgatgaacaagccggaatttatgggcggcgtgattcagaacaaagttgatccgcaaaccggagaagtgattgatcagggtacgctggaccacctgaccgggcaattgaccgcatttggtgagtttattcagcgagttaagatctaaataaaaaacccgccagcaatcatgcatggcgggtttttaacgcgctatcgattttaatgagcgtcgataaagacaatcttcaggataaacagcagcgcaacgatgattacgcacgggcttagatcacgcagaccggcggtaccgatttttatcacgccagtagagataaaggccagcgcggattcctttgggaattcaaaaaagctgaaacggggttattacggggggaaataaaacccccgaaacagaaattcggaagataccttttagaaggggaacctgggggggatttgcaaactttggcacttggcccggggaatttaaccaacggcggtggaccttggaaaaaaccccgggggggttaccccaactttaataggcgcttggcagaca

SEQ ID NO: 14984 - DNA, 641 bp, Homo sapiens
  SIMILAR (205)..(660): 581254mologous to Homo sapiens Nogo receptor,accession number AF283463,Smith-Waterman Score=454.
  misc_feature (1)...(641): n = a,t,c or g
gagcaagatgaacagaaactgaggttttgtaaacgccacctttatgggcagcaaccccgatcaccggtggaaatacgtcttcagcacgtcgcaatcgcgtaccaaacacatcacgcatatgattaatttgttcaattgtataaccaacacgttgctcaacccgtcctcgaatttccatatccgggtgcggtagtcgccctgctttctcggcatctctgatagcctgagaagaaaccccaactaaatccgctgcttcacctattctccagcgccgggttattttcctcgcttccgggctgtcatcattaaactgtgcaatggcgatagccttcgtcatttcatgaccagcgtttatgcactgggtaaggggttccatgaggttcattctgaacataccttaatcaatggtttgcgggtttttatataancttgcgaattaatgtggagggaccaccaaatcgcagagtttcaaaaacccgagggtgtgttaatataagacaactctccaaagggagtatagaggagcacacccttagncactaatatcattgcgctccccgacccgggacccgacctagggagggacttgcngagacccaaagaaaacgtgtttggaaatacttttaccttagcgcagagan

SEQ ID NO: 14985 - DNA, 6021 bp, Homo sapiens
  SIMILAR (751)..(1014): 931254mologous to Homo sapiens prepro-major basic protein homolog,accession number AF132209,Smith-Waterman Score=496.
tattttggcagccttatccaagtctggtacaacatagcaaagagaacaggctatgaaataagatggcaagaaagaaatttagtggattggaaatctctctgattgtcctttttgtcatagttactataatagctattgccttaattgttgttttagcaactaagacacctgctgttgatgaaattagtgattctacttcaactccagctactactcgtgtgactacaaatccttctgattcaggaaaatgtccaaatgtgttaaatgatcctgtcaatgtgagaataaactgcattccagaacaattcccaacagagggaatttgtgcacagagaggctgctgctggaggccgtggaatgactctcttattccttggtgcttcttcgttgataatcatggttataacgttcaagacatgacaacaacaagtattggagttgaagccaaattaaacaggataccttcacctacactatttggaaatgacatcaacagtgttctcttcacaactcaaaatcagacacccaatcgtttccggttcaagattactgatccaaataatagaagatatgaagttcctcatcagtatgtaaaagagtttactggacccacagtttctgatacgttgtatgatgtgaaggttgcccaaaacccatttagcatccaagttattaggaaaagcaacggtaaaactttgtttgacaccagcattggtcccttagtgtactctgaccagtacttacagatctcagcccgtcttccaagtgattatatttatggtattggagaacaagttcataagagatttcgtcatgatttatcctggaaaacatggccaatttttactcgagaccaacttcctggtgataataataataatttatacggccatcaaacattctttatgtgtattgaagatacatctggaaagtcattcggtgtttttttaatgaatagcaatgcaatggagatttttatccagcctactccaatagtaacatatagagttaccggtggcattctggatttttacatccttctaggagatacaccagaacaagtagttcaacagtatcaacagcttgttggactaccagcaatgccagcatattggaatcttggattccaactaagtcgctggaattataagtcactagatgtagtgaaagaagtggtaaggagaaaccgggaagctggcataccatttgatacacaggtcactgatattgactacatggaagacaagaaagactttacttatgatcaagttgcgtttaacggactccctcaatttgtgcaagatttgcatgaccatggacagaaatatgtcatcatcttggaccctgcaatttccataggtcgacgtgccaatggaacaacatatgcaacctatgagaggggaaacacacaacatgtgtggataaatgagtcagatggaagtacaccaattattggagaggtatggccaggattaacagtataccctgatttcactaatccaaactgcattgattggtgggcaaatgaatgcagtattttccatcaagaagtgcaatatgatggactttggattgacatgaatgaagtttccagctttattcaaggttcaacaaaaggatgtaatgtaaacaaattgaattatccaccgtttactcctgatattcttgacaaactcatgtattccaaaacaatttgcatggatgctgtgcagaactggggtaaacagtatgatgttcatagcctctatggatacagcatggctatagccacagagcaagctgtacaaaaagtttttcctaataagagaagcttcattcttacccgctcaacatttgctggatctggaagacatgctgctcattggttaggagacaatactgcttcatgggaacaaatggaatggtctataactggaatgctggagttcagtttgtttggaatacctttggttggagcagacatctgtggatttgtggctgaaaccacagaagaactttgcagaagatggatgcaacttggggcattttatccattttccagaaaccataattctgacggatatgaacatcaggatcctgcattttttgggcagaattcacttttggttaaatcatcaaggcagtatttaactattcgctacaccttattacccttcctctacactctgttttataaagcccatgtgtttggagaaacagtagcaagaccagttcttcatgagttttatgaggatacgaacagctggattgaggacactgagtttttgtggggccctgcattacttattactcctgttctaaaacagggagcagatactgtgagtgcctacatccctgatgctatttggtatgattatgaatctggtgcaaaaaggccatggaggaaacaacgggttgatatgtatcttccagcagacaaaataggattacatcttagaggaggttatatcatccccattcaagaaccagatgtaacaacaacagcaagccgtaagaatcctctaggacttatagtcgcattaggtgaaaacaacacagccaaaggagactttttctgggatgatggagaaactaaagatacaatacaaaatggcaactacatattatatacattttcagtttctaataacacattagatattgtgtgcacacattcatcatatcaggaaggaactaccttagcatttcagactgtaaaaatccttgggttgacagacagtgttacagaagttagagtggcggaaaataatcaaccaatgaacgctcattccaatttcacttatgatgcttctaaccaggttctcctaattgcagatctcaaacttaatcttggaagaaactttagtgttcaatggaatcaaattttctcagaaaatgaaagatttaattgttatccagatgcagatttggcaactgaacaaaagtgcacacaacgtggctgtgtatggagaacgggttcttctctatccaaagcacctgagtgttactttcccagacaagataactcttattcagtcaactcagctcgctattcatccatgggtataacagctgacctccaactaaatactgcaaatgccagaataaagttaccttctgaccccatctcaactcttcgtgtggaggtgaaatatcacaaaaatgatatgttgcagtttaagatttatgatccccaaaagaagagatatgaagtaccagtaccgttaaacattccaaccaccccaataagtacttatgaagacagactttatgatgtggaaatcaaggaaaatccttttggcatccagattcgacggagaagcagtggaagagtcatttgggattcttggctgcctggatttgcttttaatgaccagttcattcaaatatcgactcgcctgccatcagaatatatatatggttttggggaagtggaacatacagcatttaagcgagatctgaactggaatacttggggaatgttcacaagagaccaaccccctggttacaaacttaattcctatggatttcatccctattacatggctctggaagaggagggcaatgctcatggtgttttcttactcaacagcaatgcaatggatgttacattccagccaactcctgctctaacttaccgtacagttggagggatcttggatttttatatgtttttgggcccaactccacaagttgcaacaaagcaataccatgaagtaattggccatccagtcatgccagcttattgggctttgggattccaattatgtcgttatggatatgcaaatacttcagaggttcgggaattatatgacgctatggtggctgctaacatcccctatgatgttcagtacacagacattgactacatggaaaggcagctagactttacaattggtgaagcattccaggaccttcctcagtttgttgacaaaataagaggagaaggaatgagatacattattatcctggatccagcaatttcaggaaatgaaacaaagacttaccctgcatttgaaagaggacagcagaatgatgtctttgtcaaatggccaaacaccaatgacatttgttgggcaaaggtttggccagatttgcccaacataacaatagataaaactctaacggaagatgaagctgttaatgcttccagagctcatgtagctttcccagatttcttcaggacttccacagcagagtggtgggccagagaaattgtggacttttacaatgaaaagatgaagtttgatggtttgtggattgatatgaatgagccatcaagttttgtaaatggaacaactactaatcaatgcagaaatgacgaactaaattatccaccttatttcccagaactcacaaaaagaactgatggattacatttcagaacaatttgcatggaagctgagcagattcttagtgatggaacatcagttttgcattacgatgttcacaatctctatggatggtcacagatgaaacctactcatgatgcattgcaaaagacaactggaaaaagagggattgtaatttctcgttccacgtatcctactagtggacgatggggaggacactggcttggagacaactatgcacgatgggacaacatggacaaatcaatcattggtatgatggaatttagtctgtttggaatatcatatactggagcagacatctgtggttttttcaacaactcagaatatcatctctgtacccgctggatgcaacttggagcattttatccatactcaaggaatcacaacattgcaaatactagaagacaagatcccgcttcctggaatgaaacttttgctgaaatgtcaaggaatattctaaatattagatacaccttattgccctatttttacacacaaatgcatgaaattcatgctaatggtggcactgttatccgaccccttttgcatgagttctttgatgaaaaaccaacctgggatatattcaagcagttcttatggggtccagcatttatggttaccccagtactggaaccttatgttcaaactgtaaatgcctacgtccccaatgctcggtggtttgactaccatacaggcaaagatattggcgtcagaggacaatttcaaacatttaatgcttcttatgacacaataaacctacatgtccgtggtggtcacatcctaccatgtcaagagccagctcaaaacacattttacagtcgacaaaaacacatgaagctcattgttgctgcagatgataatcagatggcacagggttctctgttttgggatgatggagagagtatagacacctatgaaagagacctatatttatctgtacaatttaatttaaaccagaccaccttaacaagcactatattgaagagaggttacataaataaaagtgaaacgaggcttggatcccttcatgtatgggggaaaggaactactcctgtcaatgcagttactctaacgtataacggaaataaaaattcgcttccttttaatgaagacactaccaacatgatattacgtattgatctgaccacacacaatgttactctagaagaaccaatagaaatcaactggtcatgaagatcaccatcaattttagttgtcaatgggaaaaaacaccaggatttaagtttcacagcacttacaattttccctcttcacttggttcttgtactctacaaaatatagctttcataacatcgaaaagttattttgtagcgtacatcaatgataatgctaattttattatagtaatgtgacttggattcaattttaaggcatatttaacaaaatttgaatagccctatttatccttgttaagtatcagctacaattgtaaactagttactaaacatgtatgtaaatagctaagatataatttaaacgtgatttttaaattaaataaaatttttatgtaattatatatactatatttttctcaatgtttagcagatttaagatatgtaacaacaattatttgaagatttaattacttcttagtatgtgcatttaattagaaaaagagaataaaaaatgtaagtgtaaaaaaaaaaaa

SEQ ID NO: 14986 - DNA, 1818 bp, Homo sapiens
  SIMILAR (694)..(2031): 991254mologous to Homo sapiens KIAA0455 protein,accession number AB007924,Smith-Waterman Score=2290.
atggagtattacgtagccgtaaaggacaacgagatcctgtcatttgagtcaacatgggtgggactgaatttcattatttccagtgtgctacaccaggcacagagggacatgacttcacatattttcacttatttcggggagctgataatgtcaacgatttgcactgccgcggactcgagagaggacccctggtttccacagactctggaaggcaacaccgatcaccggtggaaatacgtcttcagcacgtcgcaatcgcgtaccagacacatcacgcacatgattaatctgttcaattgtataacctacacgttgctcaacccgtcctcggattttcatatgcgggtgagaggcgataaaagagctcacccccagcgcagaggcaataatgtgtcagagacctttggtggaagaccgacaatggacctgacacacgggaaacagcccttccagaacacactgatcgtgctgatcgtgaacgatgaccgactgacgtacctaatccatcgactatctgacgtcagtgtcgactcgacccacgagacctaccgacgctcgcgattactgactgtcgtaactcctagcgagctagcagctggagtgacaagcgatttgctatctgaacgcgacgagcgtgctgatcatcaacgagtcgacgaacgtacgaccgacgacgctgacgcactaacagatcacgatgaggacgatcattctgccgagcgacgtaacgagcgatgtcgagtgactctacctactacgctgactagcgtctctgatcgcatgtctacgcgctacgagccgcagcttgacagtgcctcggcgagcactagctactacgatgccgatatatccgacatgagcatgaccgatccatgtgctgagacgatgccgactgctactaacagtgttacagaagttagagtggcggaaaataatcaaccaatgaacgctcattccaatttcacttatgatgcttctaaccaggtggcacccaggaagtatcaccacgggtatcgcgctcgccacgccagccctgacgcaccgagttacggctgcttaccggcttgcgtcaatcaaaatcagcgtgttttccggacccataccgcgaatatcaatctgtcggttattcccacgctgaccactggtggagttaccggtcaggttaacgcctggcatggtacggatgatcttcgacacatcgcgggcaaccgggttttttcggatttcatctgcggtgatggtcgaaacgccaagcgcctgttagttctgctcggcggcgctgactacgtctatcgagtactgcaggctagctgtggctgcgacgtggtgacggagtactctgactgcggaccacgtactacgaatatcgacgaactgccacagactgctgacatgatacgacgtgcctgcttacctactatcggctgtgctctgctagcgtctgctgccgtcggtaactacggccgccgaatcagcatacgccgacgaacgtacacgacttcgacgtacgagtgcaaccgacctacgacactgcaatatatcagagctcgactgccatgtacgtccgaccgacgcgacgtgaacgtgcgatatcgactgcgaacgagcagcggctgcctgatcacgatgctacatcgagacagctacggagcgacatcccgagagtacgtggattgtccaggtccgcggctcgcattcgatctcatgcccctaggtgcttccctgcgcgcgacttctctccgctcctcgtggcagacaaccttcgatgccggtctcccctcccttcaacccccggccggcgccccccggccgccctag

SEQ ID NO: 14987 - DNA, 936 bp, Homo sapiens
  SIMILAR (70)..(222): 981254mologous to Homo sapiens Human secreted protein sequence encoded by gene 14 SEQ ID NO:75,accession number B24450,Smith-Waterman Score=280.
ggtgggcagtttaccttcatcaaatttgcccattaactcagtttcaatacggggcagagccagacaggaaggaataatgtcaagccccggccagcaagtgggctttattgcataagtgacatcgtccttttccccaagatagaaaggcaggagagtgtcttctgcatgaatatgaagatctggtacccatccgtgatacattgaggctgttccctgggggtcgttaccttccacgagcaaaacacgtagccccttcagagccagatcctgagcaagatgaacagaaactgaggttttgtaaacgccacctttatggggcagcaaccccgatcaccggtggaaatacgtcttcagcacgtcgcaatcgcgtaccaaacacatcacgcatatgattaatttgttcaattgtataaccaacacgttgctcaacccgtcctcgaatttccatatccgggtgcggtagtcgccctgctttctcggcatctctgatagcctgagaagaaaccccaactaaatccgctgcttcacctattctccagcgccgggttattttcctcgcttccgggctgtcatcattaaactgtgcaatggcgatagccttcgtcatttcatgaccagcgtttatgcactgggtaaagggtttccatgagtttcattctgaacatcctttaatcatttgctttgcggtttttttattaaatcttgcaatttactgcaaagcaacaacaaaatccgcaaggtcctcaaaaaacccgcaaagttgtttaaaataagagcgaccctctccaagggagattaagaagagcgcatacctcagtcacttattatcactagcgctcgccgcagccgtgtaacgcgagcatagcgagcgaactggcgaggaagcaaagagaactgtttgcaatactttacctcaccgagaagaaatatcccggg

SEQ ID NO: 14988 - DNA, 498 bp, Homo sapiens
  SIMILAR (158)..(358): 951254mologous to Homo sapiens dJ576H24.4 (novel member of the PTPNS (protein tyrosine phosphatase, non-receptor type substrate) family),accession number AL049634,Smith-Waterman Score= 351.
tttcaggtcttttaccagagtttttagagtaacttcttttccaaaaacagaaagatcaaggatggcatttacagagctgaagatcttgtcaccaaaatgagagactctgagagagactgtgagttcagcatgtctagtcttccttgctagccagtgtttcttttgtctgatgacattctctgcaacttttttttctttgaatattacatatgcaactcccttggttcttgtcggatatatcacatcttcaacatctccgccctcattcttaatgtcttggaagtggctcttcactaatacggccaataattgatcactaaaaaggtcaactggaagaccagcaactacaaccgttctttcaggagctttggattccttgacattcaaaactgatgccatggcggaggggagacgcgccctcagcggccacaggaagcccacaaccagcggaacgcaggcgatggggagaggagcgagcaggcaggttttggtttcgtt

SEQ ID NO: 14989 - DNA, 514 bp, Homo sapiens
  SIMILAR (173)..(514): 351254mologous to Homo sapiens serum protein,accession number M88338,Smith-Waterman Score=112.
ctttaaaactttgtacagccgaggaagttttttctcaatttctgtaattacttcttttccttcttctccagtcatacgactggtcagagtcaggtaagcgtcagtctgccctccatgggaggcagaagggtcttccaaagtctccaacagcggcgcgagggggctctgacccctggccgtcatgtcggcacccctgaggcccgaaccggaagaggagaaaatccagtgaccgatggaaacagccccgcgtcgtcccagtgtgagtccggccctcacacccgcacgcccgcccgggctcacagccacgccgcgtctgcaccccaggcctccgaatcaccaaaccccagcgcgaacctcctccggcgcccgacaccagacacctgagcccacgccacattcgggcctgggcgttcccgccaccactttcccgggcagctttcaacagagggaggagatcggcggagggcgggagaagccggcggaacgaggcatctcgccgcgaggggggggaggg

SEQ ID NO: 14990 - DNA, 1116 bp, Homo sapiens
  SIMILAR (1444)..(1650): 551254mologous to Homo sapiens PRO2221,accession number AF116695,Smith-Waterman Score=187.
atggcccaggcttactttgggaggccaagagcgccccactctccgctacgccccgtggcggacctcacctggtcagagtcaggtaagcgtcagtctgccctccatgggaggcagaagggtcttccaaagtctccaacagcggcgcgagggggctctgacccctgccgtcatgtcggccaccctgaggcccgaaccggaagaggagaaaatccagtgaccgatggaaacagccccgcggcggcccagtgcctccgaatcaccaaaccccagcgcgaacctcctccggcgcccgacaccagacacctgagcccacgccacattcgggcctgggcccgtcccgccaccactttcccgggcagctttcaacagagggaggagatcggcggagggcgggagaagcccggggaacgaggcatctcgccgcgagggggcggaggcacccagacgctgccagagctcgactttcccagctccggctgtttactcacgcgtgcggcgcgctccctcctagaccaagatggcggctgggcgggcccaggagtgcgcgggagtaggttaggcctggcgggagaagttcgagccaatccaacagtcagcggcacaccggagttatcgatcgcctcccttcccatcccttcccatcccttccctgcccagctgccgcgtcacgcccctctgccctgcaccctggcccgtcgcgcccggttccgcgcccttctaggggaccatggcgacggtacaggcacggacctgcaccgcaaaacccaaagcaaaagcaacttgccatggcggaggggagacgcgccctcagcggccgcagaaagcccacaaccagcggaacgcaggcgatggggagaggagcgagcaggcaggttttggtttcgttttttgttccagctcccttggaggctacgaagaaaagggcggtccttccacccgatccggctgttctgcgacctcgtggcctctgagtgggagctcggactcaggagtgctgttgccagcgcctgcccagacgccctccgtagttttgcaacttgtggaagcactctggagagaggccgagaggattcctcgacaggaaatttgggaattctctgggtgatgcatcagtga

SEQ ID NO: 14991 - DNA, 478 bp, Homo sapiens
  SIMILAR (536)..(129): 591254mologous to Homo sapiens Amino acid sequence of a human phosphorylation effector PHSP-2,accession number Y68770,Smith- Waterman Score=309.
aacagtactcaggaatcaagagtggccaaacgctgccaatgggagataggaaactcgttgatcattggtagagaaactcggcacaacgccgagtcacggtacacggtgtcttcggcctcgcccagggacacttggtgacccgaggtcgagttccaagtcggagacagattttgcgagtggataagacggtaagccgggatcccagggccttctccagctgcactgggtgtcaagcgccacggggtttgatggggactccttctggttccaccctcgcccactcacttctcgggctggccataatgctgcacagagccccggccagccattaatatcaggcgcaggagaaaacccagtaaaatcacttaccagtcttccacctccggtgctgatctagcaagagcctgacccgctggccagactcaagctctgcaccaggtattaccaccctggcgacggctccggagcgccaacgaaa

SEQ ID NO: 14992 - DNA, 1329 bp, Homo sapiens
  SIMILAR (216)..(542): 891254mologous to Homo sapiens dJ576H24.4 (novel member of the PTPNS (protein tyrosine phosphatase, non-receptor type substrate) family),accession number AL049634,Smith-Waterman Score= 511.
atgcttgactattctcaggtgtctccagtaatgcaaaaggcaagtatgagtagtgagggccagatactggaagatctgaggcaactagggactggagcagatgcccagcaaactgcagcagcgctatgggaaagtggtcagactcttaaaaaagaaaacagcaacaacgaaaaaaccccaaaccccatccaaaggctgtacaagcacagtgccagcatctgctcagcttctggtgaggcctcaggaggcttacagtcatggcagagggcaaagcaagaacctgtgtatcacatgcaagacaggggtcaagaaacaggaggagtccagtcttctttgcaggacagcacattgccttttatgaatgagtgtggagtggacactgtatttcaggggcaaggcacggcaccccagaactacggaaacagtactcaggaatcaagagtggccaaacgctgccaatgggagataggaaactcgttgatcattggtagagaaactcggcacaacgccgagtcacggtacacgggacacttggtgacccgaggtcgagttccaagtcggagacagattttgcgagtgggtaagacgcaagagcctgacccgctggccagactcaagctctgcaccaggtattaccaccctggcgacggctccggagcgtcactgacaaccacccggaaatggtactatcgcttccggggctgcctagcgcgcggcgggaaattgtttcccagagcccggattcgtgaagcagttgagtgctgcagcggcagtcgtcgcccctgccgccgctgccaccgaaggaagcatcccagacaccgggaagtctccttccagtatctcccattggccaaatccccaaaagaatgtgatttgcaagagaagaggaagagtggagcaggagcaagcttgggaaaagggcagatgaagagttgtgtttgggctgtgaaaaagtatgaggtgcccagtggatcttttacctcagtcttgtttgtgccaaagattcctgcatcaagaaagtggatactaaccaaggactatataattcatagtgccaaaagtggcagatggcttgatgcaacaacttatgaatggggatataaaattgaaaaagattcccgttattcacctcaaatgcaatctgcacctaaaagatggcgtgaagaactgaaacgcactggtgctccaggagccttccacagatggaaagttgtcctccttgttagaactgataagcgaagtgattctcttataaggttttctgataactttggagactgtgacatcagaatggaggaaaaaactttcaggactctcatggagagctga

SEQ ID NO: 14993 - DNA, 1260 bp, Homo sapiens
  SIMILAR (912)..(514): 551254mologous to Homo sapiens mature non-specific cross reacting antigen NCA-95,accession number X52378,Smith-Waterman Score=377.
atggagctgcctgagtctgaggcagagaaacaggagttcgacaacctggagaagagtataaggcagcccaaacctgctggagggtgctttgtgagagggcctttgacccacaggccaggttccaggactgatccgacagaaacgcaccctcaagagcaccacaaggccgggccagggctgctgctgctactgccactgtctgaactggaaatatttgagccatctccaggggacatgctgggtccaccccacccccggacggttactaggaaggacactgtctacacgaacccatgggcatggaagctgggcaccaacagagtgcagaaacaaactgcaggatgctgtgtggcggagcccgctgtgccccacaaatacatgagaggaggacacaatgatgttgcaaaggctggcgggaggatcaccgaaggagaatccggtttggtatctcacactcccttcacccaggaagcacaggctgtggaaagagtgtcaaggtgggagcaggtaaacccttggcccctgtccgtcactcagtgtgactcagaagaagaagggactccagagatccctcttggctcaaatgcaaaggtgaggataatttgggaaaagaggcaggacaattactttgtgcattttggcagtgggaatgctgtgctgcagaaaggggcacacaaagcccagacgcagacccggggcatctcccatctccacccatctccactcatctccacccatctccacacatctccacacatctccacctccccacagaagggaggaggccaggaggtggacaatgaagacaatcgtgtggagcagctgctgcgcggtgaccgtggtggtggaattgtgatggctggggaccgaagtgccagcgtttctccaagcactaggacatcgcacagccagacgaagtttcttggggccaatagccctgggctgtgggagccctggctgggccacaccccacctcaggcatctgaggggccccttggctgcacccctgcaagcatctgcggcagcaccaggaagccaagcaaacctctcagcaaaaagccgccccaagcggccaggacctcctcatcaaggattgtcattttcaccccaatttctacccgacctccaactcagggtcaaccagagaaagccaaatctgctaccccaaccaatgacttagaaggccccagtgctaaagtcaaatttgtgaacttcctcatggatgaaacattcccggagccatctttcttcttcatctga

SEQ ID NO: 14994 - DNA, 258 bp, Homo sapiens
  SIMILAR (250)..(80): 281254mologous to Zea mays NADPH-dependent reductase,accession number U49500,Smith-Waterman Score=66.
  misc_feature (1)...(258): n = a,t,c or g
ccacaggctcttgagtggctctctggatctntgctggggagctgtggctgtntgaaaaccctttagtttgaagacagtcagtggttttgctagtggtgttatcaggcactttgctntctgtttctatttcttcataagtatggcttattacacttgtggttttttccttcactgagagttctccacttgttcccagaaaacttttgtagatagctagattgtcatatgcatttggattgataacaatgggaactttga

SEQ ID NO: 14995 - DNA, 3426 bp, Homo sapiens
  SIMILAR (85)..(687): 311254mologous to Homo sapiens dJ576H24.3 (novel member of the PTPNS (protein tyrosine phosphatase, non-receptor type substrate) family),accession number AL049634,Smith-Waterman Score= 157.
tcactcactatcactagaacagcatgggggaaactgccccgatgatcccatcacttcccaccaggtccctcctatgatacctgatctctgttgagtactccacagtctcttggaatggttttctaggggactgcctggttcagaatggggaagtaggtcctgactggctgctggaatgagaacctctggagtagcctgataataaaaggccaaactttctagggccaatacatcctgagtcatagagaagccacataaagagtcccctatggcagaactaagtcttctgagaatctttttaggaatctgtgatggagaagaatgactcctcttcttctctgagtcctgtagtaatgcattctctgctctacccttctccatgactgctgcctggtctgtcctagccttgctctgatccacactgagctggccttgagcagggtcgcacctgtacatgatgacaatggctggtttctcactggactctcctttcgcctctgtgaaccagtgatggcgctgaactggaggaggaggcagcatgtgaatgactgtgccatccaggcccaccagtatccctttctctcgctctttctctttgtcatcctcctcatctgttttccgacggcggaagaagcttttaaatgatatccagcgcttaggttttgcatcagctgcccgcctgctgccttcagagtgcaaaactgattcagcttctgttgacctggtagggctggttggcttggtccagttggtgaaatgcctctgcaaaaggttacctgcatggtaaggagaagaagtagagcgtggcgggggaaagggagctggtggctcactttgggggctagtcactaatttggagggagagggggtgactggctttatggatgggtctttctgtactttggtggtaggactgtctgtggtctgaggtgcttcagcctcaccactaggctgagatgtaaagagagatttgggccggactggcgtactcttaggtgtgctcttagcaacatcagcatctggaggaatggcataaagctcttccacactgcaagctttagggccagattgaggtgtttctggaggagactgtgggggttggattgaagccacaatctgagaaagcactgtgcttgctttctctctggtgctgctgctgcccaccatctgagactcctgagtgccttctattttggccacaggctcttgagtggctctctggatctttgctggggagctgtggctggaactatagcttctctgtggtgaagactgacctctgttgagacagttgttaaactcttgaaccttctgagccactgagccccttttatgctctgtgctgtttgaaaaccctttagtttgaagacagtcagtggttttgctagtggtgttatcaggcactttgctttctgtttctatttcttcataagtatggcttattacacttgtggttttttccttcactgagagttctccacttgttcccagaaaacttttgtagatagctagattgtcatatgcatttggattgataacaatgggaactttgatagcatttttggaactccgagcataagttggctcgtcatgaatgataattggaaaaggtggcataccagcattgttataactattaaatttaatttcagacaaattaggtgacttaacagggatggttttggaggaaatgtttgtagctgtgggtgatgtaggtgctgatttgtgacagtttttccttggaggaacatttggtccagttccactagtaattagttctactttaggtatcttttgtcgtggactggtgctagaagtccatacttcttggtatcgaattgcactggatttttggaaatgggcacttatttgtcctggtgtcaatgaagatgatgtaactggagagtttggagtagaggatgagctttttgtcttggggctgttaacagggccctcgaggtgctcactggccatggctgctgacacatccacgacagtatatggcttgcacaatggctgttccaggttcacaactcggtaaggttttgcttgctcttctgtggggacaaggtttatggttactgcttgcccagcaacatctgtagaggctttactttcttccttctcagtttgtacagcaatcttgccatctttctcttctaatcggagagcaaggactgctttgtgggtctctggaacttttattgagcttttggaagcctgtgatgaatctttatcctgattattactagagggactttcataattgggctcaatttccttcatgtccttagaatctcctgggttaccaggagattaatcccccattacaaatcttctgggataaactactggctgtctcagaacgtgattcttctgttaaagaagaatctggtgatgtggagtcagatgacaccatgctctgaatgcttccttgtccataagagaccacagaattttcctcataaccattcaggatttcatcatagctgtcatcatagtccacagcacagattctctgcagagacttgtttcgcagggggatggtattccattttttgtccacaaagaatcgaacaggagacaatgtgtttgctctgaagttggcaaagcgaggttgcggtctcatgcgaatctccatggccaacagctcttcatcactctcatcccaactctcgtgctcctcctccatgttactgaaaagtacatcctcttcactctcctcgccactggaaaactctgggtaacagaaccggcccccttcattactaatcacttctgtgctcccactcagaataacatgcttgccctgagtttcctttatcccacctatcatgcaacttggtggaagctttctttccaatgatcgtttatagcaatcatttattcttcccaagaatgtttctctggagtttgtttcatttcctcttatctgaggggcagtatccaagcctgctatctcctttaacacttcagttagtccattattggtatctgacatcttctttgcactatcattattgccataaggcttaggaacatggctaattccttcatcatcttcattattattggtaagaggtttctgactcaaggcagctctgtttccgttccaccctatgatgaccggtttggttctcaccagtgttcttggatgctaagctcaccacatatactttgcccatctgccactatcatagtgggcttcacagctatagtgggttttttagccacaggaggccggaaattgcccgtgttcctgatgcggtggttgttactgtgattggcattagttttcacattgccatgggtgatgggtgccttctcagggtctgggggaagctggtgcaaacttttaggtttaaagcaattcttgcattcaccaggtttccaaacatgttcagtaaaggtgttacaagcagacat

SEQ ID NO: 14996 - DNA, 1972 bp, Homo sapiens
  SIMILAR (225)..(88): 951254mologous to Homo sapiens DNA replication factor,accession number AF321125,Smith-Waterman Score=221.
gcggccgccacggacggagactgaggctcagaggggacaagacctgcttgaggtcacacaggcagttgagagcagagctgagtcttgaacttgggtctggctgatacccaagactgtccccactgcaatgtgacactcccagcctccagcggaagccttgggagcaggtccccaaaaagctcaaagcggaagaaaaggcggcgacgcaacgtgaactgcctgaagaacgtggtgatctggtacgaggaccacaagcaccgctgcccgtacgagccgcacctggcggagctagaccccacttttggcctgtacaccacggccgtgtggcagtgcgaagctggccaccggtacttccaggacctgcattcgcccctgaagcccctcagagactcaaaaccttgacagtgacaaagtgggcaatgggctggtggctggcagctctgactcatccagctctggctctgcctctgactctgaggagtctcctgagggccagccggtcaaggctgcggcagcggcagcggcagcgacacccaccagcccggtgggcagcagcgggctcatcactcaggagggcgtgcacattccctttgacgtccaccacgtggaaagcctggccgagcagggtaccccgctgtgctccaacccagcaggcaatgggcctgaagccctggagacagtggtgtgcgtgccggtgcctgtgcaagtgggtgcgggccccagcgccctctttgagaacgtgccccaggaggccctgggtgaggtggtggccagctgccccatgccaggcatggtgcccggctcacaggtgatcatcattgcgggccctggttacgacgctctcacggccgagggcattcacctcaacatggcagcaggcagcggtgtccccggcagtggactgggcgaggaggtgccctgtgccatgatggagggtgtggcagcctacacccagacagagcccgagggtagccagcctagcaccatggacgccaccgcagtagcaggcatcgagaccaagaaagagaaggaggacctgtgcttgctaaagaaggaggagaaggaggagccagtagccccggagctggcaacaacggtgcctgagagcgcagagcctgaggcagaggcggacggggaggagctggacggcagcgacatgtcagccatcatctatgaaatccccaaggagcctgagaagaggcggcggagcaagcggtcgcgggtgatggatgctgacggcctgctcgagatgttccactgcccatacgagggctgcagccaagtctacgtggccctcagcagcttccagaaccacgtcaatcttgtgcatcggaaaggaaagaccaaaagtgtgccctcatcctggctgtggcaagaagttctatttatccaaccacctgcggcggcacatgatcatccattcaggtgtccgtgaattcacctgcgagacctgcggcaagtccttcaagaggaagaaccacctggaggtacatcggcgcacccacaccggcgagacccccctggaggtgcgagatctgtggctaccagttgccggcaagcgcgcgtcgttcaactggcacatgaagaaagcaacactgcggaggtgcaagtacaacttcacgtgcgatcgcctgcgggaagcgcttggagaagctggacagcgtcaagttccacacgcttcaaaagccacccggatcacaagcccacctgacccacctgaccactgaccgcccctatttattcgtccgctcggacaccacgcccgggcttgccggggcctggacagctgcgagggccgcccggaccgcgggccggaaggaggcgcccccgccccgccccagagctgggccccctgggcaggttccccaccccgccccaccgcatccttctcggagctggtgcctggggctgcattgctggaactgtgtcaagagagcagagtgagattaaagagcgagaaaggagaaaaaaa

SEQ ID NO: 14997 - DNA, 1017 bp, Homo sapiens
  SIMILAR (219)..(43): 771254mologous to Homo sapiens mariner transposase,accession number U52077,Smith-Waterman Score=242.
atgctggctgcaggcgttgcagttttcggtgcatctcatcgattgcagagcatacttctcagatgtaatgggttcactgggattcagataactatagtggatctgactggcagcagaccaccaaacagtgaccatgagctttttttggtgcaagttaggctttgggaagtgttttggagcttcttctcagtccagccgctcccacctcatagttctccttcctctggatctgaacttgttaactctgccacaaaggagttgctgactcatttctgttctacccagcagttacctactgcaggcatcatggctgagcagagaagccgccaggccctggctctgccacttgctgggtgtattcagcacacagcaaccagagagagctttgtaaaatctaaaacaaagcaggggccagggctgctgacagtggttgatttggaactggctggaaaaattggagacattcttatgagagtcccgggtatgttagggcaaggagtgcatatgtgtgtgatggcccttggtgagagcctcgctgggtttgggccaggtgttgggggtgtggccggtggcacaaggagaggttggacccgggaggagagtaggcagccctgggacccgatgtgctggtgtcatgggaatcctggtgctatggaaggtgctggtgctgtggaaggtgctggtgtcattggaattctggtgctatggaaggtgctggtgctgtggaaggtgctggtgtcgtgggaatcctggtgctatggaaggtgctggtgctgtggaaggtgctggtgtcatggggatcctggtgctgtggaagggtgcttgtatcatggtgatcctggtgctatggaggcagctggtgccaaggagagtgctggtgctctaaaggttactggtgctctgaaggttgttggtgctatggaagatgctggtgctgaggagggtactgaggctctggaaggtgcttatgcacctagctatgctgccaggcctggttgtttccaggttcgtctgtga

SEQ ID NO: 14998 - DNA, 1044 bp, Homo sapiens
  SIMILAR (808)..(2061): 901254mologous to Homo sapiens DNA replication factor,accession number AF321125,Smith-Waterman Score=1918.
atgagtcgcatgggactgttagggtttggagaaaggaaagaactgccaaatcaccctgctgtcagtgagtggcctctaactctggtcacagggtgctcgagtggcacagtggcagaaggggagggaaatctcaccacctcaggccttttcagcattgtgcctcttcatcctgacggggtggcggccgggcagaggcactcctcacttcccagatggggcagccaggcagaggcgctcctcacatcccagacggtggacggtcaggcagagatgctcctcacaccccagacgatgggcggtcaggaagagatgctcctcacatcccagacaacgggcgaagactttattactcgtagcacagaaagcggcacgcactccaagtcccataaaggagatgaaggagagcctcgttggatgctgggatggatgctttgggtttgtgacatagctgagcccctagtgaaggccaagttgctggattgcaagcacacctgctgttcagtttgcctccagcagacgaggaccagccagaaggatgtgcgatgcccctggtgcagcggtgtcaccaagctgccccctgacttctccgtgtcgcagctcctcgacgaccccgaggtcctggctgtcatcaccattccacacgcttcggagcacatgccggtcttcatcagacttcccggcagtgggtgctacatgctgcccctgcccatctccaaggagcacgcgctgctgcccggagatatgagccgccacctgctgcccaggaaccggcagaagtccgtcactgtggtgaccatccctgctggacagcagcctctgcaaggcagggctccccagggggtggcggaggaggagcaggacaggcggggcatggtgaaaagctccatgtggttgagggtgtgcactgtcatcttggtggcttgcgtcttggtcttcctcctcagcatcgtgctccataacatgtcctgcatttctaagcgcttgactgtgacatcttgtggctggagagggctgcagggaagtctcttgtgggtgccaacttag

SEQ ID NO: 14999 - DNA, 757 bp, Homo sapiens
  SIMILAR (325)..(675): 951254mologous to Homo sapiens Ris,accession number AF233588,Smith-Waterman Score=573.
cccagcggttggaaaacctcggggcccaaattgaagggtagtgaaaagcaggtgtgggacagtgaagaacccatctttctccctctactcacggaatttctgtctattaaggtgacagaactgaagggcctggccaaccatgtggttgtgggcagtgtctcctgtgagaccaaggacctgtttgccgccctgccccaggttgtggctgtggatatcaatgaccttggtaccatcaagctcagcctggaagtcacatggagccccttcgacaaggatgaccagccctcagctgcttcttctgtcaacaaggcctccacagtccccaagcgcttctccacctatagccagagcccaccggacacaccctcacttcgggaacaggctttcttattaacatgctgcgacggcaggagggagctgggagaatggggacagcatggtccctgttcatctggatttttcagacggattcttccagcccacagctctcaggcactgcccgccactcaccagcccctaggcccctggtgcagcagcccgagccccttcccatccaagttgccttccgcaggcctgagacccccagctctgggcccttggatgaggagggggccgtggccccagtcctggcaaatgggcatgcaccctacagtcggactctgagccacatcagtgaggctagtgtagatgctgccttggctgaggcttcagtggaggccgttggcccagaaagcctagcctggggacctagacgaaa

SEQ ID NO: 15000 - DNA, 530 bp, Homo sapiens
  SIMILAR (335)..(484): 621254mologous to Homo sapiens Similar to chromosome 6 open reading frame 32,accession number BC000930,Smith-Waterman Score= 147.
  misc_feature (1)...(530): n = a,t,c or g
gagcggccgcagcgccgctctgctcagcgcccgggtcaataggagccagtccttcgcaggcgtcctcggcagccacgagcgggggcccaggagtttcccggtcttcagcccgccggggcccccacggaagccccccgcgctctcccgagtgtccaggatgttttccgtggctcacccagccgccaaggtgccgcagcccgagcggctggaccttggtgtacacggcgctgaagcgggggcctgacggcctactgggggnagtgcaccagcaggagcaagagaaactccaggggcagataagggagtccaagaggaattcccgcttggtgagtggcgggagggcttcctgtatgatctggacaagcaagtcaagtccattgaacgcttcctgcgacgactggagttccatgccagcaagatcgatgagctgtatgagggcatactgtgtccagncggcgtctccggggatggtgccttacacatgggtccgtgcctacaccactgggtccccgggaagccgagacgccggg

SEQ ID NO: 15001 - DNA, 1370 bp, Homo sapiens
  SIMILAR (421)..(1500): 811254mologous to multiple sclerosis associated retrovirus polyprotein,accession number AF009668,Smith-Waterman Score=1517.
atggagggtccccgcgcgaccccccttcctgccgcgtcgtcgatggcgagagcccggcacctctggcaggaacgtgggtggaccgatgctgagtgcctacgtctgacgtaccgagtgcacgagctctgctctgccgggaagccccgcgcggactcactctatgatgtccctgtcggtgcggccgcaggccgtctgctcagcgcccgggtcaataggagccagtccttcgcaggcgtcctcggcagccacgagcgggggcccagggtttcccggtcttcagcccgccggggcccccacggaagccccccgcgctctcccgagtgtccaggatgttttccgtggctcacccagccgccaaggtgccgcagcccgagcggctggacctggtgtacacggcgctgaagcggggcctgcggcctacttggaagtgcaccagcaggagcaagaaaactccaggggcagataagggagtccaagaggaattcccgcttggtgatggcgggaggagtgctgtggactgtggtgtgagaaaggggagctgtgacgagtctgagtgcctctgctggagtcctcctcatccctcctaaatatttgccccttctccccacccctgcagggcttcctgtatgatctggacaagcaagtcaagtccattgaacgcttcctggacgactggagttccatgccagcaaggtacgagtgcagcatgtgtgcaggtgggatcgatgagctgtatgaggcatactgtgtccagcggcgtctccgggatggtgcctacaacatggtccgtgcctacaccactgggtccccgggaagccgagaggcccgggacagcctggcagaggccactcgggggcatcgcgagtacacggaggtgagggatgggggcccatgaggcagaggcacaggagcatgtgtctgctggagagcgactggaggcacagctgggcgagtttcatctccgaatgaaaggttgtgctgtggatatcaatgaccttggtaccatcaagctcagcctggaagtcactggagctgcttcttctgtcaacaaggcctccacagtcaccaagcgctctccacctatagccagagcccaccggacacaccctcacttcgggaacagctttctatccacgaggaaaccaaacacctacacagccaaccaccgcagacggcccatcgagcagcacccagacatgagaacaccgccaccaccacaccgcgcccggaccaacacgggaagaaaggacaaggtcagagcacacgagggcgaaaaggcaacacccacaaggacaaggggagccccccacggaaaggcccagcgcctgcggccgctgtaccagtacgtcactattgcaaccctgagctga

SEQ ID NO: 15002 - DNA, 941 bp, Homo sapiens
  SIMILAR (128)..(916): 281254mologous to Xenopus laevis APEG precursor protein,accession number X51394,Smith-Waterman Score=150.
atgagttataactctaagaactatgttgaaactataactacaatgaactccgtcaagttcggagagacaacccctagaaatcgaacgcattatcttagtactaatgagaagaaaatatttctctccggggtgttttccaacgcctaccctgctggactcagcagaggctgggacagcccttggggttctaccccatgggtcaggcacttctgctacctgtcctcaacccagctctgtgaccaaaactgttctctcctctcctccttgctgcctgccggcccctctgtctgcaaccgcctgctggcctctgcatggcagaagtcctccagctctgcatcttccgaggcctcggaaacctgccagtccgttagcgagtgcagctcccccacctcggactggtccaaggtcggctcccatgagcagccctcaggcgccactctgcagcggaggaaggaccgagtggagctcctgcgagacacagagcccaggccctgccagtgggggcaccctgggccccagcggggaagaggcaccgcgaccccggatgtcccctgccaccatcgcagccaagcacggtgaggaggtgtcccccgccgccagtgacctggccatggtgctgacagcggggcatgagcctgtagcaccagaagagcagccgggactcgctgcagtactccagcggctacagcacgcagaccaccacgccctcctgctctgaggacaccatcccctcccaaggcaggcccgcggggctgggcccaaccaaaccagtgtccatagaaagcacatatttgcaaagtccacagaggctgaagcaagagtgggccaccgaggggaaaatccagaagctgcccccgcaaatccaggtggtcaacttccaggtggactcatccccttctctgcccctgatcatggtccctgaacacatgcatgtgtcatag

SEQ ID NO: 15003 - DNA, 777 bp, Homo sapiens; identical to SEQ ID NO: 13980
  SIMILAR (1057)..(1593): 861254mologous to Rattus norvegicus fatty acid amide hydrolase,accession number U72497,Smith-Waterman Score=830.

SEQ ID NO: 15004 - DNA, 336 bp, Homo sapiens
  SIMILAR (11)..(118): 691254mologous to Homo sapiens PRO1094,accession number AF116623,Smith-Waterman Score=92.
tcatggcaactttttggcacaatgaaaaatatcgcccatgatcaacgtgttctgttctgagtccagcccctctggggaaagaaggggtgcatgaactccccctagtccacagtcgcctccctgtggcccaaagccctcttcacactccatcttgtagccccagcaggaactattttcttcttttccaaggtttgtgtgcagaacatcctgcccttgctgccccagcagcttcagttggcacctgccccagtccagcctctgggacccatgcagcagctcccagcggcccttggaggggaagatgtgtacatagtgggcctggagggcggctgtggc

SEQ ID NO: 15005 - DNA, 429 bp, Homo sapiens
  SIMILAR (642)..(4): 951254mologous to unidentified cloning vector chloramphenicol acetyltransferase,accession number U13846,Smith-Waterman Score= 1103.
ggtctgcctgattcatcaggtttctcatggggcctggaccacctcatgatcacaaaagtgaccgcacagcttcaatgcctctcctgtgtgggctggacacacgttcatctgactcacaaactttccctgggtggcacctggagccctggctctgggctggaacctgagtgtgaagccactggaggctgtgggattgcaggtcaggtggcgtgctgcctcgacactgccaccaagagggccaggcagtgtctccagctgccagcaggcggcgtacgacgactacactgtttgtgtgcagaacatcctgcccatgctgacccagcagcttcagttggcacctgccccagtccagcctctgggaaccatgcagcagctcccagcggccctgcacccaccaccagcatccgtttcacctgcagttgaagatcc

SEQ ID NO: 15006 - DNA, 3465 bp, Homo sapiens
  SIMILAR (1120)..(1608): 1001254mologous to Cloning vector pSacBII SacB,accession number U09128,Smith-Waterman Score=868.
tcactcaggtctcctgctcaggacgcccttgccgagggcggagggggatttgtgctgaaggagggctccggcagcagcgcagcaactcgggggacgctccttctccttgtcagtcacggccccttgtgtccccagatgcttctggggcgactggggtgtgtgagccctgctgccagggccccgctggggctgctccaggagctgtccgtggtgctgacgcggcggccgatcgggcgcgggatgcggcgcggctgctgagcgctgtccctggtcctggagaggttcctgggccctggcggcggcggcaggagcggtggccggagcggccggcagcggggccgatgacggggggacgagcccgggcggaggctgggcttgcagcagctgctggtgctcccacaggctgcggttctcagtgctcagctcgtccagccgccgctccagctcgtcgatacgctctcgctgggtgtggatgaggctctgctgcttctgcacgatggccgtgagctccttgaggcagagcacggcgcgcaccggattctccagcaggctctccatgccgcccgccgccgcctgcgccctgcctgcgcctccctgcctcttggcgtcagcgaaggctctgctgcgtgccctgtgaacatgaagccgcctgttgttccagtagagggatgtgggtggaggccaactgctgctcaggtctgagttggtggcagtgccctgtgtgagctttggggacccttgttcccaccacagagtgtccatggagcagcatgacttctggaagggcgtctttatggaacacctccacgtttccgtggagagatttcctgtagcccgtggccccggcatccacgtttccgtggagacttttcctgtagcctgtggccccggcatccacgtttccgtggagagtttcctgtagcacgtggctccggcatccacgtttccgtggagacttttcctgtagcccgtggccccggcatccatgtttccgtggagagttttcctgtagcacgtggctccggcatccacgtttccgtggagagttttcctgtagcctgtggccccggcatccacgtttccgtggagagatttcctgtagcccgtggccccggcatccacgtttccgtggagacttttcctgtagcccgtggccccggcatccatgtttccgtggagagttttcctgtggcacgtggccccggcatccacgtttccgtggagagttttcctgtagcccatggccccggcatccacgtttccgtggagacttttcctgtagcccgtggccccggcatccacgtttccatggagacttttcctgtagcctgtggccccggcatccatgtttccgtggagagttttcctgtagcacgtggctccggcatccacgtttccgtggagagttttcctgtagcctgtggccccggcatccacgtttccgtggagagttttcctgtggcacgtggccccggcatccacgtttctgtggagagttttcctgtggcacgtggccccggcatccacgtttccgtggagacttttcctgtagcctgtggccccggcatccacgtttccgtggagagttttcctgtggcacgtggccctggcatgttgtttgggtgcatggggacttaatgtgctgctagagatgctgattgagcagagccttactgggcttctagtagtgatagccgtttgctgccaagacatttcggaatcttccaatatgcttttcctccctataccccacatccctgtcacagagttgagaattggattacctttactgtagtaactcttccgcacagtgtccaggggctttgctgccttccctggctctcccaggcccagctggctctgctcggcaggcgggcagcccggctcgcagactgtgcgcacctgttcagccttcagggcgatggcctgctccaggaggcccaggtttccccgggtcatcatgtcctgcatctccgactcgtcagtgactgttgacttccgggagtgggtgtcctcgtccttgtcatcatccgagcggacctccacaataacagagtactcaggcttgggactgggtgattctgggccccggagctcacgggccttctgggcagaggtgtgagaggtgtcttccttctcggccatctggtcctcagacccattcaggggtgggttcagaaccacgtgctgtgcgtggtcctggtgtctcgttcgtctgaagtcgtttttagcactcctcgcctttcgtgaccttgtgttaactttgatggatatctctatagactcgttgtttcctgttttaccccatgggctgaaagccttctttggatgctcagattgtccctgattgaccagtggaagcccagtacagaggctcctgtagcctcggtccagctcccctgtcctttcttgttcttgcctttcctgcttggggcctggaactctggttcctgagtccagcccctctggggaaagaaggggtgcatgaactccccctagtccacaggcgcctccctgtggcccaaggccctcttcacactccatcttgtagccccagcaggagctattttccgaaaagtgaaaagctctgaaggtcccacaattcatggtatgtacaggggctcggaggagggaaactgcccagctttcccccggcacaggatgtttgtctttctttgtatcagtgctcagctgagtctgcagtgcttcagaggcagctttcattttataaaaatctatgatttctccttccagttgttttttctcttcctcgagcttccttatctcctcctgttgaatcattttaagatgctcgaatttgtcctgcagtcctgaagccccgaggatgtggacaaccaccatccggtgagcaaccacctcttgaggcctctctttaacgtctgccgggcaccctgaggttgcccccattctttgaacagctatggacggggacctgtcataggctgggctcaccttgggcgcttcagctgtctcggggcgatgaatctcgtcctgtcctgacgtctcagcctcggccccctccagagttccttccgattcatccgaaacagaggcgtccttcacctcagtgtcctcactgccgtcgctgtccacaccatagccctcgtccagagccagcttcagggggtgtgacttcctcttggacaccaggtgctcagcctcagcgccctccagcttcctcttcttggccagggggcagctctgtaaacttcggtgcctggagtacttgccccggacgtgccctgagcctgtgcatcctggggtggggcagctgaggtctgcagctgtggtctctgggggtcctcgcagggccttggatcgggtgcgagctcgcttgtcttcattttctaagctcatccctgatccccactggcagccatcacagtacccttggttccttgcagagatagttctgtcctcacattgggtgatgtcctgttgcat

SEQ ID NO: 15007 - DNA, 8526 bp, Homo sapiens
  SIMILAR (1406)..(2257): 511254mologous to Homo sapiens Nogo receptor,accession number AF283463,Smith-Waterman Score=662.
atgcccctgcctgctccctgccaggatctggggagatggctgtacctggcagccctagggtggacaaaaatgaagccaatgaagaaggcatgcactggcctttcaggtcctggcagtggcagcaagtcccccccagccaccagggccaaggctctgaggcggcgaggggctggggagggtgacaagccagaggaggaggatgacgaggcacagcagccgcaaccacagtccgggcccgaagaggctgaggaaggggaggaggaggaggctgagcggggccctggggctgaaggtcctccactggagctgcaccctggcgacccggctccaggcccagcagaggaccccaaaggggatggggaggcaggccgctgggagccctcactcagccgcaagacagccacgttcaagtctcgagcgcccaagaagaagtatgtggaggagcacggagctggcagcagtggggtggctggggcccctgaagagcgggtgcggacccctgaggaggccagtggcctgggggtgcctccacggccacccacctccactcgttcctcctccactgacacagccagcgagcactcggcggacctggaggatgagccggctgaggcttgtggtccaggcccttggccccctggcagcaccagtggcagctatgacctgcggcagctgcggtcccagcgggtgctggctcggcgtggtgatggccttttcctgccggctgtggtgcgccaggtgcgccgaagccaggacctgggcgtgcagttccctggtgaccgagccctgactttctatgagggggtgccaggcgctggtgtggatgtagttttggatgccacacccccaccaggtgccctggtggtgggcacagctgtctgtacctgtgtggagcccggcgtggctgcctaccgggaaggtgtggtggtggaggtggccaccaagccagctgcctacaaggtccgtctcagccctggccccagctcccagccaggcctaccaggcagcctcccgcagcccccacagccactgcaccgtgagccagaggaggctgtgtgggtggcccgctccagcctacgcctgctgcgccccccctgggaacctgagaccatgctgaggaagccccctacaggccctgaggaagagcaggcagagcctggggccaccctgccaccctgccctgctgccctggaccccaaacagcccgaggatgctgaggtctctaagatcagctttggtggcaacctgggtactcactgtgaggagggcgaggagaagcaccctccagccctgggtaccccagccctgctcccactgcccccaccccagctcctgtcaccaccacccaagtctccagcctttgtgggccccggccgccctggcgagcagccctcgccctgccaggaggggagccagggcggcagccgcagcagcagcgtggcctccctggaaaaggggacagcaccggcagcccgggcccgcacgccactgacagccgcccagcagaagtacaagaagggcgatgtggtctgcacacccagcggaatacgaaagaagttcaacggcaagcagtggcgccggctgtgctcacgagatggctgcatgaaggagtcacagcggcgaggctactgctcacgccacctgtccatgcgaaccaaagagatggaaggcctggcagacagtgggcctggcggggcgggccggcccgcggccgtggcagcccgtgagggcagcacggagtttgactggggtgatgagacgtcgagggacagtgaggccagcagtgtggcggctcgtggagactcacggccacgcctggtggcccctgctgacttgtcacgctttgagttcgacgagtgtgaggcggccgtgatgctggtgtcgctgggcagctcgcgctcaggcacgccctccttctcacccgtctccactcaatcgcccttctcgccagccccatcaccctcaccctcaccactcttcggcttccgccctgccaactttagccccatcaatgcctcaccagtcatccagcgcactgcagtccgcagtcgccacctgagcgccagcacccctaaggcaggcgtgctgacgccaccagacctgggcccccacccaccgccacctgccccccgagagcgccactcctctggaatcctacccaccttccagaccaacctgaccttcaccgtgcccatcagccctgggcgacggaagacagagctgttgccgcatccaggggccttgggggcccctggcgcagggggtggaggagccgccccagactttcccaagagtgacagcttagactctggtgtggactcagtgtcccacacacctacaccctccacgccggctggcttccgggccgtgtcccctgctgtgcccttctctcgctcccgccagccctcaccattgctgctgttgccaccccctgccggcctgacctcggatccagggccctctgtgcgcagggtgcctgctgtgcagcgggactcacctgttattgtccgcaaccctgatgtgccactgccctccaaattccctggggaggtgggcactgctggtgaggtgcgggctgggggacctgggcggggctgccgtgaaaccccagtgccccctggggtggccagtgggaagcctggcctgcccccacctctgccagcccccgtgcccatcaccgtgcctccagctgcaccaactgccgtggcccagccgatgcccgcctttggcctggcttcttcaccctttcagcctgtggccttccacccctcacctgctgccctgttgcccgttttggtgcccagcagctataccagccaccctgcccccaagaaggaagtcatcatgggccggcctggaacagatgggcagatggaggctctaacaggtccttcccaggaggtggcaggaccaggactggagccctcatctttaccactgtgtccagtaaacatcacaggcacggccatggaaggcagcgggggtgtgctgggcacttctccagcggcgacggccgaggagcgggctgcgggcggagcggcgtcggccgctgaggaggtgcgagcccctgccgggtcccccctgcgccggaccatgtattcggcccacaggcccctgatgcccgcgtccagcgcggcctcccgtggcctcggcatgttcgtgtggacgaatgtggaacctcgctctgtggctgtgttcccttggcactccttagtccccttcctggcacccagccagcctgacccctccgtgcagccgagcgaggcccagcaacctgccagccacccagtggcctccaaccagagcaaagaacctgctgagtcggcagctgttgctcatgaacggccaccaggtgggacagggagtgctgaccctgagcggccccctggagccacatgccctgagagcccaggacccggacccccacaccctttgggggtggtggaatctggtaagggtccgcctcccaccacggaggaggaggcctccggccccccaggagagccccggctggacagtgagacagagagtgaccatgatgatgccttcctctccatcatgtctcctgagatccagttgcctctaccgcccggaaaacgtcggacccagtccctcagtgccctacccaaggaacgggactcatcttctgagaaggatggacgcagccccaacaagcgggagaaggaccacatccggcggcccatgaatgccttcatgatcttcagcaagcggcaccgggccctggtccaccagcgtcatcccaaccaggacaaccggaccgtcagcaagatcctgggcgagtggtggtatgccctggggcccaaggagaagcagaagtaccacgacctggccttccaggtgaaggaggcccacttcaaggcccacccagattggaagtggtgcaacaaggaccgaaagaagtccagctcagaggccaagcccacgagcctggggctggcaggagggcacaaggagacgcgggagcggagcatgtcggagacgggcactgctgctgcccctggggtgtcctctgagctcctgtccgttgcagcccagacactcctgagctcagacaccaaggctccggggagcagctcctgtggggcagaacggctacacacagttgggggacctggctcagcccggccccgagctttctcccacagcggggtacacagcctggacggcggagaagtagacagtcaggcgctacaggaactgacgcagatggtgtctggccctgcatcgtactctggcccaaagccttctacccagtatggagctccaggaccctttgcagcccctggtgagggaggtgccttggcggccactgggcggcccccgctgctgcccacccgagcttctcgttctcagcgtgcggccagtgaggacatgacgagtgatgaggagcgcatggtcatctgtgaggaggaaggggatgatgatgtcattgctgacgatggcttcggcaccactgacattgatctcaagtgcaaggagcgggtgaccgacagcgagagtggggacagctctggggaggacccagagggcaacaagggctttggtcggaaggtgttttcacctgtgatccgttcctcctttacccactgccgccccccactggaccctgagcccccagggcccccggatcctcctgtagcctttggcaaaggctatggttccgccccatcctcctctgcgtcctcgcctgcttcctcctcagcctcggcagccacctccttctcactgggctcaggaaccttcaaggcccaggagtctggtcagggcagcacagcgggccccctacggcccccaccccctggggctgggggtccagcgacaccttccaaggcaacccggttcctcccaatggatcctgccaccttccggcgcaagagacccgaaagtgtgggtggcctggagccaccaggcccctcagtcatcgcggcccctcccagcggaggaggaaacatcctgcagacactggtgctgcccccaaacaaggaggagcaagagggcggcggagccagagtgccctccgcccccgccccatcactggcctatggggccccagcagctcccctgtcccgtcctgccgccaccatggtcaccaatgtggtgcggcctgtcagcagcactcctgtgcccatcgcctctaagcccttccccacctctggccgggctgaggcgtctccaaatgacacagcaggtgccaggactgaaatgggcactgggtctcgggtgcctgggggctccccgctgggtgtcagcttagtgtattcggacaagaagtcggcagcagccacctcaccagccccacacttggtggctggacccctgctgggcactgtggggaaggcgcctgccactgtcactaacctactggtgggcaccccggggtatggggcccctgcgccccctgctgtccagttcattgcccagggggcccctggtggtgggaccactgcgggctcaggagcaggtgctgggagtggccccaatgggccagtacccctgggcatcctgcaaccaggtgccctgggcaaggctgggggaatcacccaggtacagtacatcctgcccacgctgccccagcagcttcaggtggcacctgccccagcaccagcccctgggaccaaggcagcggctcccagcggccctgcacccaccaccagcatccgtttcaccctcccaccgggcacttccaccaacggcaaagtcctggctgccactgcacccactcctggcatccccatcctgcagtctgtaccctccgccccaccccccaaagcccagtcagtttctcccgtgcaggccccgcccccgggtggctcagcccagctgctgcctgggaaggtcctagtgcctctggccgcccctagcatgtcagtgcggggtggaggggccggccagccactgccactggtgagcccgcccttctcagtacctgtgcagaatggtgcccagccccccagcaagatcatccagctgaccccggtgcctgtgagcacacccagcggcctggtgccgcccctgagcccagccacactccctggacccacctctcagcctcagaaggtcctgttgccctcctccaccagaatcacctatgtgcagtcagcgggcgggcacgcgctgcccctgggtaccagccctgcgtccagccaggctggaacagtcacctcgtacgggcccacgagctctgtagctctaggcttcacctcgctggggcccagcggccccgccttcgtgcagcccctgctctcagcaggccaagccccactgctggctcccggtcaggtgggcgtgtcacctgtgcccagtccccagctgccgcctgcctgtgcagcccccggaggtcctgtcataacagcattttactctggcagccctgcacccacctcctcagcacccctggcccagccatcccaggcccccccaagcctggtctacactgtggccaccagcacaaccccacctgcagccaccattctgcccaagggcccgccagcccctgccactgccaccccagccccgactagccctttccccagcgccacagcaggttccatgacctacagcttagtggcccccaaggcccagcggcccagcccgaaggccccccagaaagtgaaggcagccatcgccagcattcccgtggggtcctttgaggcaggtgcctctgggcggcctggccctgcaccccggcagcctctggagcctggcccagtccgagagccaactgccccagagtctgagcttgaggggcagcccacaccaccagcccctccacccctgccagagacctggactcccacggcccggagcagccccccactgcccccacctgctgaggagcggaccagcgccaagggccctgagaccatggccagcaaattccccagctcatcttcagactggcgcgtccctgggcagggcctggagaatcgtggggagcctcccactcctcccagcccggccccagctccagctgtagcccctggtggcagcagcgagagcagcagtgggcgggcagccggggacaccccggagcgcaaggaggcggctggtactggcaagaaggtgaaggtgcggcccccgcccctgaagaagacctttgactctgtggacaacagggtcctgtcagaagtggacttcgaagagcgctttgctgagttgcctgagtttcggcctgaggaggtgctgccctcccccaccctgcagtctctggccacctcaccccgggccatcctgggctcttaccgcaagaagaggaagaactccacggacctggattcagcacccgaggaccccacctcgcccaagcgcaagatgagaagacgctccagctgcagctcggagcccaacacccccaagagtgccaagtgcgagggggacatcttcacctttgaccgtacaggtacagaagccgaggacgtgcttggggagctagagtatgacaaggtgccatactcctccctgcggcgcaccctggaccagcgccgggccctggtcatgcagctctttcaggaccatggcttcttcccgtcagcccaggccacagccgccttccaggcccgctatgcagacatctttccctccaaggtttgtctgcagttgaagatccgtgaggtgcgccagaagatcatgcaggctgccactcccacggagcagccccctggagctgaggctcctctccctgtaccgccccccactggcaccgctgctgcccctgcccccactcccagccccgcagggggccctgaccccacctcacccagctcggactctggcacggcccaggctgccccgccactgcctccacccccagagtcggggcctggacagcctggctgggagggggctccccagccctcccccccacccccaggtccctccacagctgccacaggcaggtgagggacccctgagaagatgccaggacttatagtaccccctcaggacatggacagtatgtgggggcaggaaggttatctcctcccgggtaaagccatttcgtcctctccagtttggggcggaatgaggcctgctcctcttgtaaatacccccttccctcgaagctccctcccggtgctggggggcagctgaggggctgcaggggcagtctccctcctccaagcccctgtacataacctggagcgtgtgaccttcagagcttttcactttatgcaaaatggctcctgtgagggctgcaagctggagggtggtgcaggccttgggccacagggaggcgcctgtggaatagggggagttcatgcaccccttttttccccagaggggctggactcaggttagtttgggggtgggggctcctgcactttgccacaggcacggggagggttttctcctcaccccctctgccctcccaacttgggttgtactttctaagaaggtgattccccctgcccttgcccccttccccagaacaaaacatgttgatcatgtgcaatatttcttactgtgccgagaagccgcaatgagcgagattaaagctgtttaacacac

SEQ ID NO: 15008 - DNA, 1658 bp, Homo sapiens
  SIMILAR (946)..(2808): 951254mologous to Homo sapiens zinc finger protein ZFP- 95,accession number AF170025,Smith-Waterman Score=3218.
gcctgcgttcagtgaggcctcccgtggcgtcagcatgttcgtgtggaggaatgtggaaggtcactctgcggccgtgttctcctggtactccatccccttcctgacccctccctgcagccacacgaggcccagcaacctgccagtcactcagtggcctccaaccagagaaaacaacctgccaagttggcagccgttgctcatgagcgtccaccaggcccagtccctcagtgccctgcgcaaggaacaggactcatcttctgagaaggatggacgcagccccaacaaatcagacaaggaccacatccggtggcccatgagtggcgctcatgatcttcagcaggcggcaccaggccctggcggggcgcaccagggtcatcccaaccaggataaccggaccgtcagccagatgctgagcgagcggtggtacaccctggggcccaatgagatgcagaaatacaacctggccttccaggtgaaggtggcccacttgcaacaaggaccgaaagaagtccagctcagaggccaagcccacaagccaggggctagcaggagtgtaacaagggctcgtgggagcggagcatatcagagacgggcactgccactgcccctggggtgtcctctgaactcctgtcagttgcagcccaaacactccagagctcggataccaaggagcagcttctgtggggcagaacggctgcacacagtccagggaacctggctcagcctggcccaagccttctcccacagcggggtacacagcctggacggcagggaaatagaccgtcaggcactacgggaactgacacaggtggtgtctggcactgcatcatactctggcccaaagccttctactcagcatggagctccaggccactttgcagcccctggtgagggaggtgacccgtgggcagccctgctgccgcccacgagccttcaaagcccaggagtctggtcaacgcagcagagcgggccccctacggccccaacccctggggatgggggcccagggacgccttccaaggtggcctgtttcctcccaatggatcctgccaccttctggtgcaagagacctgaaagtgtgggcgacctggagctaccaggctcctcagtcatcagggtggagaagccgaggacaggctcagggaaccggagaccgagaaggcgctgtcctcttcactgcacgtacactggaccagtgccggccctgatcatgcagctcttccaggcccactgcttcttcctgtccactaggccacagccgccctccaggcccactatgcacacatcttcccctccaagagcttttcacttttcggaaaatagctcctgctggggctacaaagatggagtgtgaagagagccttgggccacagggaggtgcctgtggactagggggagttcatgcaccccttctttccccagaggggctggactcaggtgagtatgggggtgggggctcctacacttcgacacaggcagcgggagggttttctccccattccctctgcactcccaacttgagctatactttttaagaaagtgattcaccctgcctttgcccccttccccagaacagaacacgttgatcatgggcgatatttttcactgtgccaaaaagttgccatgaccgtcattaaacctgtttaacaccaaataat

SEQ ID NO: 15009 - DNA, 1170 bp, Homo sapiens
  SIMILAR (387)..(836): 981254mologous to Homo sapiens similar to (NP_034322.1|) sex- determination protein homolog Fem1a,accession number AL365415,Smith -Waterman Score=766.
ctggttcctttaagcgccccaagcgaagcagggcggcccggccggcggtggggacatcggtttccctttgaaggggacggccaaagcccgagtgaccagcggcggcggggaggactagtccccggccagtttggtgccctggttgtcagatgttggaaagcagtaggacggaacatactcttcgtggttgtgtatccgttctggggtgcagcaattaacattggactttggttcctgtgactcttgcctgtgtcgatagagttaaactggagctctgctttgaaagataaataaagcacagcctctcacctggacataaatggatctaaagacagcagtatttaacccagctcgggatggcaaactccggcttctcacaaaataaaatggcaagcaaatccaaagaggaggtttcctccttgatctctgaaaaaacaaatggggccacgccactcttgatggccgccaggtatgggcaccttgacatggtggaattcctcctagagcaatgcagtgcctccatagaagttgggggctccgtcaattttgatggcgaaaccattgagggggctccccctttatgggccgcttctgcagcaggacatctgaaggtggtccagtccttgttaaatcatggagcatctgtcaacaacacgactttaaccaattcaactcctcttcgagctgcgtgtttcgatggccatttggaaatagtgaagtaccttgtagaacacaaagctgatttggaagtgtcaaaccgacatgggcatacgtgcttgatgatttcatgttacaaaggacataaagagattgctcagtatttacttgaaacagggggcagatgttaatagaaaaagtgtcaaaggtaatactgcattgcatgattgtgcagaatctggaagtttggacatcatgaagatgcttcttatgtattgtgccaagatggaaaaggatggttatggaatgactccccttctctcagcaagtgtgactggtcacacaaatattgtggattttctgacacaccatgcacagaccagcaagacagaacgtattaatgctctagagcttctgggagctacattgtttacccaaaaagagatctcctgcgatgaatctgggaggaccagagacctgagccctaggagaaagccaccccacaccacatga

SEQ ID NO: 15010 - DNA, 623 bp, Homo sapiens
  SIMILAR (45)..(149): 451254mologous to Mus musculus SPR2F protein,accession number AJ005564,Smith-Waterman Score=58.
aatacatccctggtctggcttcaccactccactccacagcacccccatgctcaccagctccaagtggcatcccactgaagggtcactgtgtcccctccagagggccaggaagcatggcgtgcccctctgtgccccctcagtgcccccagtgagaagcctggcacagagaaggcacccagggagtgaaaattgaaaacacaaaagaacaacataggcccccaggcatgtaattcccagctggcgtccgtctccactcgctcacccccacccacgctgagtgtgcccattattatgactgatgacagccaggcctcccagctccttctggctgctgtgaccatcaggaagctgtggagtaggatggctcccatgctggccctgcccacaggacagtctggtcagacgggtgcagagggacagggaaaggagggggaacgtggacagagcccctgctggaagcctcgcctagaccccaagctgtgtggcctcggcagcccgcgcagcttctctgagcggacgtctgcactggtccctgggggtgcgaggctgccctgcagactgtcgcctaccctgcctcagcccatcctctgcacagcagcccaaggaagcctcccgcagcgcac

SEQ ID NO: 15011 - DNA, 1041 bp, Homo sapiens
  SIMILAR (631)..(933): 811254mologous to Mus musculus allantoicase,accession number AF278712,Smith-Waterman Score=437.
atggaatgggaggattgccgagcagggttgagagccctgctggactgcacgctgaagatttgtagtggaaccagcctgcagttgcatgtgttctcgggcactcagcagctggggatgagagaggagaaggcagatgggcagttggtccatgagtggacggcgatgccaaaagacttttcccgcctccaggccaacgtggactccaaaggaaaagaaccttgtaaatatgatggcataccccctaaaacacaggattctgtttattatgccaaagaagaaaagaagaaaacattggcagaacctttagtccaaaggggtgcagaaggtgacgtgtataaagcaccgactcctagcaaggaaacccaaggggcgctggacgtcaaagaggagcacaatgtgcagctggaggtgcctgtggaccagttatattcatatagttccccgaaaacctgcaaagataaggaagttgaaggaaatggtggaattgcacgacttagagtattcggtactggacaaaaagactggactgcaactgaccccaaagaacctgcagacctagtggccatcgcttttgggggtgtctgtgtaggatttagtaatgctaagtttgggcacccaaacaatataataggcaatgctcctgacagctgtaaagtggatgggtgcatcctgacaactcaggaagaagaagccgtgatcaggcaaaagtggattctcccggcccacaagtggaaaccactgcttccagtgaccaagttgtctcccaaccaaagtcatctgttcgatagcctgaccctagagctccaagatgtcatcactcacgccaggctcaccatcgtccccgacgggggagtgagccgccttcggctccggggcttccccagctccatctgcctcctgaggccccgggagaagcccatgttgaagttctcggggatgcgggagagaagggagacaaaggcgcccccggacggcctggaagagtcggccccacgggagaaaaaggtacctgcagccctgggccggccctcagagctctga

SEQ ID NO: 15012 - DNA, 1373 bp, Homo sapiens
  SIMILAR (673)..(1299): 751254mologous to Homo sapiens Human carbohydrate-associated protein CRBAP-6,accession number Y79510,Smith-Waterman Score=809.
atgaaggccagagtaaacaaatttggccacattaagcacctggtcaccaaggctgcttttagctctggcaaagtggatattgtcatcatcaatgatgccttcattgacctcaactacctggcctacatgttccactttgatgctggggctggcatttccctcaatgactactttgtcaagcttattccctggtatgacaatgaatttggcaacagggtagtggaggcctcatggtccacatggcctccaaagagtaagagcccctggaccaccagccccagcaagagcacaagaagattagagaggtctccacaggccgtggtcaagctcttgctgacttttgaagcgaaatcccatatgaacaaaggaaaggagatcagtcagctgccctcgtttctgtctgattggtgccagtgcagtacctggtctcacaacctgacgattgttcctgagcctgagcagcgtctgacgggccaggcggacagcagccacgactgcccccagggaccagtggctctgtgttgggctcaggaacggggatcagagaggtgggggaaaggcttctgcgtgcccagagacctttacgaagctgtagcttgcacagatcacttgcatgtggacccaagcctggcagcgaacaaggaaggagttggtgtcctgcctgcgctcaggatgagggggaatctggccctggtgggcgttctaatcagcctggccttcctgtcactgctgccatctggacatcctcagccggctggcgatgacgcctgctctgtgcagatcctcgtccctggcctcaaaggggatgcgggagagaagggagacaaaggcgcccccggacggcctggaagagtcggccccacgggagaaaaaggtgagaaaggagattccggtgacataggaccccctggtcctaatggagaaccaggcctcccatgtgagtgcagccagctgcgcaaggccatcggggagatggacaaccaggtctctcagctgaccagcgagctcaagttcatcaagaatgctgtcgccggtgtgcgcgagacggagagcaagatctacctgctggtgaaggaggagaaaccctacgcggaccccccactgtcctggcaaggccgggggggcacgctgagcatggcccaggacgaggctgtccatggcctgaagggcgcatacctggggcaagcccgcctgggccgtgggtttattggaattcaccgaccctggaaaaggagggccccccttttgttattttgaacactttcccctttgcggtctttttaaaagggggacggaggggggaacacccaaaaaggctcaagaaaaaagagggaactggcggggcaaatttgggggccttgcatccgccgcct

SEQ ID NO: 15013 - DNA, 420 bp, Homo sapiens
  SIMILAR (307)..(56): 941254mologous to Homo sapiens similar to ribosomal protein L23a; similar to P29316 (PID:g132848),accession number AC004908,Smith-Waterman Score=402.
agtgaacacaagcgtgttgttttctctatcttcttcacggccgactcagtggtcagcggaactttgatgatagcatagtggcgacgcttgtttctcctgggggtgctcttccgaggatatctgggctgcctccggagtcgcagtgtcttgggccgcctgaaggtgagtgacatgcggatcttcttttttgcgtgtggctgcggacacctttcaacactgccttcttggcctttaaggccttcgctttggcttcggctttaggaggagcaggagcttccttcgctttcggtgccgtcttcgggtcgcagtgcgagccgtctgctttagctgggctggcggggcttcggcccttccccatcgccccgcctcacagtgcagttttccggaggacgccgagcccagggtccatctcggacgaaa

SEQ ID NO: 15014 - DNA, 284 bp, Homo sapiens
  SIMILAR (82)..(282): 421254mologous to rat cytomegalovirus Maastricht pr95.1,accession number AF232689,Smith-Waterman Score=80.
gcgcgccacagcttgagcagcatcggggccagcggcccaagaacgcagcgtgcaagaatccagcgttaatgcgcagggtgatcccggagggcggctacacactctggctggtgttcaccatgaataagctctggctggtgttcaccatgaataagcccaggttcctctccggcgacttcaagctgaaggccctgctggggtacccctcggagaacccgtgtttcctcaagggctccttcaagcccaacctgcccttggtgtggtgctcgcacaagaaagcctgg

SEQ ID NO: 15015 - DNA, 373 bp, Homo sapiens
  SIMILAR (37)..(111): 801254mologous to Homo sapiens Human signal peptide containing protein HSPP-108 SEQ ID NO:108,accession number Y87331,Smith-Waterman Score=115.
  misc_feature (1)...(373): n = a,t,c or g
ttaaataaaacaaattttggcccccccccttcacgttgggggnnnnnnnnnnnnnnnnnnnnncccccccaggggggcggggatgctttcccaaaagggcccccccctttaaaaaaagtttttttgggggcannnnnnnnnnnttttaagaaaaaagggggggcccccccccggaaaagggtcttggtttcccccggcnnnnnnnnnnnnnnnnnnnnnnnnnnnnnnnnnnnnnnnnnnnnnnnnnnnnnnnnnntacccaggctttcttgtgcgagcaccacaccaagggcaggttgggcttgaaggagcccttgaggaaacacgggttctccgaggggtaccccagcacggccttcagcttgaagtcgcc

SEQ ID NO: 15016 - DNA, 454 bp, Homo sapiens
  SIMILAR (304)..(119): 691254mologous to Homo sapiens Human IL-9 receptor protein,accession number W64055,Smith-Waterman Score=215.
tcttcttttttgcgtgtggctgcggacacctttcaacactgccttcttggcctttaaagccttcgctttggcttcggctttaggaggagcaggagcttccttcgctttcggtgccgtcttgtctctggggaccctgcccgcgcgcaggctggctccactcgctccactggcctgtgtcacactctttctctgccacgtcaacctttggcatggccatctggacatgaagcctggcctcagggataaagccacagtccagctcaaaggtttcaagtaggatccaggtccccccgacaatgtgatccgctgtgttgggcccgaagcggttagcagtgaaagccgtctgcttaagctgggcgggaggggattcggactttccccatcgccccgcctcacagtgcagttttccggaggacgccgagcccagggtccatctcgaccgcgactcgtgccg

SEQ ID NO: 15017 - DNA, 687 bp, Homo sapiens
  SIMILAR (624)..(553): 411254mologous to Homo sapiens Human secreted protein encoded by gene 61 clone HHGCO88,accession number W67867,Smith-Waterman Score=57.
  misc_feature (1)...(687): n = a,t,c or g
caggtgaagctcgaggcgctgtggcgctttgaagccggagagaagctcagtagaatcgggaaggcgctggggctgtccaactccaccttggccaccattcgtgacaacaaggaaaagatctgggcgagttcccaggaggccacactgcaggcggccaccaagttgacgcgtggccgcagcctggtgttcaccatgaataagctctggctggtgttcaccatgaataagcccaggttcctctgtaagcgcctgccgagaggacgttcattttcctgtggaagatgagtcggcccctgggtcaaagccgccggagacctcctgaccctattgctcggtggcaacgcagccggcgacttcaagctgaaggccctgctggggtacccctcggagaacccgtgtttcctcaagggctccttcaagcccaacctgcccttggtgtggtgctcgcacaagaaagcctgggtannnnnnnnnnnnnnnnnnnnnnnnnnnnnnnnnnnnnnnnnnnnnnnnnnnnnnnnnnccccggggaaaccagagcccttttccagggggggtccccgccttttggtttaaagggggggggctcttcccccaaaaaaatttttttaaaggggggctccccttttgggaaaattttccgggccccccgggggtttaaaaaaaaatgtggtttttcccccaacg

SEQ ID NO: 15018 - DNA, 1355 bp, Homo sapiens
  SIMILAR (811)..(1452): 941254mologous to Homo sapiens putative p150,accession number U93565,Smith-Waterman Score=1050.
tgcattcgttcgccactcttggcatgagggagatggaccctgggctcggcgtcctccggaaaactgcactgtgaggcggggcgatggggaagggccgaagtccccgccagcccagctaaagcagacggctcgcactgcgacccgaagcgcgagtcatggctggggccttagtggcaacaagtgctgagatcagcgggctcagtagcaggaacacaagcacccccttgcggtgtctggaggaagcggcgcgggacagtctcccgctccaccgtgtcgggcctgaagaggcggcttgaacgctcgcgattactgaggcatctggtaggatcgcaaggccatcaacctacaggtgaagctcgaaggcgctgtggctctctgaaagccggagagaagctcagttagaattcgggaaggcgctggggctgttccaactccaccttgggccaccatttcgtgaacaacaaggaaaagatcttgggcgatttcccaggaggccacactgcaggcggccaccaagttgacgcgtggccgcagcctggtgatggagaacatggagcagctgctgagcatgcggatggaggaccagagccagcgcaacatgcccctcagtgtggtgctcattcgggagaaagcccacagcccgttcgagaaccgcaagcaggagcagggcgagggcgcctcacccgagaactttcgggcccgtccaaggttgattccttgcttttaaggcggcgccaccagcttgagcagcatcggggccagcggcccaagaacgcagcgtgcaagaacccagcgttaatgcgccagggtgaatcccggagggcggcttacacactctggctggtgttcaccatgaataagctctggcctggtgttcaccattgaataagcccaggttcctctgtaagcgcctgccgagaggacgtttcattttcctgtggaagatgagtcggcccctgggtcaaagccgtccggagacctcctgaccctattgctcggtggcaacgcagccggcgattttaagttgaaggccctgcctggtgtacccctcggagaacccgtgtttcctcaagggctccttcaagcccaacctgcccttggtgtggtgctcgcacaagaaagcctgggtacagcctgggtgacagagcgagactccgtttcaaaaaaaaaaaaaaaaaaaaaaaaaagcctgggtaaccatgagcctcttccaggagtggttcctgcacttttgctctacagtggagggcgctgcacccagtacgaccttccctacaaggggctgcccatcctggacagcactcccggccaccctgggtgttgagacagagcgagactccgtctcaaaaaaaaaa

SEQ ID NO: 15019 - DNA, 375 bp, Homo sapiens
  SIMILAR (18)..(320): 931254mologous to Homo sapiens Human secreted protein, SEQ ID NO: 5352,accession number G01271,Smith-Waterman Score=454.
cccacgcgtccgcccacgcgtccgggctgcagcagagctaccaagcagtcaaagagaagtcctctgaagccttggagtttatgaagcgggacctgacggagtttacccaggtggtgcagcatgacacggcctgtaccatcgcagccacggccagcgtggtcaaggagaagctggctacggaaggctcctcaggagcaacagagaagatgaagaaagggttatctgacttcctaggggtgatctcagacacctttgccccttcgccagacaaaaccatcgactgcgatgtcatcaccctatgatggcaccaaggctcgcctctatagcctgcagtcggacccagcaacctactgtaatgaaccagatgggcccccg

SEQ ID NO: 15020 - DNA, 436 bp, Homo sapiens
  SIMILAR (376)..(663): 661254mologous to Homo sapiens mariner transposase,accession number U52077,Smith-Waterman Score=312.
tcgggtgaatcactttaatgctgttaacggcaagtctgtaaaaggttcaggacaaagttcttttttctttcttttttaattataaaactaacagctgttagaatctttttttctttttttccttttttcttttcccagctacaaaatactctggggagatgcattataatttaaaatatataatattgcacaaacaaccaaaaggttaattaaactaaagaaataattacaaagagaaaaaccccatcccgtcaaaaaaaagattcagcattctctccatcccaccccctcactgaaggtttgaagtggaagtgacctcactctctcggtgtccctgacccacgatggttttgtctggcgaaggggcaaaggtgtctgagatcacccctaggaagtcagataaccctttcttcatcttctctgttgctcctgagga

SEQ ID NO: 15021 - DNA, 959 bp, Homo sapiens
  SIMILAR (198)..(338): 791254mologous to Homo sapiens hematopoietic cell derived zinc finger protein,accession number AF054180,Smith-Waterman Score= 186.
tttcgtgggaggacgtgggatggtggcggagctggctgcagcagagctaccaagcagtcaaagagaagtcctctgaagccttggagtttatgaagcgggacctgacggagtttacccaggtggtgcagcatgacacggcctgtaccatcgcagccacggccagcgtggtcaaggagaagctggctattgcagcctgttcccggggcgcttgcttcctctgcccgttctctatacagacggaaggctcctcaggagcaacagagaagatgaagaaagggttatctgacttcctaggggtgatctcagacacctttgccccttcgccagacaaaaccatcgactgcgatgtcatcaccctgatgggcacaccgtctggcccagctgaaccctatgatggcaccaaggctcgcctctatagcctgcagtcggacccagcaacctactgtaatgaaccagatgggcccccggaattgtttgacgcctggctttcccagttctgcttggaggagaagaagggggagatctcagagctccttgtaggcagcccctccatccgggccctctacaccaagatggttccagcagctgtttcccattcagaaatttctggcatcgggtatttctataaagtccatcagttagagcaggagcaggcccggagggacgccctgaagcagcgggctgctctggtgattcttgtacctaatctggtgtgctcaccaatgagtgaaagggatcgtgggtcagggacaccgagagagtgaggtcacttccacttcaaaccttcagtgagggggtgggatggagagaatgctgaatcttttttttgacgggatggggtttttctctttgtaattatttctttagtttaattaaccttttggttgtttgtgcaatattatatattttaaattataatgcatctccccagagtattttgtagctgggaaaagaaaaaa

SEQ ID NO: 15022 - DNA, 425 bp, Homo sapiens
  SIMILAR (31)..(198): 831254mologous to Homo sapiens Human secreted protein, SEQ ID NO: 5352,accession number G01271,Smith-Waterman Score=222.
cgacgatttcgtgcggaaggggaggacgtgggatggtggcggagctggctgcagcaaatctaccaggcagtcaaagagaagtcctctgaagccttggagtttatgaagcgggacctgacggagtttacccaggtggtgcatgatgacacggcctgtaccatcgcagccacggccagcgtgggcaaggagaatctggctgtgagtaccacccaaaccctcccaagtaactgcccctcgcaacctgtcctgtgctgggctcccaacctttctaccattaagtgatcatttttccatatggggaaaaatatgtggagtacttttcctcccattttgaaagaattgtgtctggcaaccaaacaagctgcatattttaagtaataattagttttcccacttctgtattgttctagcaaatgttttccatt

SEQ ID NO: 15023 - DNA, 1194 bp, Homo sapiens
  SIMILAR (391)..(810): 291254mologous to Sorghum bicolor hydroxyproline-rich glycoprotein,accession number X56010,Smith-Waterman Score=112.
atggggtttctccatcttggtcaggctggtcttgaattcctgacctcaggctcaagcacggacatcagtgaggactgggagaaagactttgacttggacatgactgaagaggaggtgcagatggcactttccaaagtggatgcctccggggagcccttctgcttctggaagggctatcctgggggtgaacttgaaactctcatcaggcttctgcaaaagctcttcttcctgaagacagacccagcctttgtgctctcaccctccactctggtaaagctgcacctctgggggaatgaggggctgcaggaatctctggagagcctggtgcttcacgatgctgctctggtgattcttgtacctaatctggagaagaagggggagatctcagagctccttgtaggcagcccctccatccgggccctttacaccaagatggttccagcagctgtttcccattcagaattctggcatcggtatttctataaagtccatcagttagagcaggagcaggcccggagggacgcgcctgaagcagcgggcggaacagagcatctctgaagagcccggctgggaggaggaggaagaggagctcatgggcatttcacccatatctccaaaagaggcaaaggttcctgtggccaaaatttctacattccctgaaggagaacctggcccccagagcccctgtgaagagaatctggtgacttcagttgagcccccagcagaggtgactccatcagagagcagtgagagcatctccctcgtgacacagatcgccaacccggccactgcacctgaggcacgagtgctacccaaggacctgtcccaaaagctgctagaggcatccttggaggaacagggcctggctgtggatgtgggtgagactggaccctcaccccctattcactccaagcccctaacgcctgctggccacaccggcgtttttagttggaggaagaggagctcatgggcatttcacccatatctccaaaagaggcaaaggttcctgtggccaaaatttctacattccctgaagggaggaccctggccccccagagcccctgtgaagagaatctggtgacttcagttgagcccccagcagaggtgactccatcagagagcagtgagagcatccccaaatctcctctgccaaccagagctctgggcacagattctggtggctccctgctggcc

SEQ ID NO: 15024 - DNA, 1101 bp, Homo sapiens
  SIMILAR (273)..(163): 891254mologous to Homo sapiens Human mammastatin amino acid sequence,accession number Y23756,Smith-Waterman Score=172.
tttcgtggcaagatggcggaagggtgagcttgtcgttttgctcctaggcgttggggcctgaattctcccagggttggggtgctgggcgagagtcccggtggggaacgtgagatcagcgggggcgtggactgatctgaaagggcagagtggagtcgcattgtgagggggtgggcaagcggtctgcgaagcctcggcccgcagggtacatctgagcggggaacaaaccggatccttgggcgggcaggaatcgcaccgcggtgctgccagatgtgtctgtcttccacagggaggacgtgggatggtggcggagctggctgcagcagagctaccaagcagtcaaagagaagtcctctgaagccttggagtttatgaagcgggacctgacggagtttacccaggtggtgcagcatgacacggtctgtaccatcgcagccacggccagcgtggtcaaggagaagctggctacggaaggctcctcaggagcaacagagaagatgaagaaagggttatctgacttcctaggggtgatctcagacacctttgccccttcgccagacaaaaccatctgactgcgatgtcatcaccctgatgggcacaccgtctggcacagctgagccctatgatggcaccaaggctcgcctctatagcctgcaggcggacccagcaaccttattgtattgaccaagatggccccccggaattgtttgacgcctggctttcccagttctgcttggaggagaagaagggggagatctcagagctccttgtaggcagcccctccatccgggccctctacaccaagatggttccagcagctgtttcccattcagaattctggcatcggtatttctataaagtccatcagttagagcaggagcaggcccccgagggacgccctgaagcagcgggcggaacagagcatctttgaagagcccggttgggaggaggaggaagaggagctcatgggcattttacccatatttccaaaagaggcaaagtttcctttggccaaaatttcttacattccctgaaggagaacctggccccccagaggcccttttaaagagaatcttggtgacttcagttgagcccccagcagaa

SEQ ID NO: 15025 - DNA, 568 bp, Homo sapiens; identical to SEQ ID NO: 3040
  SIMILAR (107)..(226): 871254mologous to Homo sapiens calbindin D28K,accession number S46006,Smith-Waterman Score=193.
  misc_feature (1)...(568): n = a,t,c or g

SEQ ID NO: 15026 - DNA, 467 bp, Homo sapiens
  SIMILAR (72)..(230): 841254mologous to Homo sapiens Human secreted protein, SEQ ID NO: 5210,accession number G01129,Smith-Waterman Score=241.
cccacctgcacccaggtgaaataaacagccatgttgctcacacaaagcttgtttggtggtctcttcacacggacacgcatgaaatttggtgccgtgactcggatcgggggacctcccttgggagatcaatcccctgtcctcctgctctttgctccgtgagaaagatccacctacgacctcaggtcctcagaccgaccagcccaagaaacatctcaccaatttcaaatccgcacacaagaacttccaaacgcctgaaccgcagcggccaggcgttcctccagaacctccttccccaggagcttgctacaagtgccagaaatctgaccaccaggccaaggaatgcctgcagcccaggattcctcctaagccgtgtcccatctgtgcgggaccccactggaaattggactgttcagctcacctggcagccactctcagagcccctggaactctggcccaaggctctctga

SEQ ID NO: 15027 - DNA, 155 bp, Homo sapiens
  SIMILAR (1081)..(455): 511254mologous to Homo sapiens Human mammastatin amino acid sequence,accession number Y23756,Smith-Waterman Score=366.
catggccttttaaatcctataaactctccttacaattcccccattttacctgtccaaaaaccggacaagccttacaggaagctggagtcattcactgcaagggccatcaaaaggcatcagatcccatcactcagggcaatgcttatgctgataag

SEQ ID NO: 15028 - DNA, 160 bp, Homo sapiens
  SIMILAR (23)..(145): 531254mologous to Human endogenous retrovirus Method: conceptual translation supplied by author; putative hybrid protein similar to HERV-H protease and HERV-E integrase,accession number U34991,Smith-Waterman Score=100.
atcttctcggactgacgctgcccgatcgcctcagaagcctcctggaccatcacagatgctttgggtaactcttacagtggaggcatggccttttaaatcctataaactctccttacaattcccccattttacctgtccaaaaaccggacaagccttacag

SEQ ID NO: 15029 - DNA, 331 bp, Homo sapiens
  SIMILAR (290)..(210): 811254mologous to Homo sapiens Human secreted protein, SEQ ID NO: 5210,accession number G01129,Smith-Waterman Score=125.
ttgccccttccccagaaaagcgggacttgctgctaagggtgaaggaccaaggcaggcgtccctgcgtggtctgacacctttgaaacgtgggtgaataatcaggcatctctgcaatgattaaacaccaagggaaggctgccttcccagtccgtgaccagcaccggagttttgggtccatggataaaacgtgtctcctttgtctctctagagcaaagagcaggaggacaggggatttatctcccaagggaggtcccctgatctgagtcacggcaccaaatttcatgtgcgtccgtgtgaagagaccaccaaacaggctttgtgtgagcaacat

SEQ ID NO: 15030 - DNA, 937 bp, Homo sapiens
  SIMILAR (541)..(699): 601254mologous to Homo sapiens PQ-rich protein,accession number Z50194,Smith-Waterman Score=162.
gattaaagcccgttatcacttgcctgttacagcttggccttttaaagcctataaactctccttacaattcccccactttacctgtccaaaaaccagacaggccttacagcaaaccgaactcattgccttaactcaatccctcacttttgcaaaggaattacacgtcaatatttttactgactctaaatatgccttccatatcctgcaccaccatgctgttatatgggcagaaagaaatttcctcactacacaagggtcctccatcattaatgcctttttaataaaaactcttctaaaagccgctttacttccaaaggaagctggagtcattcactgcaagggccatcaaaaggcatcagatcccatcactcgggacaatgcttatgctgataaggtagctaaagaagcagctagtgttccatcttctgtccctcatggccagtttttctccttctcattggtcactcctatttactctcctactgaaatttccacctatcgatctcttcccactcaaggcaaatggttcttggaccaaggaaaatatctccttccagcctcacaggcacattctattctgttgtcatttcataacctcttccacgtaggttacaagctgctagactgcctcttagaggctctcatttcctttccatcgtggaaatctatcctcaaggaaatcacttctcagtgttccatctgctattctactactcctcagggagtgttcaggccccctcccttccctacacaccgagcttggggatttgtgcctgcccaggactggcaaattgactttactcacatgcctcgagtcaggaaactaaaatacctcttggtctgggtagacactttcactggatggatagaagcctttcccacagggtctgtaaccaggccatcactaatcattctatacgacaaatgtttcttctaa

SEQ ID NO: 15031 - DNA, 1404 bp, Homo sapiens; identical to SEQ ID NO: 3044
  SIMILAR (1)..(246): 701254mologous to Homo sapiens putative p150,accession number U93568,Smith-Waterman Score=282.

SEQ ID NO: 15032 - DNA, 306 bp, Homo sapiens
  SIMILAR (145)..(1077): 271254mologous to Arabidopsis thaliana Pto kinase interactor, putative,accession number AC079829,Smith-Waterman Score=159.
tcactgtccatcaaccactttctcctttccactcttcaatctctcccttctcttaatttcaattcctttcattttccttagcggcaagtcccgcttttctgggagagggttaagtaccccaaccccttctccttcacccttagtggcaagtcccgcttttctggcagccattcccagagcccctggaactctggcccaaggctctctgactgactccttcccagatcttctcggattagcggctgaagactgacgctgcccgatcgcctcggaagccccctgcacccaggtgatataaacagccat

SEQ ID NO: 15033 - DNA, 667 bp, Homo sapiens; identical to SEQ ID NO: 3060
  SIMILAR (461)..(583): 901254mologous to Homo sapiens calbindin D28K,accession number S46006,Smith-Waterman Score=207.
  misc_feature (1)...(667): n = a,t,c or g

SEQ ID NO: 15034 - DNA, 428 bp, Homo sapiens; identical to SEQ ID NO: 3061
  SIMILAR (2)..(100): 871254mologous to Homo sapiens calbindin D28K,accession number S46006,Smith-Waterman Score=154.
  misc_feature (1)...(428): n = a,t,c or g

SEQ ID NO: 15035 - DNA, 436 bp, Homo sapiens
  SIMILAR (145)..(240): 961254mologous to Human endogenous retrovirus tripartite fusion transcript PLA2L,accession number Z14310,Smith-Waterman Score=169.
  misc_feature (1)...(436): n = a,t,c or g
gcatatgcggaccagctctgantaaggagacataaacnnnnnnnnnnnnnnnnnnnnnnnnnnnnnnnnnnnnnnnnnnnnnnnnnnnnnnnnnntttggcgccgtgactgggatcgggggacctcccttaggagatcaatcccccgtcctcctgctctttgctccgtgagaaagatccacctacgacctcaggccctcagaccgaccagcccaagaaacatctcaccaatttcaaatccggaccccactggaaatcggactgttcaactcacctggcagccactcccacagcccctggaactctggcccaaggctctctgactccttctcggcttagcggctgaagactgacgctgctggatcgcctcggaagccctgtagaccatcacggacgccaagcnnnnnnnnnnnnnnnnnnnnnnnnnnnnnnnnnnn

SEQ ID NO: 15036 - DNA, 742 bp, Homo sapiens
  SIMILAR (52)..(450): 541254mologous to Phascolarctos cinereus pol protein,accession number AF151794,Smith-Waterman Score=375.
atgcaccttaccatcccattaaaacctaatcacccttaccccactcaatgccaatatcccatcccacggcatgctttaaaaagattaaagcctgttatcactcgcctgctacagcacggccttttaaggcctataaactccccttacaattcccccattttacctgttcaaaaaccagacaaggcttacaggttagttcagaatctgccccttatcaaccaaattgttttgcctatccaccccgtggtgccaaacccatatactctcctatcctcaatacctccctccacaacccatttttctgttctggatctcaaacatgctttctttactattcctttgtaccctttatcccagcctctcttcgctttcacttggactgaccctgacacccatcaggctcagcaaattacctgggccgtactgccgcaagccttcacagacagcccccacttcaaatcacccaagcagcttctcaggctcttggtattcagtggaaacttcatatcccttatcgtcttcaatcttcaggaaaggcagaacggactcgtggtctttgaaagacacacctcaccaagctcagcctccaacttaaaaaggactggacagtacttttacctcttgcccttctcagaattaagagcctgtcctcgagatgctacagggtacagtccatttgaacttgtatacggatgcgctttcttactcagccccaacctcgtcccagacaccagccccctag

SEQ ID NO: 15037 - DNA, 630 bp, Homo sapiens
  SIMILAR (289)..(5): 551254mologous to AKV murine leukemia virus gag-pol polyprotein (tag amber codon at 2250-2252 inserts Gln in Mo- MuLV),accession number J01998,Smith-Waterman Score=260.
cagtccaagtgaaagtgaagagaggctggaattaagggtgcaaaggaatagtaaagaaagcatgtttgagatccagaacagaataatgggttgtagaggcaggtattgaggataggagagtatatggatttggcaccacggggtggataggcaaaacaatttggttgataaggtgcagatcctgaactaacttgtaaggcttgtctggttttaggacaggtaaaatggggaaattgtaaggagagtttataggctttaaacggccatgctgtagcaggcgagcaaggttttattgagtagaagcagctctcaccagatgggggaaccagaagggagatggttttcctctgtagttgggctggttgcctggctcttctctgactgttctggccaaacttgacattgtgccattggttgatggcctgccggtccccgtcagcgtgctcttcggctggtgggctctccatgaccagctgcttgtgtcttcttccaccagtgtgttcctcacgatgtccagccacttctgtgtctgcccactaggttctccggtttttatgggcttatcaattttattgatctcaaagaatttacctttggttttattgactttttcagctgcttttctgtttt

SEQ ID NO: 15038 - DNA, 357 bp, Homo sapiens; identical to SEQ ID NO: 443
  SIMILAR (346)..(696): 431254mologous to Volvox carteri f. nagariensis hydroxyproline-rich glycoprotein DZ-HRGP,accession number AJ242540,Smith-Waterman Score=190.

SEQ ID NO: 15039 - DNA, 576 bp, Homo sapiens; identical to SEQ ID NO: 1844
  SIMILAR (264)..(1): 961254mologous to Homo sapiens MAD2,accession number AJ000186,Smith-Waterman Score=423.

SEQ ID NO: 15040 - DNA, 627 bp, Homo sapiens
  SIMILAR (449)..(285): 381254mologous to Homo sapiens Fragment of human secreted protein encoded by gene 49,accession number Y36637,Smith-Waterman Score=73.
atggaattttgtatttcattaggccggaaaataactttttcaaacatttttccctacaacggggccaattggaaggttttcttaaaaaagtcccaaccattattgaatgcactggttgagcaggatgatgccgaacgcttgttccgccgcttccgagcggcaggggatttaccgtatggcgcttttggtgaaattttctgggaaacacagtgccaggagatgcagcagcttgccgacagagtcattgcctgtcgccagccggggcagagtatggaaattgatctcgcctgcaacggtgtgcagataactggctggttgccgcagctttgggatgctgaagggatcagcttcagtgtcttcagctttgggatgctgaagggatcagcttcagtgtcttcagctttgggatgctggagcttgctacacatgctggaaatctgccactgggccaaggaatgcccacagcacggtattcctcctaagccacgtcccatctgtgtgggaccccaccgaaaatcggactgttcatctcacctggcagccactcccagagcccctggaactctggcccaaggctctctgactgactccttcccagatcttctcggcttagcggctgaagactga

SEQ ID NO: 15041 - DNA, 462 bp, Homo sapiens; identical to SEQ ID NO: 10181
  SIMILAR (71)..(130): 901254mologous to Homo sapiens Human secreted protein, SEQ ID NO: 5576,accession number G01495,Smith-Waterman Score=108.

SEQ ID NO: 15042 - DNA, 441 bp, Homo sapiens; identical to SEQ ID NO: 12926
  SIMILAR (249)..(383): 521254mologous to Human T-cell lymphotropic virus type 2 gag polyprotein,accession number AF139382,Smith-Waterman Score=146.

SEQ ID NO: 15043 - DNA, 525 bp, Homo sapiens; identical to SEQ ID NO: 2009
  SIMILAR (316)..(447): 511254mologous to Human T-cell lymphotropic virus type 1 Gag,accession number S74562,Smith-Waterman Score=146.

SEQ ID NO: 15044 - DNA, 1080 bp, Homo sapiens; identical to SEQ ID NO: 5255
  SIMILAR (1414)..(2484): 1001254mologous to Homo sapiens Human PRO361 protein sequence,accession number Y17834,Smith-Waterman Score=1831.

SEQ ID NO: 15045 - DNA, 645 bp, Homo sapiens; identical to SEQ ID NO: 6816
  SIMILAR (431)..(556): 501254mologous to Homo sapiens Human secreted protein HCHPF68, SEQ ID NO:163,accession number Y86248,Smith-Waterman Score =112.

SEQ ID NO: 15046 - DNA, 1080 bp, Homo sapiens; identical to SEQ ID NO: 5259
  SIMILAR (514)..(1044): 481254mologous to Murine leukemia virus gag-pol polyprotein,accession number U13766,Smith-Waterman Score=416.

SEQ ID NO: 15047 - DNA, 696 bp, Homo sapiens; identical to SEQ ID NO: 2107
  SIMILAR (996)..(1853): 1001254mologous to Homo sapiens dJ1022P6.2 (KIAA1434 protein),accession number AL109935,Smith-Waterman Score=1486.

SEQ ID NO: 15048 - DNA, 679 bp, Homo sapiens
  SIMILAR (235)..(2): 751254mologous to Homo sapiens Npw38-binding protein NpwBP,accession number AB029309,Smith-Waterman Score=308.
ctgacttcttttcttcattgttgtctctctcaccattatcacggtgcacaaattcatccccgtcactttctccatctgatttgtcggtgtcactgtcatcagtactgtcatcatgcttatcttgatccatgtcctcaggatagccatcatcttcactggtgctggcagccactcccagagcccctggaactccggcccaaggctctctgactgactccttcccagatcttctcggcttagcggctgaagactgacactgcccgatcgcctcggaagccgctttgccgccctgtttcccgcgaccggacatgatcacctctcgcctacaactccagagacggagacaaaccgctctcggcgtccggtaccggaatgcaacgtaccgcacccgaactgcctctacaaactctttacggccgcgcggcagcccctttccattggctctggtgaccaatgacaggcaggtccgctcccaactagcgctctggaagagagaccgcctcctccagctctctccaatcaatagagcaatctccgaatcctcatttacatagccgctcacataaataacgaggccagccggctcagtctttgggacccagatgaatttagcggttacgggttttccacgaccacgctcgcttccaagcacataaactcgtaggaaataagaaaacat

SEQ ID NO: 15049 - DNA, 555 bp, Homo sapiens; identical to SEQ ID NO: 449
  SIMILAR (1)..(210): 941254mologous to Homo sapiens Human secreted protein, SEQ ID NO: 7284,accession number G03203,Smith-Waterman Score=348.

SEQ ID NO: 15050 - DNA, 878 bp, Homo sapiens
  SIMILAR (584)..(336): 951254mologous to Homo sapiens SEQ ID NO 374 from WO9922243,accession number Y19656,Smith-Waterman Score=412.
atgtggattccaccacagtttatgacttgtaccttccagtgtggcaggtcgagctgcaccttggcccatttgagccatgactggggtagtcaagaaatgctgcactggaatatggggagcagaaaattgaagcagccctgggacgtcttggcactcagagcctgtgatgggaagggtggcactgactcagcccccctgcacccaggtgaaataaaaagctttattgctcacacaaagcctgtttggtggtctcttcacacggatgcgcatgaaatttggtgccgtgactcggatcggggggacctcccttgggagatcaatcccctgtcctcctgctctttgctccatgagaaagatccacctacgacctctggtcctcagaccaaccagcccaaggaacttctcaccaattttaaatcagtcccaactccaagcgttgctgagtctttccaatcttccttttctacggacccatctgacccctcctctcctccccaggctgctcctcgccaggccaagccaggtcccaattcttcctcagcctctgctccccgaccctataatccttttatcacctcccctcctcacacctggtcgggcttacagtttcattctgcgactagccctcctccacctgcccaacaatttcctcttaaaaaggtggctcaagttaaaggcacagtcaagtggctaaagactgatgctgcccgatcgcctcagaagcctacaggaaccatcacagatgctttagataactctcacagtggaggtccgataatggaccggcctttattagtcaaatcacccaagcagtttctcaggctcctggtattcagtaaaacctttatatcccttaccatcctcaatcttcaggaaag

SEQ ID NO: 15051 - DNA, 1332 bp, Homo sapiens
  SIMILAR (279)..(332): 771254mologous to Homo sapiens Human secreted protein, SEQ ID NO: 7340,accession number G03259,Smith-Waterman Score=81.
atggatgctggtacagtggccagaggggactgggaagtgaggaaaattgccatggtccagggtgttaactcccgggtgcttctggtttgccccatggatgagcacagtccacagacaacaccctcagacagagagacacaggaaactgacctgggagggagtgtcagcaggacacctcctcagtgggttaagaaagaattcaagagcgagccagtggtagaagaaaacagctgtattgagatggcaattttcatgcgtgtccgtgtgaagagaccaccaaacaggctttgtgtgagcaacatggctgtttatttcacctgggtgcagattacaacatgccccttgatagatcctgataaatctacaggatcaaaatgctataaattagtatcatacaattttcagacgattaacacccatgaaagcaggaggaaaattacttcagagaaaagcacagaaatgaaggaagaaatgaaagttctatatacgttctatgacctcgagcaggtggctgtcttcttgctgcgtctccacatggctttttctctgtgcgaaggcatccctgatgtctctctcatagaagagcaaagaaagcccatggagtctatagttatggtacaacttttagataggcctgacacggtcaggaaggcgatgagggtcagcaggaggaagaattggcgctgcggcggcatgcccggcgacgacccagttctcgccggcgaacgaaaagaaggcgaggaagaaatagatgcagcccacgatcggaaattcccagtcggtatccagaccgactgcatagatgcccttggccgaaagccatcccatcacccaactcgtcggcaccgtgacgacgccgcgggtaacgccattgtcgatacggcacccgtggcggtgccgatcggccaatgccggagcaatgatattgaccatgaagcaactggccatagttatgcgagtatatcagcatcaggtcagacgatcgatgcgtcccggccggaacggggcgcgatccggaatgagtgccgttggggcatactactcatcctgtattcgggttatgaccgcacttcagtcttgtaccggggacgacgaagctgtcttgctatagcctcgctcagcagcaacatgcttgtgcgcatgcgagatccaaaatcgcagcgattggcacgcgagcttgccaaccctcgtgatcaactcacacgaaggagagccctgatgaaagcgttgcgttttcatgccgccaaggatctgcggatcgaagatacccccgaaaccgatcgcgaaacgtctcaagggcaggggattgtgcggaatcgacctatcaattaa

SEQ ID NO: 15052 - DNA, 632 bp, Homo sapiens
  SIMILAR (1147)..(1632): 311254mologous to Arabidopsis thaliana Contains PF|00069 Eukaryotic protein kinase domain,accession number AC008075,Smith- Waterman Score=127.
atgaatcctcctgggagctccattaatgtgaaagatgactcaaagcacttgattgtaatgataagagagggagacacacagctggcggtgcagcaacaaccccctggtgccactggtcttccgaagacaaaggggacatcttttatccgtggacccaaaactccggcgccggtcacggactgggaaggcagccttcccttggtgtttaatcattgcagggacacctctctgatttttattcacccacgtttcagaggtgtcagaccaggcagggacgcctgccttggtccttcacccttagcggcaagtcccgcttttctgggggaggggcaagtaccccaacctcgtatctctgtgccccaatcccttatttccatgccccgacctctctctgtggcccaacctcttatctctgtgccccaacccctcatttccacgccccaacccctttcccgctttcctggaagatattttaatctttccctctgtgtcaactttgatgaccctgacagtgaaggtgagcatgataccgagatttctgagtgtcgtcttctcatcaggtgctcagataagagctcctatgctaggtcctttggacaacagagaaaaccaatgaagggtgtgcattctag

SEQ ID NO: 15053 - DNA, 375 bp, Homo sapiens
  SIMILAR (264)..(205): 901254mologous to Homo sapiens Human secreted protein, SEQ ID NO: 5576,accession number G01495,Smith-Waterman Score=108.
ccaggagtaagaggagcccagggtggtccctctatccccaggcagtgtgaagagtctgctattggtcctaaatttgcttggatcatctcttcctttcactggaagcaaggcatgttcaacatggaggctccttcttcccttttctttgtcaacatgtgtgcagtaaagaagcagacaacctggggccggccagacagaggattcatctggcagccacttccagagcccctggaactctggcccaaggctctctgactgactccttcccagatcttctcggcttagcagctgaagactgacactgcccgatcgcctcggaagcccctgctcttgtttacactgccggtttacactgtttctccaagccatcacagc

SEQ ID NO: 15054 - DNA, 1485 bp, Homo sapiens; identical to SEQ ID NO: 245
  SIMILAR (543)..(1190): 311254mologous to Leishmania major L8453.1,accession number AC008054,Smith-Waterman Score=166.

SEQ ID NO: 15055 - DNA, 2206 bp, Homo sapiens
  SIMILAR (449)..(859): 781254mologous to Mus musculus 5S ribosomal protein,accession number Y12431,Smith-Waterman Score=522.
aatagatatgattttcacccctggacctccctccacgccaaaacacaagaagtctcagaaagggtcagcattcaccttcccatcccagcaatctcccaggaatgaaccatatgtagccagaccatccacatcagaaatcgaagaccaaagcatgatggggaagtttgtaaaagttgaaagacaggttcaggacatggggaagaagctggacttcctcgtggatatgcacatgcaacacatggaacggttgcaggtgcaggtcacggagtattacccaaccaagggcacctcctcgccagctgaagcagagaagaaggaggacaacaggtattccgatttgaaaaccatcatctgcaactattctgagacaggccccccggaaccaccctacagcttccaccaggtgaccattgacaaagtcagcccctatgggttttttgcacatgaccctgtgaacctgccccgagggggacccagttctggaaaggttcaggcaactcctccttcctcagcaacaacgtatgtggagaggcccacggtcctgcctatcttgactcttctcgactcccgagtgagctgccactcccaggctgacctgcagggcccctactcggaccgaatctccccccggcagagacgtagcatcacgcgagacagtgacacacctctgtccctgatgtcggtcaaccacgaggagctggagaggtctccaagtggcttcagcatctcccaggacagagatgattatgtgttcggccccaatggggggtcgagctggatgagggagaagcggtacctcgccgagggtgagacggacacagacacggaccccttcacgcccagcggctccatgcctctgtcgtccacaggggatgggatttctgattcaactgtacctttatttctgagctctgaaattctgcagaaacaggtgggccagagtatcacaagcatgctgggcttcctgtcacgtggtccttcaatgaagctgtgcatgggcctggcatgtgtcttgtccctttggaacacagtgtctggcatcaaaggagaagccaagaaagagaagggaatgacctttttacctacaacagatagcaagaagttcttctccttgctgagtgtcacttcctacagttccttcgccttccacaagttttctgtagctgtttacaacatttctaacctgaagacagtggaccccgccaaattccccacaaggtattgctactgtttaaacaatcggaccaatgacttatcagattttacagctctactggtagatatcattggcaattctaccagctacctcacagagatttttaagtcaacctccatcctctcagtgaatcaaagcaatgaatcagattgcatcttcatctgtgtgatgacaggaaagtcaggaaggaatctttctgacttctgggagatagaagaaaaatatcccattatcaattacacatttaccagcggcttgtctggtgttctggctttattgctcacacaaagcctgtttggtggtctcttcacacggacgcgcatgaaatttggtgccgtcactcggatcgggggacctcccttgggaaatcaatccccgtcctcctgttctttgctccatgagaaagatccacctacgacctcaggtcctcagacagaccagcccaagaaacatctcaccaatttcaaatccgcggcacgtcccactttcctggggcaggggcaagtacccctcaaccccttctccttcacccttagcggcaagtcctgctttcctaggcggcaagaaccccccaatcgcttatttccacaccccaacctcttatctctgtgccccaatcccttatttctgtgccccaaccccttctctacttttctggagggcaagaaccaccacccccaccccttctctgtgtctcaagtcttttctctaggcttgcctccttcactatgggagcattcacccatggcacacagactccgagtccaaccaaggcaacagcccccagatatccacaaacaggtgatctctctgcagagtggccattcactgctggtgaagagccagtcctggtcccaagaccccatcaagtttcaattgcctcatcatcataaaaacacggcatctgtgtgcattaatccatctgtatacgagaaagaagaagaaagatatggagacctttttatgaggaaaaaccaaaagacttcctag

SEQ ID NO: 15056 - DNA, 930 bp, Homo sapiens; identical to SEQ ID NO: 3268
  SIMILAR (354)..(551): 551254mologous to Mus musculus NG28,accession number AF110520,Smith-Waterman Score=178.

SEQ ID NO: 15057 - DNA, 1093 bp, Homo sapiens
  SIMILAR (422)..(1012): 841254mologous to Cloning vector pZC320 SopA,accession number U26464,Smith-Waterman Score=870.
atgttgctcacacaaagcctgtttggtggtctcttcgcacggacgcacatgaaatttggtgccgtgactcggatcgggggacctcccttgggagatcaatcccccgtcctcctgctctttgctccctgtccccaggtctgcactgttggagcaactaagcggtggcaagtcaccaccagactcactggcatctgggccacacattgctgtgacttaagatcagagagaccaaggggagcaggcccagccgatgaaaggcaatcagatgttgccgtctcaatgttaaaagaatacccacctggcgcacaatacgcaaaccgcctctctccgcgcgttggccgattcattaatgcagctggcacgacaggtttcctgactgtaaagcggtcagctatcagagatgccgagaaagcagggcgactaccgcacccggatatggaaattcgaggacgggttgagcaacgtgttggttatacaattgaacaaattaatcatatgcgtgatgtgtttggatctggctctgaaggggctacgtgttttgctcgtggaaggtaacgacccccagggaacagcctcaatgtatcacggatgggtaccagatcttcatattcatgcagaagacactctcctgcctttctatcttggggaaaaggacgatgtcacttatgcaatatatttcacttgctggccggggcttgacattattccttcctgtctggctctgcaccgtattgaaactgagttaatgggcaaatttgatgaaggtaaactgcccaccgatccacacctgatgctccgactggccattgaaactgttgctcatgactatgatgtcatagttattgacagcgcgcctaacctgggtatcggcacgattaatgtcgtatgtgctgctgatgtgctgattgttcccacgcctgctgagttgtttgactacacctccgcactgcagtttttcgatatgcttcgtgatctgctcaagaacgttgatcttaaagggttcgagcctgatgaccccactggaaatcggactgttcaactcacctggcagccactcccagagcccctggaactctggctgaaggctctctga

SEQ ID NO: 15058 - DNA, 843 bp, Homo sapiens
  SIMILAR (1034)..(1456): 301254mologous to Brassica napus cell wall-plasma membrane linker protein,accession number X94976,Smith-Waterman Score=99.
atgaatccactccatgaaggctgtcagtctgacacacggaactacgtggggtcttggcaaggaaaacactcagacacatacagatacttgggagctttagatactccagctcctgtcttcccaacaaaagtatctgcaactcctgcaaagcagaaggttagacctccatacatacccctgaggaaagagtttgaatcccagtatttgggtgacttagtcatttcagcctttgagctttgcagaaccctagctgactggggtgaaagtggtacctcagcacaagcacagcggctctatgaaagatcatacgccaatcctcttatggcagctgagccagcccaagctgtaaagcttgggtggagaccttcacccaagccacacattggagacaagtcagtatcattttggctcctgtggatggagacaaaggagacacattttatccgtggacccaaaactccggcgccggtcacggactgggaaggcagctttcccttggcgtttaatcattgcagggacacctctctgattattcacccacgtttcaagggtgtcagaccacgcagggatgcctgccttggtccttcacccttagcagaaagtcccgcttttcaggggaaggggcaagtaccccaaccccttctctccttgtctctaccccttctctgcttttccagggaaaaggcaagagcttgctacaagtgccagaaatctgaccaccaggccaaggaatgcctgcagcccaggattactcctaagccatgtcgcatctgtgcgggacccactggaaattggactgttcaactcacatggcagccactcgcagagccactggaactctga

SEQ ID NO: 15059 - DNA, 813 bp, Homo sapiens
  SIMILAR (649)..(1095): 441254mologous to Drosophila melanogaster Adrift,accession number AF117649,Smith-Waterman Score=303.
aaagcctataaactctccttacaattcccccattttacctgtccaaaaaccggacatgccttacaggttagttcaggctttgttgagtctcccacagttaccattgttcctggcctggacatcaatctggcctcccacactattccggataacactcctgaaccccatgactgtatctctctgatccacctgacattcactccatttccccatgtttccttctttcctgttcctcaccctgatcacacttggtttattgatggcagttccactaggcctaattgccactcaccagcaaagacgggctatgctatagtacaagccactagcctgcctctcagaacctctcatttcctttccatcgtggaaatctatcctcaaggaaataatttctcagtgttccatctgctgttctactattcctcagggattattcaggccccctcccttccttacacatcaagctcgaggatttgcccccacccaggactggcaaattagctttattcaacatgtcccaagtcaggaaactaaaatacctcttggtctgggtagacactttcactggatgggtagaggcctttcccacagggcctgaaaaggccactgtggtcatttcttcccttccgtcagacataattcctgggtttggccttcccacctctataatacagtctgataacggattggcctttattagtcaaatcgcccaagcagtttctcaggctcttggtattcagtggctcctggttttacctcaaaccaccacccttaagtctctcttaaagtggataaaagatcttcagtggcaag

SEQ ID NO: 15060 - DNA, 715 bp, Homo sapiens
  SIMILAR (265)..(432): 351254mologous to Human immunodeficiency virus type 1 tat,accession number U01459,Smith-Waterman Score=70.
gcaggctctggggtattactgcagtgagacaaaagagacacgttttatccgtggacccaaaactccggcaccagtcacggactgggaaggcagccttcccttggtgtttaatcattgcagggacgcctctctgattatacacccacgtttcaagggtgtcagaccacgcagggatgcctgccttggtccttcaccctttgcagcaagtcccgcttttctggggaaggggaaacacgctttaaaaggattaaagcctgttatcactcgcctgctacagcatggccttttaaagcctataaactctccttacaattcccccattttacctgtcgtaaaaccagacaagccttacaagttagttcagaatctgcgccttatcaaccaaattgttttgcctatccaccccgtggtgccgaacccatacactctcctatcctcaatacctccctccacaacccattattctgttctggatctcaaacatgctttctttactattcctttgcacccttcatcccagcctgtcttcgctttcacttggactgaccctgacacccatcaggctcagcaaattacctgggctgtactgcctcaagtcttcacagacagcccccattacttcagtcaagcccaaatttcttcctcatctgttacctatctcagcgtaattctcataaaaacacacgtgctctccctgctgatcatgttcagctga

SEQ ID NO: 15061 - DNA, 1452 bp, Homo sapiens; identical to SEQ ID NO: 2646
  SIMILAR (155)..(45): 401254mologous to Homo sapiens HSPC038 protein,accession number AF125099,Smith-Waterman Score=58.

SEQ ID NO: 15062 - DNA, 2028 bp, Homo sapiens
  SIMILAR (414)..(205): 711254mologous to Mus musculus contains transmembrane (TM) region,accession number AB030182,Smith-Waterman Score=257.
atgaataatgatccttacattcctgcatctgcttttggggctcgccctgttaaaaccacagaagctcccccactgagcaccttgagacccctgcccctgcccaccaaagaacaaccccctttgactgtaattttccattaccttcccaaatcctataaaacggccccacccctatctccctttgctgactctcttttcggactcagcccgcctgcacccaatgaaataaacagccatgttgctcacacaaagcctgtttggtggtctcttcacacggacgcgtatgaaatttggtgccgtgactcggatcgggggacctcccttgggagatcaatcccctgtcctcctgttctttgctccgtgagaaagatccacctacgacctcaggtcctcagacccaccagcccaaggaacatctcaccaattttaaatcagacaaaggagacatgttttatccgtggacccaaaactccagtgccggtcacggactgggaaggcagccttcccttggtgtttaataactgcagggacacctctctgattatacacccacgtttcaagggtgtcagaccacgcagggatgcctgccttggtccttcacccttagcggcaagtcccgcttttctggggaaggggcaagctgctcctcgccaggccgagctaggtcccaattcttcctcagcctctgctcctccaccctataatctttttatcacctcccctcctcacacctggtccggcttacagtttcgttctgtgactagccctcccccacctgcccagcaatttactcttaaaaaggtggctggagccaaaggcatagtcaagcatgctttgaaaggattaaagcctgttatcactcgcctgctacagcatggccttttaaagcctacaaactctccttacaattcccccattttacctgtcctaaaaccagacaagccttacaagttagttcaggatctgcgccttatcaaccaaattgttttgcctatccaccccgtgctcggcataattgggctcacttcctccgtccgtcgggatgccgggcaggacctgaagcgtgaccgcgcggaatttcttcttggtgatgaagttcatcacccgcaccgtcggcggatagccgaagcgcgccgcctcctgctcgggcagcacttcgatccgctccatcgcctcatagggcaggttctggaactcggcgaagcccgatatgcgccgcccgttgagcagcatcaccggctcgcccccgctcgccgaactggtcagcgacttcacccgcttgagcagttcggccaggctgggcgcgcccagcgccgcaatcgcctcggcatcgagcaccgcgaccggctcgaccgccccgatgacggagccgggaatgcgcttgccggtgacggtgacttccgcagggggtgcctgttcgccgggatcggaattcgccctcggtactgtcggtatcgccagtcccaagacgaccgccgaccatcccacgccgcccctcggccgcgcgcgctccccataccgcatcgtccagccactcccatcgccgacgtgatggtgatgtttagtgtggcaatcatgtcacaattaaggctcgtgcttcgccatatcgacggaatatcgcggtggccgcctgccgtggttttcataactgacgtgaagatatggcttgtttacccgtccgacgattgtcgaataaggtcaaacgatcgcgacgacatgcagggagaagcgcccgcgatgagcatgaatgccgccgccagagtgggcgatccgatcggccacagctttagccagggcctgttcggcgaggcgctggatggtttgttctttgcccgtcgcagcgaggtggacatgcgcgcgggcaatctcggccggctgatcgcgcgcgggctgagcggcggacgctggacgccggccgatggccagctgacgctcggatcgcgcgacgtcttcatcaatggcccccccgccaccatgacgatccggtcgaccggccaatgccgccagcatagcggtctgcgcaccgtc

SEQ ID NO: 15063 - DNA, 1112 bp, Homo sapiens
  SIMILAR (1324)..(998): 791254mologous to Mus musculus contains transmembrane (TM) region,accession number AB030182,Smith-Waterman Score=480.
atgtggaaaggccccaaaggattagacatgtatggaaagagctcagtgagccctaagacatcagatatactggggagagacactctcctgctggccttgaaggtgcaaacagtggtgttgcaaactgcctgtggagagggccatgtggcaggaaactgtgggaggcctctagaaactgaaggcagtctccagctgacagctactaagaagctaagggactcagtcctgcaaccaaaaagtcctgaattctgccaacaatttacaagagcttggaataggacccaagttccagatgagactgaagccccagctggcacctatgcagcccaatcgggggacctcccttgggagatcaatcccctgtcctcctgttctttgctccatgagaaagatccacctacggcctcaggtcctcagaccgaccagcccaaggaacatctcaccaattttaaatcgggtttcagaggtgtcagaccacgcagggacgcctgccttggtccttcacccttagcggcaagtcccgcttttctggggaaggggcaagtaccccaaccccttctctctgtgtctctaccccttctccgcctttctggggggcaagaaacacccaaccccttctccttcaccctgagtggcaagtccgcttttctagaggagcaagtaccccaacctcgtatctctgtgccccagtcccttatttccacgccccgacctcttatctctgtggcccaatcccttatttctgcaccccaacctcttatatctctgtgccccaatcccttatttccatgccccgacctcttatctctgcaccccaaccccttatttccacgacccaacccctttcccgcttttctggaaggagcttgctacaagtgccagaaatctggccaccaggccaaggaatgcctgcagcccgggattcctcctaagctgcgtcccatctgtgcgggaccccactggaaatcggactgtccaactcacctggcagccactcccagagcccctggaactctggcccaaggctctctgactgactccttcccagatcttcttggcttagcggctgaagactgatgctgcccgatcgcctcggaatccccatagaccat

SEQ ID NO: 15064 - DNA, 588 bp, Homo sapiens
  SIMILAR (582)..(457): 851254mologous to Homo sapiens calbindin D28K,accession number S46006,Smith-Waterman Score=197.
ttttttttttttgagaaataaagctttttaatcacctgggtgcaggttggctgagtccgaaaaaggagtcagcaaagggagataggagtggggccgttttttaggatttgggtaggtggtggaaaattacagttaaagggggttgttctcttgcgggcaggggcgggggtcacaaggtgctcagtggggagctccggagactcactgtcccggagaaggaatgtcacaaggtaatgtcatcagttaaggcaggaactagccattttcacttcttttgtggttcttcagttgcctcaggccattctggatgtatacatgcatgcttgggctcagaggccggcctgacattcctgtcctccactgtaagagttacccaaggcgtctgtgatggtccaggaggcttcccaggcaatcaatcgggcagcgtcagtcttcagccgctaagctgagaagatcggatttaaaattggtgagatgttccttgggctggtgggtctgaggacctgaggtcataggtggatctttttcatggagcaaagaacaggaggacaggggattgatctcccaagggaggtccgccaatccgag

SEQ ID NO: 15065 - DNA, 2711 bp, Homo sapiens
  SIMILAR (392)..(523): 651254mologous to Homo sapiens Human secreted protein, SEQ ID NO: 7678,accession number G03597,Smith-Waterman Score=141.
atgggagactttaacaccccactgtcaacattagacagatcaacgagacagaaagtcaacaaggatacccaggaattgaactcagctctgcaccaaccagacctaatagacatctacggaactctccaccccaaatcaacagaatatacatttttttcagcaccacaccacacctattccaaaattgaccacatacttggaagtaaagctctcctcagcaaatgtaaaagaacagaaattataacaagctatctctcagaccacagtgcaatcaaactagaactcaggattcagaatctcactcaaaaccactcaactacatggaaactgaacaacctgctcctgaatgactactggttacataacgaaatgaaggcagaaataaagatgttctttgaaaccaacgagaacaaagacacaacataccagaatctctgggatgccttcaaagcagtgtgtagagggaaatttatagcactaaatgcccacaagagaaagcaggaaagatccaaaactaacaccctaacatcgatcaacaaaattgatagaccactagcaaggctaataaagaaaaaaagagagaagactcaaatagatgcaataaaaaatgataaaggggatatcaccaccgatcccacagaaatgcaaactaccatcagagaatactacaaacacctctatgcaaataaactagaaaatctagaagaaatggataaattcctcaacacatacactctcccaagactaaaccaggaagaagttgaatctctgaatagaccaataacaggagctgaaattgtggcaataatcaatagcttaccaaccaaaaagagtccaggaccagatggattcacagccgaattctaccagagttgcttcaaagagaataaaatacctaggaatccaacttacaagggatgtgaaggacctcttcaaggagaactacaaaccactgctcaaggaaataaaagaggatacaaacaaatggaagaacattccatgctcatgggtaggaagaatcaatatcgtgaaaatgaccatactgcccaaggtaatttacagattcaatgccatccccataaagctaccaatgactttcttcacagaagtggaaaaaactactttaaagttcatatggaaccaaaaaagagcccgcatcgccaagtcaatcctaagccaaaagaacaaagctggaggcatcatgctatctgacttcaaactatactacaaggctacagtaaccaaaacagcatggtactggtaccaaaacagagatatagatcaatggaaaagaacagagccctcagaaataatgccgcatatctacaactatctaatctttgacaaacctgagaaaaacaagcaatggggaaaggattccttatttaataaatggtgctgggaaaactggctagccatatgtagaaagctgaaactggatcccttccttacaccttatacaaaaatcaattcaagatggattaaagacttaaacattagacctaaaaccataaaaaccctagaagaaaacctaggcattaccattcaggacataggcacgggcaaggacttcatgtctaaaacaccaaaagcaatggcaacaaaagccaaaattgacaaatgggatctaattaaactaaagaacttctgcacagcaaaagaaactaccatcagagtgaacaggcaacctacaaattgggagaaaatttttgcaacctacccatctgaccaagggctaataaccagaatctacaatgaactcaaacaaatttacaagaaaaaaacaaacaaccccatcaaaaagtgggcaaaggacatgaacagacacttctcaaaagaagacatttatgcagccaaaaaacacatgaaaaaatgctcagcatcactggccatcagagaaatgcaaatcaaaaccacaatgagataccatctcacaccagttagaatggcaatcattaaaaagtcaggaaataacaggtcctcaatggattggatgatgtccagctgtttaggtgaaataaacagccatgttgctcacacaaagcctgtttggtggtctcttcatacagacgtgcatgaagtttggtgtcgtgactcggattgggggacctcccttgggagatcaatcccccgtcctcctgctctttgctccgtgagaaagatccgcctacgacctcaggtcctcagacctaccagcccaagaaacatctcaccaatttcaaatccgcatgctttgaaaggattaaagcctgttatcactcgcctgctaaagcatggccttttaaagcctataaactctccttacaattcccccattttacctgtcttaaaaccagacacgccatacaagctagttcagcgatctatgccttatcaaccaaattgttttgcctattcaccccatggtgccaaacccatatactctcctatgctcaatacctccctacacaatgcattattctgttctgcagctaatacgcgctttctttactattcctttgcacccttaatcccagcctatattgagtctcacttggactgaccctgacacccatcaggctcagcaaattacctgggctgcactgccgcaaggcttcacagacaacccccattacttcagtcaagcccaaatttcatcctcatctgttacctatctcaacataattctcgtaaaaacacacgtgctgtccctgctgatcatgtccagctga

SEQ ID NO: 15066 - DNA, 1352 bp, Homo sapiens
  SIMILAR (248)..(346): 641254mologous to Homo sapiens Human secreted protein, SEQ ID NO: 6536,accession number G02455,Smith-Waterman Score=110.
  misc_feature (1)...(1352): n = a,t,c or g
atgggaaaaggccgtcgatcgctctggcttcttcctgctgatgggggaagtagcgggaatgggaacgaactccaagggacatctccccatgactatttttccattgcaattaagtccacgcacattgggttggaataccccaccagtagacagagtaacagagtcagcccccagtccaagagaattaggcagccacttgggctgccttctggatccatcactgaaagggggccaccaaacaacaggcagaaagggtacactcgccagcagttttgccacgagagtacaccgaacaaaggagacagggtcatttataacctgacatgtttactctactgctgtgtccggtttccattggctggaacaggaccacacattctgtatttgtcccgattggctagcaacttagaacttttcaaaagagacaaaggcagaggagaacaaaggaaggaggaagtaacttgtttccacaagttacttgctgagaaagagaacaacccccctttttcctttatctacccaaatcctataaaacggccccacccctatctcccttcgctgactctcttttcggactcagcccacctgcacccaggtgaaataaacagctttatggctcacacaaagcctgtttggtggtctcttcacacggacgcgcatgaaatttggtgccatgactcggatcgggggacctcccttgggagatcaatcccctgtcctcctgctctttgctctgtgagaaacatccgcctacgacctcaggtcctcagaccgaccagcccaagaaacatctcaccaatttcaaatccgagacaaaagagacatgttttatccatgaacccaaaactctggcgccggtcacggactagggaaggcagccttcccttggtgtttagtcattgcagggacggcctctctgatcattcagccacatttcaagggtgtcagaccatgcagggatgcctgccttggtccttcacccttagcggcaagtcccgcttttctggggaaggggcaagtaccccaaccccttctctccatgtctcttaccccttctctgcttttccggggacaggggcaagtaccccaaccccttctctccgtgtctctactccttctctgcttttctggggacagggcaagtaccccaaccccttctctccttgtctctaccccttctctgcttttntggggcaggggcaagtacccctcaaccccttctccttcacccttagcggtaagtcccgcttttntagggggcaggggcaagtaccccccaaccccttctccttcacccttagtggcaagtcctgctttcctggggcaggggcaagtaccccttaaccccttct

SEQ ID NO: 15067 - DNA, 1751 bp, Homo sapiens
  SIMILAR (1146)..(1304): 831254mologous to Homo sapiens Human secreted protein, SEQ ID NO: 5210,accession number G01129,Smith-Waterman Score=233.
atgcatgaaatttggtgccatgagtcggatcgggggacctcccttgggagggcaatcccctgtcctcctgttctttgctccatgagaaagatccacctacgacctcaggtcctcagaccgaccagcccaaggaacatctcaccaattttaaatcgggctgctcctcgccaggcccagctaggtcccaattcttcctcagcctccgctcctccaccctataatccttttatcacctcccctcctcacacctggtctgccttacagtttcgtttcgtgactagccctcccccacctgcccagcaattgactcttaaaaaggtggctggagctaaaggcacagtcaaggttaatactcctttctctttatcccaaatcagatagtgtttaggctctttttcatcaaatataaaaatctagcccagttcatggctcgtttggcagcaaccctaagacactttacagccctagcccctaaaaggtcaaaaggccatcttattctcaaaatgcattttattttattacccaatctgcttcccgacattaaataaaactccaaaaattaaattccggccctcaaaccccacaacaggacttaattaacctcgccttcaaggtggtccaatattaaaagtagaagcagccacgtagcaatgtatttctgagttgcaattcctccttgcctccactgtgagacaaaccccagccacatctccagcacacaagaacttccaaacgcctgaactgcagcggccaggcgttcctccagaacctcctcccacaggagcttgctacacttgccggaaatctggccactgggcaaaggaatgcccgcagcctgggattcctcctaaggcgcgtccccatctgtgtgggaccccactgaaaaatcggactgttcaacttcacctgggcagccactcccagagcccctggaactctggcccaaggctctctgactgactccttcccagatcttctcagcttagcagcttgaagactgacactgcccgatcgcctcggaagccccggagaccatcacggacgccgagctgccagtaactctcacagtggaagcccacctgcacccaggtgaaataaacagccatgttgctcacacaaagcctgtttggtggtctcttcacagggacgcgcatgaaatttggtgctgtgactcggatcgggggacctcccttaggagaccaatcccctgtcctcctgctctttgctccgtgacaaagatccacctacgacctcaagtcctcagacccaccagcccaagaaacatctcaccaatttcaaatccggctgctcctcaccaggccgagctaggtcccaatccttcctcagcctctgctcctccaccctataatctttttatcacctcccctcctcacacctggtctggcttaccgtttcgttccgtgactagccctccccctcctgcccagcaatttactcttaaaaaggtggctggagctaaaggcacagtcaagaccatcacggacatcgagcttcaggtaactctcacagtggaagcccgcctgcgcccaggtgaaataaacagccatgttgctcacacaaagcctgtttggtggtctcttcacacggacgcgcatgaaaatactgttactttccagaacaatcttaaggacaacacaggagcccttacatttccactgggatcctgcttatattgtaacaaggaggtgctggatatagctacgctcccatctccctacggcaaccactga

SEQ ID NO: 15068 - DNA, 1208 bp, Homo sapiens
  SIMILAR (214)..(369): 841254mologous to Homo sapiens Human secreted protein, SEQ ID NO: 5210,accession number G01129,Smith-Waterman Score=231.
atgccacatcagaatgggaataaatgtggctaccagaggagcctgcaaagtttctggattctaatggaaaagaagaaactgccttttgcctggaatttcctgatgtggccccaaatagctatccatctcatgcccttagacatgcttttccatacctgtgaaataaacagccatgttgctcacacaaagcctgtttggtggtctcttcacaccgacgcatatgaaatttggtgctgtgactcagatcgggggacctcccttgggagatcaatcccctgtcctcctgttctttgctccgtgagaaagatccacctacgacctcaggtcctcagacccaccagcccaaggaacatctcaccaattttaaatcatgtaagcaagcctctttttactctcttctccaacctccctcactatccctcaacctctttctcctttcaatcttggcgctacacttcaatctctcccttctcttaatttcaattcctttcattttctggtagagacaaaagagacacgttttatccgtggacccaaaactccggcgccggtcacggactgggaaggcagccttcccttggtgtttaatcattgcagagatgcctctctgattatacacccacatttcaagggtgtcagaccacgcagggacgcctgccttggtccttcacccttagcggcaagtcccgcttttctggggaaggggcaacacgctttaaaaagattaaagcctattatcactcgcctgctacagcatgggccttttaaaccctataaactctcctttcccttcctcccattttacctgtcctaaaaccagacaagccgttacaagttaagttcaggatctgcgccttatcaaccacattgttttgttgcctatccaccccggtggtgcccaaccccatacactcttttgtcctcaataccgtcccgtcgtactacccattattctgttcgtatatgtcaaacatgctttctttactattcccctgcaacccttaatcccaagcctctctttgccttcacttagactgaccctgacacccattaggctcaacaaattacctgggctgtgctgctgcaaggctttcagggacagccctcattacttgaatcaagcccaaatttcttcttcatctgttacctatctcggcataattctcataaaagcacacgtgctctccctgccaatcgtgtccgactgg

SEQ ID NO: 15069 - DNA, 1623 bp, Homo sapiens
  SIMILAR (575)..(1351): 951254mologous to Homo sapiens lanthionine synthetase C-like protein 1,accession number Y11395,Smith-Waterman Score=1358.
cgggggacctcccttgggagatcaatcccccgtcctcctgctctttgctccgtgagaaagatccacctacgacctcaggtcctgagatcgaccagcccaagaaacatctcaccaatttcaaatccgccactcccagaggccctggaactctggcccaaggctctctgactgactccttcccagatcttctcggcttagtggctgaagactgacactgcccgatcgcctcggttgaagccccctagaccatcacggatgccgagcttcgggtaactctcacagtggaaggttcccacggcgcccctaatcccgcttgaagcagccctgagaaacatcgcccattctctctcccctaccacccctcaaaaattttcaccaccccaacacttcaacactattttgttttatttttcttattaatataagaaggcaggaaatgtcaggcctctgagcccaagccaagccatcgcatcccctgtgacttgcacgtatacgcccagatggcctgaagtaactgaagaatcacaaaagaagtgaatatgccctgccccgccttaactgatgacattccaccacaaaagaagtgtaaatggccggtccttgctttaagtgatgaggttaccttgtgaaagtccttttcctgggctcatcctggctcaaaaagcacccccactgaggcaccttgcgaccccccactcctgccccgccagagaacaaaccccctttgactgtaattttcctttacctaccccaaatcctaataaaatgccccacccttatcttcccttcgctgactctctttttcggactcagcccaccatgcaccccaggtgaaataaacagctttactgctctcacacaaagcctgtttggtggtctcttcacacggacgcgtatgaaatttggtgccgcgcatgaaatttggtgccgtgactcggatcgggggagacctcccttgggagaatcaatcccctgtactcctgtgttctttgctccgtgagaaagatccacctacgacctcaggtcctcagaccgaccagcccaaggaacatctcaccaattttaaatccggagcttgctacacttgctggaaatctggccactgggccaaggaatgcccgcaggccgggattcctcctaagctgtgtcccatctgtgtgggaccccacttgaaaattcggacttgttcaactcaccttgggcaagccactcccagagcccctggaactctggcccaaggctctctgactgactccttcccagatcttctcggtttagcagctgaagactgacactgcccgatcgcctcggaagccccctacaccattcacggacgccgagcttcgcgtaactctcacagtggagggtaagtccgtccccttcttaatcaatacagaggctactcactccacattaccctcttttcaagggcctctttcccttgcctccataactgttgtgggtattgatggccaggcttctaaacctcttaaaactccccaactctggtgccaacttagacaatactcttttaagcactcctttttagttatccccacctgcccagttcccttattaggctgagacactttaactaaattatctgcttccctgactattcct

SEQ ID NO: 15070 - DNA, 1612 bp, Homo sapiens
  SIMILAR (1330)..(1797): 341254mologous to Drosophila melanogaster CG12936 gene product,accession number AE003828,Smith-Waterman Score=207.
atgggccttggcaagagtctctgtatcctgaaagatgcagtcctggctctgcgggaaattaaaggcataagtttccagtatgcaccaaacactaacaggctctggggatacagacaagcaaagcagacccagcatctatctggaatctctactcttgactgccctcagaggtacaatggagatgacactggttctgtttgggctctggagccctcttgtatgctgtgggcctgccctcttgtgtttccttcagaaatctattactttatttcagaagatgtatggaaacacctggatgcccaggaaaagtttgctgcagtcatgggaccctcacggagaacctctgttagggcagtgtggaagggaaatgtggggttggagcccccacacagagtccctactggggcactgcccagggtagctgtgaaaagagggccactgtcctcaagaccccagaatggtagatccacctacggcttgcactgtctgaaggacacaccaactcaggaagactggctggtgagtgtgcttcctgaaggatccagggttggtgtggaccccttgatcattcctacagctctgggccatggcaggaccacctttctgaaggttctggactttcaaggccctgctccctgccctgctgcaatgggcgttcggctcatggctgggccacaatgtgtctcctcagattattggaagaaaatggccaaagttctgagaagtgccggccatcacctcattcctgtcaaggagaacctcgttgacaaaatctggacagaccgtcctgagcgcccttgcaagcctctcctcacactgggcctggattacacaggcatctcctgggaaggacaaggttgcagacccttcggttgaaaatgggctgagaggaacgtcatgtgggtttgtgggtcactgccttggatgagattgcgtggctatttaatcctccgaggatcagatgtggagcacaatccagtatttttctcctacgcaatcattagggattaggagacgttcatgctctttcattgatggtgacccgcatagacgcccccagtgttgaaggagcacctgcttcttgacttgggtctggaagccgaatacaggatccaggtgcatccctacaagtccatcctgagcgagctcaaggccctgtgtgctgacctctccccaagggagaaggtgtgggtcagtgacaaggccagctatgctgttgaagcgagaccatccccaaggaccaccgctgctgtatgccttacacccccatctgcatcgccaaagcttgtgaagaattcagcttgagtcagaaggcatgagaatttctgatgagaaatctgcaggtaatctcactgaagatcccttttacgtgatagaccgaaccctcatcacaactggtgttgtttgcaacagcacagaaaagtcgagtcttatgtctgtggcttctgcagacactgctgagaacctgtggcatctcttctttcacattctgccatcagagagggctctaaccaggaagctcagagtcttaaagcttggcccagtaaattacagtgtccagaaccctacagcccagttacaccagcagggcccacatctgggggtggcctag

SEQ ID NO: 15071 - DNA, 759 bp, Homo sapiens
  SIMILAR (520)..(750): 621254mologous to Homo sapiens PRO2221,accession number AF116695,Smith-Waterman Score=229.
atgaaggtttatggctcgcaccctctgaagcagcggcctaagctgtatctggagccctttgagccaagactggggccagatctgccaggatgtgaggagcaacctcctagggtggcacagggcagttgtgacttgggactggcccctgaaaccaatcaatcgtcctggacctttgtgatcatactggttaatccagagcaaaccctaactctcttcaattctatgaaggctgagagaggtaaggaagctgcagatgaaaagttggaagttcgcagaggctatccagaagatctagctaagataattgatgaggcctccaccagtgatacccaggcaaacagggtctggagcaaagctccagcaaaatccagcagacctgcagaacagcagccttattttagaaggaaaactagcaaacagaaaggaatagtagcaacatcaacaataaaggacatccactcacagaccccatccaaaggtcaccaacatcaaagaccaaaggtagataaatccacgaagatggggcgaaaccagtgcaataaggctgaaaactccaaaaaccagaacgcctcttctccttcgaaggatcacaactcctcgccagcaaaggaacaagactggatggagaatgagtttgatgaattgacagaagtaggcttcagaaggtgggtaataacaaactcttctgagctagaggagcatgttctaacccaatgcaaggaagctaagaaccttgaaaaaaggttagacgattgctaa

SEQ ID NO: 15072 - DNA, 1680 bp, Homo sapiens
  SIMILAR (1849)..(2412): 971254mologous to Homo sapiens Amino acid sequence of a human RNA-associated protein,accession number Y84442,Smith-Waterman Score=959.
atggggtcttcactgagtccggtgctgtatgtagctctgcctgtacggcagcctctgctgcgctctgtggtggaggaaaggagcaccaaaatgcgagttgggagcccagggttccaggctaaatttcgattctactcccaaggcctgagctggtcagcgagaggggaagaagggttggtgcccgcgttctggctccagccctatcccagacctctaaacttcaaagcagagatgacagaacagaaagaaaatcagacttatgtcgatgggggttttagaccttatatccacagaagaaagaatttgactgaggggcataaggcagaaaaagagatggagccttgggatggcttctctgatgagtcctgccgcacccattgtcaagttcatgactacgccaaaggtcatggtgaggtccagagggagcgggtggatgagcagaaagaacacttggggggtcgtaggcaggactgccagcagcagcatctgaaccgaaggctgcattgcctgtctcaggggaggcgccgagtgaagcctcgggcagtgttaggggtcatggccgtgcccatggactggctggatctgagagacatggccatgaccatgctgccccagagcaccagctccttcagagtgtggacgctgaccacgtggtcccagttgcctggtaccagttctgggatgatgaaggcagaggaatattgtctcctggggatcacaagccagatagaagaggtgcggctctatattgattggtttgcgtatctaaggcacatcctggctgatccctttgctctctaccattactcatccgtcctcacaaaaaaccctttctcttctgaggttatcctcattcggccaataaaaccaataggctttaaagagaaggtgtcaatttgtctgagctcaaaggatgggaagttcttccagctgaaaaagatgaggggagaggctaaagaaggaatcaggaacagtcagaatctcagtgggaagctatgcagcttccaagtgcagcttgatgagtcagctgtgaagacagggtatgtccagatctctgtggagaggaacagcaacaggtctgaaaagaagagactgtatgtctgtccatcttcagatacctccaccaccaatgaccaactttccttcctgggaaaatggggagccagagagagaacagaaagtgaaatctcttcctctggcagccagccaagccacatcttggagaggctacctggctgtatctggtgggaacaggaaagcaggctacctgtggccctgaagaaagccttcatagggaaagatgtaggaaccctacctggtgctgattcttctgagcaattttcagaggcctcctttgcctgctttcacccaagggaaatttctggccctcagaccacgcgtacttggctctctgacagtgtacctgcacccaccaccctcatggatcacaactcctcgccagcaagggaacaaaactggatggagaatgagtttgatgaattgacagaagtaggcttcagaaggtgggtaataacaaactcctccaagctaaagaagcatgttgtaacccaatgcaaggaagctaagaactttgataaaaggttacaggaactgctaactagaataactagtttagagaagaacataaatgacctgatggagctgaaaaacacagcatga

SEQ ID NO: 15073 - DNA, 2621 bp, Homo sapiens
  SIMILAR (1720)..(2037): 991254mologous to Homo sapiens Amino acid sequence of a human RNA-associated protein,accession number Y84442,Smith-Waterman Score=548.
cctttgaccccgcgctgcaggaattcggcacgaggaactttggccgctcacttctggcgggctactgccccacatacatgcctgatcttgtgcttcatgggaccggcagtgatgagaagctgaagcagtgcctggtggccgaccttgtccacacagtccatcatccagtcctggatgagccaatagctgaagctgtctgtattatcgcagacacggataaatggagtgtgcaggtagctacaagtcagaggaaagtgacggacaacatgaaactaggccaggatgtcctggtctctagtcaggtgtccagtttgcttcagtccattttacagctctataagcttcacctccctgctgattttccaccccgtatgggaagtgaggagcgtctccgcccggcagctgccccatctgggagagaggtgaggggcagcccccgtaccgccagccgacccgtccgggagggagctcagttcctaacgggttacacgtctacagcccaggggatggggacacctgtcttagttcatctggactgcagtaacaaaataccatacactgagtggcttataagtaacagaaatttggaggatgggaagttcaggatcaaggcaccagcagatttagtgtctagattttgccgatttcgcaaccaccatcaaacagcattttcgcctgctggggcaaaccagcgtgtaccgcttgctgcaactctctcagggccaggcggtgaagggcaatcagctgttgcccgtctcactggtgaaaagaaaaaccaccctggcgcccaatacgcaaaccgcctctccccgcgcgttggccgattcattaatgcagctggcacgacaggtttcccgactggaaagcgggcagtgagcgcaacgcaattaatggattttgccgatttcggaaccaccatcaaacaggattttcgcctgctggggcaataccagcgtggaccgcttgctgcaactctctcagggccaggcggtgaagggcaatcagctgttgcccgtctcactggtgaaaagaaaaaccaccctggcgcccaatacgcaaaccgcctctccccgcgcgttggccgattcattaatgcagctggcacgacaggtttcccgactggaaagcgggcacgtttgagctctgctaagggtcagactgcctcctcaagtggatccctgacccctgtgtatcctgactgggagacacctcccagtaggggccgacagaacctcatacaggagagctctggctggaatctggtgggtgcccctctgggacgaagcttccagaggaaggaacaggcagcaatctttgctgttctacagcctccgctggtgatacccaggcaaacagggtctgtagtggacctccaacaaaccacagcagacctgcagcagacaggcctgttagaaggaaaattaacaagcagaaaacagccacatcaacatcaacaaaaaggacgtccactcagagaccccatccgaaggtcaccaacgatcacagctcctcaccagcaagggaacaaaactggatggagaattgagtttgatgaattgacagaagtaggcttcagaaggtgggtaataacaaactcctctgagctaaagaagcatgttctaacccaatgcaaggaagctaagaaccttgaaaaaagacacagcctgggcacaaaggaacccgctgccttgaagggaaggacccagtactggcaggattcatcacctgctgacttaaggccctggctttgtgctacactcttaaagcagtataagccaactgtgttctcccattccacagtggctgttcaccctagagcaggatttcttaacctcagcactgttgaccagcatccagtcctggatgagccaatagctgaagctgtctgtattatcgcagacacgaataaatggagtgtgcaggtagctacaagtcagaggaaagtgccgcacaacctgaaactaggccaggatgtcctggtctctagtcaggtgtccagtttgcttcagtccattttacagctctataagcttcacctccctgctgattttgttggggacattctcctggataataacctgaagtgtgttttccaacttggttccattctccctgtcactttcaggagccatgacccttatgatggggagggcacggatgaactcagaaccgcagcttgcagcccagacaccgagcaactggcccggcagtcaggcacatacccagtaagcctggggcaggccacggtgttagaagactctaaagcggcactgccaggtcttggacccacactaatggctgtgactgtggtgacaacagaagctgcagtagacatggttgtgggtgataggggagaggagagaggagggactctggtagctccaggaaccaggggtcttaccgaagagatatggtttcccgtccccagcccaagccgctggtggagttctcacccagttgttgcatttataacgttggccaaatatggaccaacttcttcgccccccgtttttcaccatgggccaaatattatacgccacggcgcacaaggtgctgcatccgctggcgattcaggctcatcatcccgttgtgatcggcttccatgtcgccagaatgcttaa

SEQ ID NO: 15074 - DNA, 1539 bp, Homo sapiens
  SIMILAR (794)..(660): 571254mologous to Homo sapiens Human secreted protein, SEQ ID NO: 7077,accession number G02996,Smith-Waterman Score=130.
atgattctgtcccctgctgccgtcttcccactcacgcaactcactctctggctttgttcttctcccttctccagtgcagcagtctacacccttacaccctctttctctgttcctatggtgcgcatcagttgttttgcttcttcagaaaaccgggaaattaatttcctgggatgtgctaagattcgggatggaggaccagcccattcggatccagcccttaacccagagcggtgtgatgatcctaaccgggttcgtaaatctgagggaactattcagccaactgaagcctatacaagacttgagctattggtagctccatggcacacatattctcttcatattcacattcacttctacattcaaccaacagttactgtggagcttccaagagcactgaccacagttcctggtgctttactgatgacatctcttcatatgactggggccactcggcatgattcaaaagggcatccagtcctggatgagccaatagctgaagctgtctgtattatcgcagacacggataaatggagtgtgcaggtagctacaagtcagaggaaagtgacggacaacatgaaactaggccaggatgtcctggtctctagtcaggtgtccagtttgcttcagtccattttacagctctataagcttcacctccctgctgattttcctccgctggtgatacccaggcaaacagggtctgtagtgtacctccaacaaaccacagcagacctgcagcagacaggcctgttagaaggaaagttaacaagcagaaaacagccacatcaacatcaacaaaaaggacgtccactcagagaccccatccgaaggtcaccaacgatcacagctcctcaccagcaagggaacaaaactggatggagaattgagtttgatgaattgacagaagtaggcttcagaaggtgggtaataacaaactcctctgagctaaagaagcatgttctaacccaatgcaaggaagctaagaaccttgaaaaaagggttagggtgaattgcctaacctagaataacctagccttagagaagaaccataaatgaccctgatggagctgaaaaacacagcacgagaaccttcatgaagcatacacaagtatcaatagctggatcaatcaagcagaagaaaggctatcagagattgaagatcaacttaatgaaataaagcgtgaagacaagattacagaaaaaatgaagaattccaccacagtgcgggtcgctgcaagcatgcagagcaaactgctgcagggggtagctgaagagggacctctccggctcacccggagtgcttctttctctgcagaaatttccatgtgccatcaatggctttttagtacttttggaaatggaaagagcagaaatcggtaccactgtgagaaagcacacattgaaggaaaccagcttgttgaggaaacaggtcgtgcttttaagtcacggcacagatatggcaccggtcctcttcacaagtttgaaatacatgaatacacagagttacatcacgttctgatgctgcaaggaaaatgttga

SEQ ID NO: 15075 - DNA, 490 bp, Homo sapiens
  SIMILAR (143)..(379): 321254mologous to Streptomyces coelicolor A3(2) putative membrane protein,accession number AL136058,Smith-Waterman Score=93.
  misc_feature (1)...(490): n = a,t,c or g
ggcgcacgggagacctcaggcccagactccactccccagctgtgaaaggactgctggccagacccccaagctagcccgccangcctccatagagctgcccagcatgactgcgtccagtaccaagagttggtgggagacgggtgaggtacaggctcagtctgcggccaagactccgtcctgcaagctgcaaaccacccaaggtgaagtcatcttagcctcttggagtcagcctgactggggtgaacccattgatatgtattgcataaatgaacatatgacagtagtgatgaaggatctccagctatccgtgtactctctatggttcccagactctttgggcagttgcatggggtactgggcttgagtttttggaaaacagggaatgtgagcagagtgttgcagatcttcttgttcagggagcacctaaggaantgggcatgattttacaacntttttcctttttggcantgacctntgttcaaggtgggca

SEQ ID NO: 15076 - DNA, 467 bp, Homo sapiens
  SIMILAR (575)..(531): 931254mologous to Homo sapiens super cysteine rich protein; SCRP,accession number U63332,Smith-Waterman Score=121.
gagattctagaaggccaggcagtgatgtgaaagatggtgcattccagggtcataacggctgcactaggagccagcccagggctctcctggagcataggacacctgttcagtgcagaggactcagtaagtctttctggagaagtgattgagctggctcttaattgttgatgaggtcttggagcctcccttctgctcccagaggcttttcttgctcatgtctccagccacaatatccttgcaggacggagtcttggccgcagactgagcctgtacctcacccgtctcccaccaactcttggtactggacgcagccatgctgggcagctctatggaggcctggcgggctagcttgggggtctggccagcagtcctttcacagctggggagtggagtctgggcctgaggtctcccgtgcgcctctcggcgccgaattcctccacatggagtatgtatcgatggggggcggc

SEQ ID NO: 15077 - DNA, 1122 bp, Homo sapiens
  SIMILAR (559)..(807): 911254mologous to Homo sapiens KIAA0456 protein,accession number AB007925,Smith-Waterman Score=408.
atgctcattggagcatttcgggttttggaatacaatgcaagtattccaaaatccaaaacacttctggtcccaagcatttcagagaaggggcccagattaccttcctacagggagaaagaagggccaagaaaatttgaagaaggatcttgtgaggagatcaaaatgttggagtatgctcttaaacaggaaaggagcagatggatgaatgaagaacagggcattgtcctcatgcatagctggagtgttgtaagtgccgtgtacatgtatggaaggtctgtgacaccatgtgcacccaagtcggacatgagggaacttggctgtttcagccttgtggagtctctgggtgaagatatcagctgggaaagggttaatgagctatcaactcaagtcatcatacatctggatgggctgtcattaacttcttacaaaaatttgatttcccgtgagagattttcatcaaacatttatatacccagacatggccaggggagtcagcgtggcacagaatcatcagaagcatggtatatagatagtcaagactctggagaacctcttccgaatctgcctggttggctagagcagtgttgtgacttaggctaccatgcaagtctgaaccgggctctacgcaccttcctctctgctgagttaaacctggaacagtcgaagcatgagggtctggatgccatcgagaatgcagtagaaaacctggatgccaccagtgacaagcagcgcctcatggagatgtacaacaacgtcttctgcccccctatgaagtttgagtttcagccccacatgggggatatgagccacgttcattccatagagggacccaccacctataaaaccagaaaagagacaaagccagaagtgcagggtggatttcttaacacaagctcactacgacctctagtcctcatcacgctgacactaagcttaaacccagacccttctacagttttgtctacaaagcacaatttgcccaaagcctttacaaacaccaacagcctttctttcagatatggcagcagggtcacatcttacacggccctgaccacattttgtctcctctgccatccccatctctctgactcagtcctcgcttgcagccatgaaaaaggatga

SEQ ID NO: 15078 - DNA, 456 bp, Homo sapiens
  SIMILAR (386)..(198): 931254mologous to Homo sapiens lymphocyte-specific protein 1,accession number AF043350,Smith-Waterman Score=312.
cagtacccagtgcaactgccaaagagtctgggaagcatagagagtacacggatagctggagatccttcatcactactgtcatatgttcatttatgcaatacatatcaatgggttcaccccagtcaggctgactccaagaggctaagatgacttcaccttgggtggtttgcagcttaattgttcatgaggtcttggagcccccctctctcgtcccagaggcttttcttgctcatgtctccagccacaatatccttgcaggacggagtcttggccgcagactgagcctgtacctcacccgtctcccaccaactcttggtactggacgcagtcatgctgggcagctctatggaggcctggcgggctagcttgggggtctggccagcagtcctttcacagctggggagtggagtctgggcctgaggtctcccgtgcgcctctcggcgcctgcgcacgaaa

SEQ ID NO: 15079 - DNA, 1582 bp, Homo sapiens
  SIMILAR (497)..(1060): 751254mologous to Mus musculus Pro-Pol-dUTPase polyprotein,accession number Y12713,Smith-Waterman Score=747.
caggcaaaaaaggaggggcagtgtcaggcagttggttgataacagtggtggcattatttgaaagggctagtttctgtttagcctttagagaagaaagcctaacagcagttagcaaagctgcaaagcaggtgtctactattaatgtgagggcattgactggaaaagaatgggaccctacaactttgaatggggatgtgtgggaggaccctgatgaagctggggacactgagcttgtaaactctggtgaagcttttttgccagaacaaacagcttcaccatccccagtagtggcaatatctccttcttgacccatgctgccatcagccattccacctttgtctgaggagataaaccctgcactacagtgggtccagtgggtccctggactcatcttgtggtcattttcccagtgccaggatgcataactggcatagacatacttagcagctggcaggacccccaccattggctccctgaatggtagggtgagggctacaaggcagacctggctgcagccactgtcgagtgcccaatttgccagcagcagagactgacactgagccctcagtatagccacattcctcagggtgatcagccaactacctggtagcaggttgattgtattggacctcttctgaaagggcagaggtttgtcctcactggaatagacacttactctggatatgtgtttgcctatcctgtatgcaatgcttctgccaagactatcatcagtggactcacagaatgccttatccactgtcatggtattccacacagcattgcctctgaccaaggcactcactttatggctaaagaagtgtggcagtgggctcatgttcatggaattcactagtcttaccatgttgctgattatcctgaagcagctgggttgatagaggggtggaatggccttttgaagtcacaattacaatgccaactaggtgacaatactttgcagggctggggcaaagttctccagaagcccatgtatgctctgaatcagcatctaatatatggtactgtttctcccatagccacgattcatgggtctaggaatcaagactggaatggaagctccctgagaggttggacttttactatcttgttcacagcacctagaagagaacctggcacctacattgcctctgaccaacgcactcactttatggctaaagaagtatggcagtgggctcatgctcatggaattcactggtcttaccatgttgctgattatcctgaagcagctgggttgatagaggggtggaatggccttttgaagtcacaattacaatgccaactaggtgacaatactttgcagggctggggcaaagttctccagaagcccatgtatgctctgaatcagcatctaatatatggtactgtttctcccatagccacgattcatgggtctaggaatcaaggtatggaagtggaggtggcaccactcaccatcacccctggtgacccacaagcaaaattcttgcttcctgttcccatgacattatgttctgctggcctggaggtcttagttccagagggaggaacgctgccaccaggacacacaacaatcccattaaactag

SEQ ID NO: 15080 - DNA, 2790 bp, Homo sapiens
  SIMILAR (198)..(8714): 1001254mologous to Homo sapiens neurofibromin,accession number M89914,Smith-Waterman Score=14667.
gcggccgccatggacgagcaggcgggtcccggcgtcttcttcagcaacaaccacccgggcgccggcggtgccaaggggctcgggcctctggcggaggctgccgcggccggcgacggggcggctgcggcgggggcggcccgagcccagtacagtctcccggggatcctgcacttcctgcagcacgagtgggcccgcttcgaggtggagagagcccagtgggaggtggagcgggcggagctgcaggcccagattgccttcctgcagggagaaaggaagggccaagaaaatttgaagaaggatcttgtgaggaggatcaaaatgttggagtatgctcttaaacaggaaagagccaaataccacaagttgaaatacgggacagaattgaatcagggagatatgaagcctccaagctatgattctgatgaaggtaatgaaacagaagtgcagccacaacaaaacagccagttaatgtggaaacaaggtcgacaactactcagacagtatctacaggaggtgggttatacagatactattctagatgtgaaatctaaacgagtgcgagctttgttgggcttttcaattgatgtcacggacagggaagatgacaaaaatcaggactcagttgtaaatggcacagaggctgaagttaaagagacagcaatgattgcaaaatctgagttaacagattctgcctccgtgctggataatttcaaattccttgaaagtgcagctgcagatttcagtgatgaagatgaagatgatgatgttgatggaagagagaaaagcgtcattgatacttcaacaattgttaggaaaaaagcattgcctgacagcggtgaagatcgagatacaaaagaagctctaaaggagtttgacttcttggttacatcagaggaaggagacaatgaatctagaagtgcaggcgatggaacagactgggaaaaggaagaccagtgtctcatgcctgaagcctggaatgtggaccagggagtaattaccaaactcaaggaacaatacaaaaaggagagaaaggggaaaaagggggtgaagaggcccaataggtcaaaactacaagatatgcttgctaatttgagagatgttgatgaacttccttcattgcagccatctgtgggttcaccttccagacccagcagctccaggcttcctgaacatgaaattaatagggcagatgaagtggaagcattgacatttcctccttcttctggaaagtcattcatcatgggagcagatgaagcccttgaaagtgaactgggacctggagaactagcaggccttacggtggccaatgaagcagactcactaacttatgatatagcaaacaataaagatgcattgaggaagacatggaaccctaagtttacattgagaagtcactttgatggcatccgagcccttgctttccatcccattgagcctgttttgataacagcatcagaggatcacacattaaaaatgtggaatttacagaaaacagccccagccaaaaagagcacttctcttgatgtagaacctatctatacattcagagcccataaaggtccagtgctttgtgtggtaatgagcagcaatggtgagcagtgttacagtggtggtactgatggactgatccagggctggaataccactaatcccaacatcgacccctatgattcttatgatccttctgttttacgaggccctctgctaggccacacggatgcagtctggggtttggcttatagtgcagcacatcagcgtttgttgtcctgttcagcagatggcactctgcgtttatggaatacaactgaggttgctccagcactaagtgtatttaatgatattaaagaactgggaatccctgcctctgtggatctagtgagcagtgacccgagccatatggtagcatcattcagcaagggatatacaagcatttttaacatggaaacacaacaacgcattctcactttagaatccaatgtagatacaacagccaactcttcctgccaaataaatagagtcatcagtcatcctactctttcgatcagcatcactgctcatgaagacaggcacatcaaattctatgataacaatacaggcaaactgatccactcgatggtagcccacctagaagctgttacaagtttagcagttgatcccaatggcctttacttgatgtctggcagtcatgactgttcaatacgtttatggaatctagaaagtaagacgtgtatccaagaattcacagctcatcgaaaaaagtttgaagaatcgattcatgatgtagctttccacccatccaaatgctatatagccagtgctggagctgacgcactggctaaagtctttgtatgacgcaatgcatcatcttcaccttctagctgtttataagtaatcaactgcacacaagagatacagaagacgagggcaagaatcatctcgtcctgcccttttgttctgctgaaggagcacagagaacatttgttgaagtatagttttgcaattcatatactgttttctaaaactaaggtttgttcaggttgctgcaagctcagctgaatctgtgagcctgaggtctgtttcaaatttctccccaataggcgcctwtatttctgaggtggttctaattcgctaggcaggcctgagcgaatacaagtttagcttgtccctgttgagtaagtagggcatgctacaatggataatttaaaagcttgatagctgggactgaatagaagaaaacgggaaacttagacaagttctccctgagaaatctggttaaaacacattaattat

SEQ ID NO: 15081 - DNA, 584 bp, Homo sapiens
  SIMILAR (493)..(561): 431254mologous to Homo sapiens A human RIP60 polypeptide proline-rich domain,accession number Y93990,Smith-Waterman Score= 49.
atggaagcctatagctatgagaaagtccaggaggagacaggagaagcttttacccgtccagaaggaggggcagccgaaggaaggagagagggaagagggtggtccagtgcaggcacagaaggttccaaacaggctgcacctgcactggaccaccctcttccctccttctttcagctgcccctccttctggacagcctctggagagcccttaaatttgtggtccttgaagctattgtaaagatgatacggtttaatggggtattggggaaatgcgaagccatccgagcacaagcgctccatgagggtgggccacctctcccgcttgccgtcttccataatcgtcggctgcaaattgtagcctgcagccgtatttcagctcgccttcggggatcgccgcctccgaagagcaacaacgagcaaagcagtctgtccacggacctccgcacagactctcagcgcctcccgcctctcagcagaaacgcccaacagaagggttagaaccagcgagcacgcgcaccttagccggccctgcccaacaggcccgaggcagagaaaccgccctagcagctctcgcgcgccacgaa

SEQ ID NO: 15082 - DNA, 2083 bp, Homo sapiens
  SIMILAR (70)..(1254): 1001254mologous to Homo sapiens neurofibromatosis type 1 protein,accession number M38106,Smith-Waterman Score=2029.
atggccgtggccagtaccaagagtcggtgggagacgggtgaggtacaggctcagtctgcggccaagactctgtcctgcaaggatattgtggctggagacatgagcaacaaaagcttctgggagcagaagggaggctccaagacctcatcaacaattaaggcccagattgccttcctacagggagaagggaagggccaagaaaatttgaagaaggatcttgtgaggatgatcaaaatgttggagtatgctcttaaacagaaaagagccaaataccacaagttgaaatatgggacagaattgaatcagggagctatgaagcctccaagctatgattctgatgaagcgcaacaacaagcaatgcggtctgtccacggacctttgcacagactctcagcgcctcccgcctctcagcagaaacgcccaacagaacggttaggaccagcgagcatgtgcaccttagccggccccgcccaacaggccctaggcggagaaaccgccctagcagctctctcgcggcgcccagtgcaggccgcggttgctgctcaggtactagtttctttgcaaatcacatgtatggagctaaagccaggagacctctggccttttaccagggtaactgtgcattggggaaaaaggaaatgatcagacatttcggaaactactggacactggctctgagctgatgcttgaaagactcagggtggtgattcctaccacatccctgttcaactctcccatttggcctgtgcagaagacagatggatctggaagaatgagagtggattatcataagcttaaccaagtgatgactccaactgcagctgctgtaccagatgtggtttcattgtttgagccaattaacacatttcttggtacctggtatgcagccattgacttggcaaatgcccttttctccattcctgtctgtaaggcccaccagaagcaatttgccttcagctggcaaggccagcaatatacctttactgttctacctcagaggtatattaactgtttggctttgtgtcataatcttattcagagagaccttgatcactttttgcttccacaaggtatcacactggtccatgtgtgttaatccggcccatttatcaagtgacctgaagctgccagttttgagtggggtccagaacaggagaaggctctacaacaggtccaggctgctgtgcaagctgctctgtcaattgggccatatgacccagcagatccaatggtacttgaggtgtcagtggcagatggcgatgctgtttggagcctttggcaggcccccaaaggtgaatcacagtggaggcctctaggattttggagcaaggctctgccatcttctacagataatgagaaatggtcagatgtgcaattatatactgattcatgggctgttgccagtagtttggctggatagtcagggacttggaagaagcatgattggaaaattggtgacaaagaaatttggggaagaggtatgtggatggacctctctgagtggtcaaaaactggaaagatatttgtatcccatgtgaatgctcaccaactggtgacctcagcagaggaggattttaataatcaagtggataggatgacccgttctgtggacaccactcagcctctttccccagccacccctgttgtcgcccaatgggcccatgaacaaagtggccatggtggcaggaatgaaggttatgcatggactcagcaacatggacttccactcaccaaagctgacctgactacagccactgctgagtgcccaatttgccagcagcagagaccaacactgagacctcgatatggcaccacttctcagggtgatcagccagctacctgctggcaggttgattacattgaacctcttccatcatggaaaaggcagaggtttctcctcactggaataaacactcactctggatatgggtttgcctatcctccatgcaatgcttctgccaagactaccatccatggactcatagcatgccttatccactgtcatggtattccacacagcattgcctctctttacagagagagaggcactcactttacagataaagaagtgcagcagtgggcg

SEQ ID NO: 15083 - DNA, 1803 bp, Homo sapiens
  SIMILAR (874)..(1482): 491254mologous to Homo sapiens unknown,accession number AF007170,Smith-Waterman Score=481.
atgcccataggaaaagtgggagagtactacatcaagggaacactccgtgcgacaaaagagtctgaacaacagtcttcagccctagaactttcctctgacagagtctacctaaatgagaaggaaccaggagaccaaccctggaatgctgcatttgtcttccgaggctgcggtgtggctctcgcactgcggccgcctcaccttggctggggagaacctcggtgggcaggattcagaggggcttttggtttcccgttttccacactgaacccttctaactggtctctgaccctgattattcagggctgcaaacaggaaggattttattcaccgtcgatgcggccccgagttgtcccaaagcgaggcagtgcccccaaggtccgtgctgaggagaacgctgctctgccttcgcgttgtccccctggacccctgcctgtggcacaaccaaggggcctgctgatgggggctcatgtgagcagtgccccagctgtgggtgtgggtgctgccagctgccaccgcctttgccctggtttcccagatagaccccgacccacactccgaagctgtatcatgaacgctgtggtgggcggctgtgacttgaggggtcaagtctatgatcccacgggaggctgggctaatgaggggaccagagacctcagtgctgtgcagggagtcccgaaccaccctggtggaaggccctgcccaactccccagtcctcccgccagctccctgtggtgtccaggagacctgtggtcaggcctggaggagaagctcctcctcccctcgacatcctccctgcagcccttgctcttcaccagagcctcctgactccccaggaccccagagaggaccgaccctctccagccgacctctgggctcaggacagctgggtggggcagccacaggagctgcctgtagggagcagagtcaggacggggaccgagccggacacccattctggaagtgtctgcacttccaggcaggggaaggacggcagtgggcccctagccagggagagctcagtcagagtgatcctccaggggcccagctctgcatggatgatgttcccagagtacacacctgggcctcgtgccagggccggcaccgccgttgtcggggccatggcaaggcaaacagtcaatgtttgcctcactaaagtgaggctgcagcaccctgaagggatccctggagggggacgtggtccccttgttcccaagcctgtctgcacatgcacgtggatgtcaagggttcccgtgtgtgagcacgtgcatatttgtatgagcatggggtgcaggcatgtgtgcctgtgtggccggagcgtgggctcgtggagaatgtgtactgctggccagacccccaagctagcccgccaggcctccatagagctgcccagcatggctgcgtccagtaccaagagttggtgggagacgggtgaggtacaggctcagtctgcggccaagactccgtcctgcaaggatattgtggctggagacatgagcaagaaaagcctctgggagcagaagggaggctccaagacctcatcaacaattaagatggactctgtgactacatgactaataaaatatggcagaaattgacaccatgcagttttccaagcccagggcttagggagacaggcagcttccagttcagtcttttggagggtcagctctggggccctaagccatcacgcatggagtccaaccaccctgagacgtcatgctggagacccacctgtggatgccccagtcaagagtcctggctgagcccagcctcccagccacccccacccaaggcatcagacc

SEQ ID NO: 15084 - DNA, 858 bp, Homo sapiens
  SIMILAR (156)..(392): 941254mologous to Mus musculus fizzy-related protein,accession number AF083809,Smith-Waterman Score=378.
gccgcaatacaggcggtggtcagagagtggaagggcagagaggctaaagggtccaggagcaaaaggaggtggcagcggatggcatcaaagaggcgagggtaggtcatgctggcaacaggaagcaacttcttatccagggccggggggcgggtgtctggctggaatctcccctgggtacatggagggtgccagccggctggacctgcagacccaggaagcgagatgggacgcctagggagccgggcccccttccacaagcaccttctcatacttcccaggcacggtggccacaaacttaaacctctttcccagatggggtgctcttaattgttgatgaggtcttggagcctcccttctgctcccagaggcttttcttgctcatgtctccagccacaatatccttgcaggacggagtcttggccgcagactgagcctgtaccctcacccgtctcccaccgactcttggtactggccacagccatgctgggcagctctatggaggcctggcgggctagcttgggggtccggccagcggtctcgatggcctgggtgtattgttccagccactgatcaatcttggagatgggcaagtctggctgggatttcttcacactgttactcttctctatggagcggtttagggactcggtcctgtcgatgagtttggtggtagggctcaggggaggcgagctctgttcgatggtcccctcccaagaccaaggggctgggtgtccttgggttggtgaccattttggtggtccttctggtcctcctcaggcccttcgggcccccgggtgttcttggccaggttcttttggcggaaggggtggttggacccggaaattcgggaccggtact

SEQ ID NO: 15085 - DNA, 2171 bp, Homo sapiens
  SIMILAR (1562)..(2137): 381254mologous to Homo sapiens A human collagen 1 (alpha1) protein helical region,accession number Y84544,Smith-Waterman Score =134.
  misc_feature (1)...(2171): n = a,t,c or g
ggcgcgtaaaaaaatctccacgcgaaaacgccttggcgctgtttccggatatttaaacgcccccccctctggggaatagtccccccgaggcaagaaacaccgcccgcaggcttntttttttttctttttaaattggggagaaagaacacgtgtctaaaaaaacccccgaaggaaaatttccccccagaagaatttttgttctctctcaagggattcctaaaaagaccacctcctttctacagaatccgtctaccaagaaaacaatattgaaacaaatcctgggggccccgtttggaatgtcttcccatggtttgcccaggacactctagtgggtgtgaagatgtcatattatactggactgtgaagcgagaaggtgatatttaagccactaaagcttgtggcagccaccaaattttccaatgccttctgcaatcttgcaatttaaactggcttcaccgccattcccaccccccacccagtgggaaaaagcctttaggagcaatttggtcaaggtgggggtgcttgtcaagggtttaacggttcaaccttcaaaggaaagccctgggtgcgctgaactccggggtggggggcaacctggcaaaggtaagcggggaacccccgtaaggcccccnggaagaaagctggggccacccttttgcccacttggaccagcaaaccgcgctgactgcaagttccccgggcgtgcccgtcgaaagcggccaggaggtcaactggggcggcttccctccagtgccttgggcaggggacccaccctcggcagcccgccccaccagggcccaggacgcagtggaagagcgtatggcgtcgcagcaggcagtccctaaggaactgcaccaactcctccaaacaccttcccaggtgctcctcgtcccagccttgcccaggggccccacttgcgcagcagctactgccagcagcactgtcttgagcacatatgaggataggatgcgtccccactgggtggcggccgctgagtccagcccacgggcccccagatcgcgttgagccttatagcaactgcaggcacttgaggtagcaggcacctggagctgcccgttcctgcagccaactcagcagcttctgctcctggcgtgctgtgttcacaccccacagtgcctccgcacgcaggccctcagggagctccaacaggggcgcgctgggcaagggtggcggtggtggcgccacaaggaagaccccatctcccagatggacagcggggaatgagacgcacagccatagaaaggcggcagcagccgtagtcagtgcggcagggcaagatgtgtaaggtggggggctgttccaggccacctggggtcaaggtgacccgacagcgcccctccaggctgtaacgcacagtggccaaggagcgctgcagatgcgactggaaccagcgcagcaccagagtagcagagaggtgacgccgcccgcgcacataccacgcagaaggcatcagcaaagggtttgcagtcccgaagccagtggccccccgaggcccccgatggtgagggtggtgccttgagggcgcacaagaagcagccgcggaaggccggggccagcgctggctcctcgcccaggctccgtggctccagcgccacaagcggcgggaggcgcagtggcaccagcacgtcgaagctgtcgggccggcggattttatgttgctcgtaggcgctgcccacctggatgaagtctccgcggaaggccaaggccagcgctcccccaggaatgagaccgggggacccccgggcgcggccagcccgcaccagctcgcccacgatccggctcacgtgcgccttgctgtggcccaacacgtgcggagacaggcgcacctcatgctcgtagtaactctccagcaggatgctgaggcccggctctcggaagtgtctcgaggagaaggcggcgtgaccctccagacggggagacccgggcaggaagcgctgccggacagcgtggcgacagcgcaggaggacatagctgaggaggagcaggacggccaccttaagcaacgggaagccgccatccacgccgtcggcgggctcggcccgggcgcccccgcttccccgcaggacatggtagaggcacaccagggcggtgcacaggccggtcaccaggggccagaagacgcgtagattgagggtgtagtgcaccgacat

SEQ ID NO: 15086 - DNA, 440 bp, Homo sapiens
  SIMILAR (32)..(250): 871254mologous to Homo sapiens potential CDS,accession number X57147,Smith-Waterman Score=323.
atacagcaagatagccaggcccctctatactctaatcaaggagacccagagggcaaatacttatctagtagaatgggaaccaggggcagaaacagccttcaaaaccttaaagcaggccctagtacaagctccagctttaagccttcccacaggacaaaacttctctttgtacatcacagagagagcaggaatagcttttggagtccttactcagactcgtgggacaaccccacaaccagtggtatacctaaaggatggggaaccaatcgagcatgactaccaacaaattatagcccagacttatgccacccaagatgatctcttagaagtccccttagctaatcctgaccttaacctatataccgatggaagttcatttgtggtgaacgggatacgaagggcaggttatgccatagttagtaatgtaactgttcttgaaa

SEQ ID NO: 15087 - DNA, 376 bp, Homo sapiens
  SIMILAR (130)..(375): 711254mologous to multiple sclerosis associated retrovirus polyprotein,accession number AF009668,Smith-Waterman Score=298.
aggccacttctgaagtccaggcactctggtccttcagtatttggatgatttacttttggctaccagttcggaagcctcatgccagcaggctactctagatttcttgaactttctagctaatcaagggtacaagtgtctaggtcgaaggcccagctttgcctatagcaggtcaaatatctaggcctaatcttagccagagggaccagggccctcagcaaggaatgaatacagcctatactggcttatcctcaccctaagacattaaaacagttgcgggggttccttgaaatcactggcttttgctgactatggatcccaggatacagcaagatagccaggcccctctatactctaatcaaggagacccagagagcaa

SEQ ID NO: 15088 - DNA, 1551 bp, Homo sapiens
  SIMILAR (2356)..(3093): 971254mologous to Homo sapiens fizzy-related protein homolog,accession number AF080397,Smith-Waterman Score=1268.
gtactctttgagacaggtgggcagataaagaacagactcagaaggggtgaagaacttgcccacgcttgcaaggttaatgagtgtcagtatggaaatgtaagcccaggtgctgtgggcgcctgtactctctctgtcacacaaccgtggtacctagaagtggactacactcatgaggccgtcaccataaagtgtaccttctccgcaaccggatgcccttctgagcaaccaacatgcctgtggtttcgctacggtgctcaccagcctgagaacctgtgcttggacgggtgcaaaagtgaggcagacaagttcacagtgagggaggccctcaaagaaaaccaagtttccctcactgtaaacagagtgacttcaaatgacagtgcaatttacatctgtggaatagcattccccagtgtgccggaagcgagagctaaacagacaggaggagggaccacactggtggtaagagaggaggcagaatggtgcactgttgtggacctcaaggatgccttattctgtattaccctgcacactgactcccagtttctctttgcctttgaggatcccacagaccacacatcccaatttacgtggacagtcttgccccaagggtttagggatagccctcacctgtttggtcagacactggcccaagatctaggacacttctcaagtccagacactctgatccttcagtatttggatgatttacttttggctaccagttcagaagcctcgtgccagcaggctgctctagatctcttgaacgttctagctaatcaaagatacagcgagatagccaggcccctctatactctaatcgaggagacccagagagcaaatactcatctagtagaaggggaaccagaggcagaaatagccttcaaaaccttaaagcaggccctagtacaagctccagctttaagccttcccacaggacaaaacttctttttatacatcacagagagagcagggatagctcttggaatccttactcagactcgtgagacaaccccacaaccagtggcatacctaagtaaagaagttgatgtagtagcaaaagtctggcttcactgtttaagggatggggaaccaatcaagcatgactgccaacaaattatagtccagatttatgccgcccgagatgatctcttagaagtccccttagctaatcctgaccttaacctatatattgatggaagttcatttgtggagaatgggatacgaagggcaggttatgccatagttagtgatgtaactgtacttgaaaactctttggcagcagtgactctccaaaaccgccaaggcctagacctcctcactgctgagaaaggaggactctgcaccttctcagggaaagagtgttgtttttacactaaccagtcagggataagttcccctctggaggacactacaactgcagggccctttcttcaccccatccagcaggaagtagctagagctatcatcggccaattcccaacagcatttggggtgtcctgtttagaggggagattgagaggtgaagccagctggacttcctgggtcgagtag

SEQ ID NO: 15089 - DNA, 1362 bp, Homo sapiens
  SIMILAR (1030)..(1272): 641254mologous to Homo sapiens potential CDS,accession number X57147,Smith-Waterman Score=226.
atggggccagagcccaaaaacactcaccctggttcctgcacctgcccactcgcatgctcctcctcccataaggggtttgagtgtttagcagtggagcaagggagctacacccctgtcgcaagtcccatagtgggggtgaaggaaaaccaggagatcctggatctgttggagctgaagtacaatcagaccaggtctgctgttaccagatgtgttctgggtgctgccagcacagctagaataaagcaggcagaagaaggtggaaggagcagacttgctgagtcttctggccttcgtcttcctttcgtgctggagcttcctgccctcgaacatcagactccaagttcttcaggttttgaactcttggacttacaccagcggcttgccacatggtctcaggccttcaactacagactgaaggataccctgttggcttccctacttttgcggttttgggactcagactggcttccttgctcctcagtttgcagttggcctatcgtgggacttcaccttgtgatcattgagcgcaactattcctatcagcagggtacagagactgttgtgagctcttgggcaacaggtgtttctgctgctgcatcagtgagcgcaactattcctatcaacagggtccaaggccattgtgggttcttgggcaagaggtgtttctattgctgcattggtgagtgcaaccattctgatcatcagggtccagggaccgttgcaggttcttgggcaagaggtgtttctgctaccgcatcgcagatccaggtagacctgggaaagttttcagatgatcctgataggtacatagatgtcctacatctcacttggagagatgtcatgctattgttagatcaaaccctggcctttaatgaaaataatgtggctttagctgcagcccaagagtttggagatacctggtatcatcgtccagtaaatgatagaatgacagctgaacaaagggacaaattccctactgacattaaaacagctgcggggattccttggaatcactggcttttgctgactatggatccccagacacagcgagatagccaggcccctctatactctaatctaggagacccagagggcaaatacttatcttgtagaatgggaaccagaggcagaaacagcttcaaaaccttaaagcaggccctagtacaagctccagctttaagcattctcacaggacaaaacttctctttatatgtcacagagagagcaaggctagctcttggagtccttactcagacctgtgggacaaccccactgtatcaggatgagctgcggaaaaaaaccctgagacaccgagatagtgaagggagtggctttaatcagctggaagcatcagcagactag

SEQ ID NO: 15090 - DNA, 5194 bp, Homo sapiens
  SIMILAR (785)..(1066): 611254mologous to Escherichia coli transmembrane protein,accession number M93239,Smith-Waterman Score=304.
ccaaggcagatttcttcagacatggtcatagagaaaaggaaataaacaggttgaggggatgagtttggaaggaaagaagactcgagttcaaatcctgggtctgcatttcctccctatacgattttgggtaagtcacttaccactcctaaacttcggtttccttttcacttaattgagaatagaaattgctatcatggagggtggctgtgatgatttagaggagataaaattatgccaagtgccagtgaaggcctgagtatgcggttggggcttagggcttagtcatccaggagagccagtggaaaggcggatgcctgctcttcgtcagtgctgcgtgaaagcagcagagacggagagttgccgctgagcagctccagccccacagctgggacttggtccctgtaagctggcatcccacctgttgtcccagagccacctgagccagtcagtgcgctcagaagcagaacagaaggcaggagcttcaccagcaagctccattcagagggaacctctcttcaaagatcaattaaaagcgccgctgccagagcaaaagcgccggtccctcttgactgtccccctcctcacttttcgggctcagaaatgtggcccaggcagcccccttgtggcacgtgggggcgccacagactcttggctggtgtctgaagaattcagactgtctgattccaccgcaccaccgactgagcttcgaggacaggaagccaccggcatcactaagccaccggcatcacttcatccccagcctcacgcttgggactgggcccggggaagggacccccgcaggcacctcttaggaaccccagagctacaggagcacagtgagaagaccaccaccgaaaccctccctgcagacatggggaaactgaggacctgggagaggaaggaggccacagcaggccaggcagcagagggagctgctgggggtattcattttgaggccacttccctcctaagacccagtagctatgtccctcaaacccaaggagctctgagcaccacctacaaggaggccaagatggacagggatcttcacctgacacccatcctggcagcccagagagccaggggccccagaatacactcctttccatccgacgaaatgatagaaccctctgaagactcatttgagacgatgatggagcataagaatccatcatcaaaacaaatggagtcctccgagggctcatccaacaccaccgaggcgacgtcgggcagtggagtgcggggagaggcagggccagccagcggcccagcccaggaaaagaaggagccccccagtggcccactccaggaaatggaagagctgcccactgatctactccaagacatggaggagccatccagtggcccacgtaaggaaatagaggatccacccaatgacctactccaagacctggaggagtcatgcaacggttcacaccaggcaaggggggatccactcagtggagcatctgataggatgaaagaagcatcagtcaacccatcgggagcccgagaagaacaagaggctcacactgacctgaaggaatcgggaagggaggagactcctcaagagcaaaaccagaccgagcactcaaccgcagaacttatggccatggtgaggtccatcatctcgctgtacttccgaatgcaagacctcaaagagcaacagagagtagcagaagagatcttgatcaaagggatcaatgcaggccaactgcccgccccaaagcacttctctggcgatcgcagagaattccacgagttcatcgtactctgccaactgaccttacagagctacccaagaatgttctataacgaccgtctgagagttggctatgtcatcaatcacctgtccggcttggcattagaatgggccaaagctctactgcaggaaaacagccccctgatcggagacttcccagccttcctggaggccatgtccgaagtgtttgagtaccgccaggcactgcgtgtggcagaagaggccatgttcaccatcaggcagggcggccgctctgccactgagtacatcgatgagttccagagcctggtacccatcttgggctggccagatgaagtcctgcaggcccacttgtgccaggggctcaacgaggagatcaggcactatctattccgggtccctcagccggattccctagacagtctgattgtgctcatcctgcaaatagaagagaagctggcagagagaagagctatgctcaggctgccccccgaggcccgcccccggaacctgacctggatcgactcacctgctccagagaggtggatggtcagcagctggttgcccagcgaagtccatccggacatcaatcgcgcccacctcttcctgctgctcatggtgagagtgaacccctaccacagcgtcgcggtccaggccctggtggattcgggagctgacggcaacttcatggatgagaagttcgcccaagagcactacgtcgagctctacgagaagccgtacccacagccggtccaatccgtggacggctcgctgattggcaacgagcctgtctggctctacacggagcccctggtgtgtatccaccagaaccaccaggagtccatcgaatttgacatcgtaccttcaccgaacttctctgtggtcctaggcatccgctggctccgagtccacgcccccgaagtcgactggatcaaaggccgctgcaccttccactctccctactgcctgaagaactgcttccgcccgcccccgccatgcattgccctagagaggcacggcatgagcctgctacccggactgccacacccatactcagacctggccgacgtgtttaacccgaaggaagcagatgatgagacttccgaccagccaagctcagacggatccgatgatctttctgaatcagagccctctgagcttcagcaggctggagacagtgatcacagcgagaccttttacgagtgtccctccaccgcgccttgggaacctgtgggtgccaggatgcaagaaagagccaggctacaggaggaatactgggacctgcaggacatgctgaccaacagacaggactacatacagatgattccggaactgtttgaccagttacacggagccgagtggttcacaaaactggagctgcgtgggaccattgtggaggaaagcgtgaacgggcaccgcaccgaagatgtgtggaaagcagcgtttggtttggagcttgaagagatgaagagctaccagccgtttgcgctctccccagaccctatcatacctcagaacgtgattcacttcatcctaaaggacatgctagggttctttgtgctttcttatggccaggaagtcctgatctactcaatgagtcaggaggagcacctccaccacgtccgccaagtcctggtccgcttccgccatcacaacgtctactgctccctggacaagagccagttccaccgccaaaccgtggaattcctgggcttcgtcgtcacccccaaaggggtgaaactgaacaagaacgtcatgaccatcataacagggtaccctacccctggctccaagctatctctgcgaaacttcatcgaattcgtcttcccctaccgccacttcgtggagcgcttcagcatcatcgcagagcccctggtgcggcagctgctgagctcctaccagttctactggggagtcgaggagcaagaggccttcgagtgcctgaagagggctttccgcaaggcgcctctcctccaccaccccaagccccagaacccattctacttggaaaccggcgtcaccggcacggccctgcacgcctccctgatccaaatcgacgaccaaaccggcaagagagcctgctgcgctttctactcccgcaacatctcccctatcgaggttgagtactctcaagcggagatgaagattcttccaatacgggctgccttcatggtgtggtgccgctacctggagaacaccgaggagcccatcatgatccttctcaacacagaggatctagcctctctgaataatgacaggctcaccgtacttctccccgggcattgggtcttcttcttctcccacttcaactttgacgtcatggagctgccagaacaagacggcggccgagctctgccacctgtgagaaacctccggtggaggagagccttccagaggaacactgccgccaggcaaaccctgctgctggcctcaaggggattccccagggatccatcgacggaatccggggaagaagagaatgaagaacaggatgagctcaatgaacagatcctacggcaagagctgctggccatgatacccatcgaccagatcctcaacagcttcctcgcccacttcagcatggcccagatcagggccgtcattctgcacttcttccgaggcctcctgtactggaagaacaccctagccctggcagccatcctcgtgctactgcgcgtgaggcaatgcctctcgctgcggccggcacccgccatgcgggtggctcggccccagccccagcgctccctacgactcatcctggattcgtccctcatcgcaggcagcagcatcacgacagccatcacccagctgctcacccagatgcccgctctcgtaggtgcaaacaccatcccagcccaggagctggctgagctgttcctgggccctggccgctggcagcgaaatgctctgcactcccaggcccaccgaggcctgcagttcacccctggcttctggctgacgctgtgtgagttcttcggtgtcagagtcaccccccaggagggccacctccctgccctgcgtcagaaccgctacctggagctgcacgtcgttggtgatgaggatgtcgtcttgcgagaagccctgcaagacgacctgcaacgttaccgtcagtgtggcctgcatgacggcctgcaagacacctcgcaggacaagcaggacaacgacgtgcaggaggccccacccagccacacagcagccacccacccaccccgcccacgccacctgatggatccccaggtcctggaattccttggtagccgcctgctccacatccacagtgcagatggccagctgcacctgctcagccgggagcaggcagccagggccctgagccagttcctgaccctgatctacaggcgggccctgcccatccccgcctgggagagccagcccagggagcaggcaaggctagaagagctgcctgatgaggacgaagatgctaacctcgactga

SEQ ID NO: 15091 - DNA, 969 bp, Homo sapiens
  SIMILAR (88)..(663): 791254mologous to Canis familiaris beta-actin,accession number AF021873,Smith-Waterman Score=787.
tcagtcgccactgccagctcgcctaccttgttcttctgccgctcctctgtcccactcctctgtccatcgcagtagaagaagagcactgcgctcgtcattgacaatggctcttgcatgtgcaaagctggctttgcaggggacgatgctccccaagccatgtttccctccaccgttgggttccccggacaccagggcgtgatggtggacatgggccagaaggactcctacgtgggcaatgaagcccagagcaagcgcagcattctgacgctgaagtaccccatcaagcatggcatcatcaccaactgggacaacatggagaagatctggcaccacttctacaatgagctgcatggggccccggagtagcagccagtgctgctgaccgaggacccactgaaccccaaggacaacagagagaaaatgactcagattatgtttgagaccttcaataccccggccatgtacgtggccatccgggatgtgctgtccctctatgcctttgggcgcaccactggcattgtcatggactgtggacacagggtcacccacacggtgcccatctacgagggctactcccttccccatgccatcctgcatctggacctgactggctgggacttgactgagtacccctgcatcctcctcttctctgagaagagctatgaactgcccgatggccaggtcatcaccattggcaatgagtggttctggtgtccggaggtgctgttccagccttccttcccgtgcatggaatcttgccgcatccaccagaccaccatcaactccatcaagaagtgtgacgtggacatccgcaaagaccaatacggtactatccggtggcaccaccatgtatccaggcattgctgacaggatgcagaaggagatcactgccttggcgcccagcaccatgaagattaagatcattgcacccccagagcgcaagttctcagtgtggatcggttgctccat

SEQ ID NO: 15092 - DNA, 451 bp, Homo sapiens
  SIMILAR (7)..(450): 991254mologous to Anolis carolinensis beta-actin,accession number AF199487,Smith-Waterman Score=777.
tttcgtcagggcgtcatggtgggcatgggccataaggactcctacgtgggcgacgaggcccagagcaagcgtggcatcctgaccctgaagtaccccattgagcatggcatcgtcaccaactgggacgacatggagaagatctggcaccacaccttctacaacgagctgcgcgtggccccggaggagcacccagtgctgctgaccgaggcccccctgaaccccaaggccaacagagagaagatgactcagattatgtttgagaccttcaacaccccggccatgtacgtggccatccaggccgtgctgtccctctacgcctctgggcgcaccactggcattgtcatggactctggagacggggccacccacacggtgcccatctacgagggctacgccctcccccacgccatcctgcgtctggacctggctggccgggacctgaccgactacc

SEQ ID NO: 15093 - DNA, 234 bp, Homo sapiens
  SIMILAR (1568)..(2710): 651254mologous to Homo sapiens high-risk human papilloma viruses E6 oncoproteins targeted protein E6TP1 alpha; putative GAP protein alpha,accession number AF090989,Smith-Waterman Score=1256.
gtgtggtcctggctgccgcggaggcaggtgccggggtctcctttgcctcaatgtgaagagcttagaaagaggaggagaggagaactcccccggccgaagatgactttgaaaaggacctggagtggttaattaatgaaaatgaaaaaagtgatgccagcataatagaggtatatattgccaacagcattcataataattatattacaaagtgctttgcaattctttaaggttttc

SEQ ID NO: 15094 - DNA, 1715 bp, Homo sapiens
  SIMILAR (191)..(1519): 951254mologous to Homo sapiens dJ206D15.3,accession number AL021068,Smith-Waterman Score=2180.
cccacgcgtccgcgcagaggcacgctgttgccatggcagtgtggtcctggctgccgcggaggcaggtgccggggtctcctttgcctcaatgtgaagagcttaaaaagaggaggagaggagaactcccccggccatctctgtgatcccagccgccgcattttacacagcatatttccttcacaaacagaaaatgaatgaaaataaagatactgattcaaagaaaagtgaagaatacgaagatgactttgaaaaggacctggagtggttaattaatgaaaatgaaaaaagtgatgccagcataatagagatggcttgtgagaaggaagagaatattaaccaagacttaaaagagaatgagacagtaatggagcacaccaaacggcattctgatcctgacaaatctttgcaggatgaggtctcaccaagaagaaatgacatcatttctgtaccaggtattcaacctttggatcccatatcagattcagatagtgaaaactctttccaggaatccaaactagaaagccagaaagacttggaggaggaagaggatgaggaagtaaggagatatattatggagaaaattgtacaagctaacaagcttctacagaatcaagaaccggtgaatgataaaagggagcgattacttaagttcaaggaccagttagttgatttggaagttcctccactagaagacactactacttctaaaaattattttgaaaacgaaaggaatatgtttgggaaactgtcacaattatgtatttccaatgattttggacaagaagatgtgctcctgtcacttactaatggaagctgtgaagaaaacaaggataggacaatactggtagagagagatggaaaatttgaacttctgaatttacaagacattgccagtcaggggtttttgcctcccattaataatgcaaatagtacagaaaatgaccctcagcagttgttacccagatcttccaactcctctgtcagtggcaccaagaaagaagattctacagcaaagattcatgctgtcactcactcatcaacaggagagccgctggcttatatcgctcagccaccactcaaccgcaagacttgtccaagctctgctgtcaactcagatcgaagtaaagggaatgggaaatctaatcacaggacacagtctgcacatatctcaccagtgacttcaacatactgtctttcccctcgacagaaagaactacaaaaacaactagaagaaaagagagaaaaactgaaaagagaggaagagcgacgaaaaatagaagaagagaaagaaaaaaagagagagaatgacatagtatttaaagcgtggttgcaaaagaaaagagagcaggtcttagaaatgaggagaattcagcgagcaaaggaaattgaagacatgaacagtagagaaaacagagatccacaacaagcttttcgattatggcttaaaaaaaagcaccgaagagcagatgaaagaaagacagacagaagaactaagaaagcaagaggaatgtttattcttccttaaaggaacagaaggccgggaaagggcctttaaacaatggttaagaaggaaacggatggaaaaaatggcagagcaacaagctgtcagagagagaactagacagctccgactagaagctaagcgttctaaacagttacagcaccacctatatatgtcagaagccaaaccttttcgttttactgatcattataac

SEQ ID NO: 15095 - DNA, 2120 bp, Homo sapiens
  SIMILAR (1169)..(1537): 891254mologous to Homo sapiens dJ206D15.3,accession number AL021068,Smith-Waterman Score=561.
cgggctatactaatgccctagatagtacactcccaatgggtagtcgtcccatgcgaggtctacactggggaactgcaatgggcccccgtatgtccaggaaaaaagacaggtgtcgtggttttcaagtgtttcagctagagttttttaacataaagttttatgtatttaaaaaaaacagtctgaagtattgtacaatataagtgctgtcttaatacaaatcactggtggaaaggagcaggacataccctcagcaaaggtcatacaatagggggtaaaacgttttgtgttcttgagggagaagtttttgcatcatgtcctggggaggtcatggacacctccgccccgacagcatgcctctgacttcttgggagcgtctaccagttgaggcaagcttgaacaagtgtcagctcccgtgctgggagacagtccttgctgatcaccttgaatgcttgaacatgctttcgtgggggctaacttttgttttctctgtagttctctttgggtgatctcatctgccttttctgcctcgaatgatgaacacccttgaaaccttggtccttccttgtctcaagaggggaaaaaaggaaattggatttcctcagggtctggggcccgggctgtggctttaaggttccgaaaactgaatgaaatccaaaacatgcttgaggggcctggtccgggggtcaatgccgaaaaagaaggttcccaataccaaaacaccttctgaagaaagtcccaggaaagctggtgtccataggttttcagcaaccatcgtgaggtccttggaatctgggtatctttttttcccccctgttgttggttatatttttaggaaaaacctttggaatcaaagaatgtctgtctcctggaggctgtctgaatgaaagccggctggcggcagacccagcacctccatgatgcaggccagctgctccacctcattctccccggggaacagggggtagcccgtgtacaactccgccgtgatgcagcccaggctccacatgtcaatggccacgtcgtaggggtggcccaggatcacttctggggatcggtagaaccggctttggatgtacgtgtatactgcggaggcaaaacaggagggaaacagagggagagaagggaaggacggtgtggagtagaaatattaatggtgggagagaggaaaatgaatgaaaataaagagactgattcaaaagaaagtgaagaatacaaagatgaatctgaaaaggacctggaggggttaactaatgaaaatgaaaaaagtgatgccagcataatagagatggcttgtgagaaggaagagaatattaaccaagacttaaaagagaatgaaacagtaatagaacacagcaaacagctttctgatcctgacaaatctttgcaggatgaggtctcaccaagaagaaatgacttcatttcggtaccgagtattcaacctttggatcccatatcagattcagatagtgaaaactctttccaggagtccaaactagaaagccagaaagacttggaggaggaagaggatgaggaagtgttacccagatcttccaactcctgtgtcagtggcatcaagaaagaagattctgcagcaaagattgatgttgtcactcactcatcaacaggagagccgttggcttatatccctccacttataagttggcttatatcccaccactcaaccgcaagacttgtccaagctctgctgccatctcagatcgaagtaaagggaatgggaaatctaatcaggacagtctgcacatatctcatcagtgacctcaacatactgtctttccccttgacagaaagaactacaaaacgagaacaaaagagagaaaagctgaaaagagaggaagagcaacagaaaatagaagaagaggaagaaaaaaagagggagaatggcatagtatttaaagcatggttgcaaaagaaaagagagcaggtcttagaaatgaggagaattcagcgagcaaaggaaattgaagacatgaacagtagagtaagtaaaacttctctgaaaaataagttcatacagatatgaaagctgaacttatttatagaagggatgggttatcatcttatttttccttcaaattaataatatacatgcttgtatatga

SEQ ID NO: 15096 - DNA, 4427 bp, Homo sapiens
  SIMILAR (1714)..(713): 881254mologous to Homo sapiens Human CXC family chemokine- like protein SEQ ID NO: 4,accession number B10492,Smith-Waterman Score=1421.
  misc_feature (1)...(4427): n = a,t,c or g
tttttttttttttttttttttttttttttttttttttttttttttggtggctcacacctttaatcccagcactttgggaggcctgggtgggcagatcaccaggtcaggagttcgagaccagcctggtcaacatggtgaancccccgtctctactaaaaatacaaaaaattagccgggtgtggtggtgagcacctgtagtcccagcttactcaggaggaggccagggagaatcgcttgaacctgggagatgggggttgcagtgagccgagatcatgccactgcaactccagccttggatgacagagcgagactccgtctcaaaacaaagcaaagcaaaacaaaacaaaatacacatagaatttgtccaagttattatcacccagggggaaaagcagattttatagtataaccgtttttaaatgaggggcctaagagagggcagtggctggttagtcctatgttagatattaacaaatacgtgtaggctggatgtggtaggtgacgcctataatcctcgcaccttcagaggccaaggtgggaggatcacttgactcaggagttccataacagcctgggcaacatagagtccgtctcctcacaagcttccattcttggctcaaggtattagagtcaggtgccaccaggtatataatgaaccggccagaatctggagaggactgcggtgactgccccctcctcaatcttgcacagcacataggaaagggctgcgggtgaggatgaagatgatggccaggaggcacaggaccggcactgtggctgatttcctggctgtgggaccagcatttttttccggctgcttctggttctccccagcctcaggcccagctgccagactgtggcccgcagtgtgaatggtggtttcattgggacgagtgagctctttgtccgaggacagtgatcctactgggagggtggggcgctgagtggactgcaaggtggacaggagcatctgggcaggggtgtggatatctgaagatgccccctctgaggcctgagaaattggggggcttggtaggaagtaaatgctttctggtgggccacaatccccgagtaagcatgtccacattctttgagatcaagacagctcatcaattcctgaacccatgggtccttgttgcccccacacacgctccaggaaaggagcctggaacctcgtgtagtatagacaccgatggtaagctctcaggtgtttccggagacgattcatgaactgaaccgatggcggggagtcggaagaaattcttttaccacaataacaacttccagtgacgctgccctcgttgccattgcctggctgagtcaggtacaccagcaggagcagaagcaggagcaggagcacgcgggacccgggccgcaagtcccgtcccatctcggggctccgcggactctgcggggatggagccacctcgctctgactcccagacatgctccggcgcgtgacgtccagctggtgtctcaatggctttcgccggggaccggaggagacggcggccggagaggaggcgcgagccagctgcaccccccggccctgctgtgccccgaccgtgcgctcagtactcggcccgcgccatgccagcctctggacgcagggaaagccgaggaggtggagctcccgcgccctgcgcccccgcactgggcccggctccgtcgagggaaggccaggaatcttggaagaaaccgaaagaaaactccggcggcgggcgaggaggggcgggaggacgacggcccgaggagccgattcggttcggttcaggaggccgcccgcctggcccgtccgccgacctgtgaggcggctgcactgccggaccggccctcctcctccgaggcactttcacttccccgatccgggcgccgcgggacccagccgcgctgcatgagcctcccgggcggcccggtggagagagtcgccgccagccccggccgcgcgcacctgcggggcagccacccgcggacgcaccgagcccggggggcgtggccgcccgctgagccggcgagggctcgggcagccctgacgtcacaaccgcacccgcgcaccctccaccgcgaggtatttaccttcgaaaagtggtggcggctgcagtctgggccggggccctgtgccgctgaagacatggagtttgtgtctggataccgggatgagttccttgatttcactgcccttctcttcggctggttccgaaagtttgtggcagagcgtggagctgtagggactagccttgagggccgctgccggcagctggaggcccagatcagaaggctaccccaggaccctgccctttgggtgctccatgtcctgcccaaccatagtgtgggcatcagcctggggcaaggggcagaaccaggtcctggaccaggcctggggactgcctggctcctgggagacaaccctccactccacctgcgagacctgagcccctacatcagctttgtcagcctagaggatggggaggaaggggaggaggaagaggaggaagatgaagaagaagagaagagagaggacgggggtgcaggcagcacagagaaggtggaaccagaggaggaccgggagctagcccctaccagcagggagtccccccaggaaacaaaccctccaggagagtcagaggaggctgcccgggaggcaggaggtggcaaggatggctgccgagaggacagggtggagaacgaaacaagaccccagaagaggaagggacagaggagtgaggctgcccccctgcacgtttcctgtctcttacttgtgacggatgagcatggcaccatcttgggcattgatctgctagtggatggagcccagggaaccgcaagctggggctcagggaccaaggacctggctccttgggcctatgctctcctctgtcacagcatggcctgtcccatgggctctggggatccccgaaagccccgacagcttactgtgggagatgcccggctgcatcggcacagctttgaagcgaagctgacaccttgcccccagtgtagtgctgtcttgtattgtggagaggcttgtctccgggctgactggcagcggtgcccagatgatgtgagtcaccgattttggtgcccaaggcttgcagccttcatggagcgggcaggagaactggcaaccctgccttttacctacaccgcagaggtgaccagtgaaaccttcaacaaagaggccttcctggcctctcggggcctcactcgtggctattggacccagctcagcatgctgattccaggcccgggcttctccagacacccccgaggcaacacgccatccctcagccttcttcgcggtggagacccctaccagcttctccagggagacgggactgccctgatgcctcctgtgcccccacatccaccccggggtgtttttggctcatggcaggattactacacatggcggggcctcagcttggactcccccatagccgtgcttctcacctacccgctgaccgtgtactacgtcatcacccacctggtgccccagtccttccctgagctcaacatccaaaacaaacagtcactgaagatccacgtggtggaggccgggaaggagtttgaccttgtcatggtgttttgggagcttttggtcctgctcccccatgtggccctggagctgcagtttgtaggtgatggcctgccccccgaaagcgacgagcagcattttaccctgcagaggttccctgacttccagtggcttttccaccccactcctggggcccctcaggacagcctggaggtgtctgtccggcctggttccggcatatcagcacggcccagctctggcactaaggagaaagggggccgcagggacctgcagatcaaggtgtcagcaaggccctaccacctgttccaggggcccaagcctgacctggttattggatttaactccgggtttgctctcaaggatacgtggctgaggtctctgccccggttacagtccctccgagtgccagccttcttcaccgagagcagcgagtacagctgtgtgatggacggccagaccattgcgttggcccactggagggggcaccagccctccccagcccaaccccttccgctccccctttcgcctcagagcggccgacaactgcatgtcctggtactgcaatgccttcatcttccacctggtttacaagccttgctcaaagggaagcggggcccgcccggcgcccgggcccccacccccatccccaactccctctgctcctcctgcccccacccgaaggcgccgaggagaaaagaaacctgggcggggggcccgccggcggaaatgaatgctgataccctagtagtccccagctcccaaacactgaaaggaaaacgtgaaaacactcaaggcctagggggaggacaggttggtaaaacatgaaaaggtaaataaaattacttgtttgaaaaaaaaaaaaaaaaaaagg

SEQ ID NO: 15097 - DNA, 2214 bp, Homo sapiens
  SIMILAR (681)..(974): 341254mologous to Rattus norvegicus SH3 domain binding protein,accession number U25281,Smith-Waterman Score=95.
atgcagcacaggctgagtggaccttctttggcaggccctgctgcaaaccaagctgatttccagggccttgataattctcagtggggaggcagcggctcagaccgaatggcaggagctatcagccccaaagtgtctgcacctcttctgaattccaatcatcagaacacccccgagttcagtgatgttattcccaaatttgaaagtgaaggtgaaaagtctgcctgtgaccacaccatcggggagcagcagcagcagcagcagcccctggcccgattccccaccaggacacttccctgggctaccggaccttcttcatcctcgtccttccaagtggactgggactacattgtggtcttgagctctcagttactagggcagctcaactgcagaagccttgcagagaagcaggcagcaggaagaagagccttagctttgggttccaattgctgccgccctctagaagctcgacaccattgggcagggtcctttaaccctgagcctcggtttccgatctgtattgtctgtctgggtattactgaccccgcgaacagccctagccgccccttcgcagcggacactgtgctcctatcaacgcacggcagcgccagctattcccaccttctgttcacgtcagactggcagcagctcacgtccctggcacctctccgatgctctgaacggcagctcccttcaacgtgcctagaaacccctctgagaggaaagaccatgctcagcagaaagcgctacaaacaccccaactacactgagcattcctcaatgcagccaccacgtctgattcacctcagtcccctacgcctgacgtcgggcccggcccagagcagtccacccccagggccagtgacatttctaataagcatttgtgatcacatgaccctcctgagcacagctgtccagtggctccctacggcccagagaatccagtccacacccctgagcctggccctcctggtcctttacgagcagacctcatgcgcctgtgtgactatgcaggcctcctcattgtttgacacaatctcatccgttatctggaactacatcgtcctgtgcattgagccagtgctcacacggaggagatgctcaggaagcctttgtggggaggtggatggatccaggcagtggatgggaaggaagtttccagtcatgattaagccaaaggaacttgggaaagaatgtccacgtcttcccatgggctacagactgtgttccacagatgctgaatccaacaagctccaacccttgcttaggttaaaaatgaacacaaatggattaactttttgccaagcaaaaggcctcagcatgaacaaccacccggtacctgtgactcctggctggagagcccagcccggcggaaactcagaaagggtgaagatgctgataggtcacaagcccctccccactgccaatggagatgccagagtgctccagcacaatggagtgtggcccaccaaagccccatttcctagcccggtggagatggccctcgctccattctacctcctctgtaccctataccaggagtcttctcccaaagcctggcagcagctgacgcctatcagcaccaaggaaccgacacagctccaccctgagcaggccatgcacctgcctctccaacacctgttggcagagccttgccctcctcacgttcatcctcacctcggccaaccatggatatttgtaataggcccaattccaacaacaaggagactgtcagaattaaaatgcttccactggtcacagcctctgttcacttgtacccagaagaggacctggtacctaataggcactgggctgtttcagcaggactggatcgcactcagtactagtcagctatacctcatacaaccttttatagatgccaaagccacattaaatgtacatacagattctgcatggaaaaaaacaagagttgttccagcaactttaaaaccaagacatagaaattgccatttcaagccagacaacctgatggttctagaagtcagagaagaaatcttgagggcccaagtgaataataaatggtgcgacgctcagaggctggcaataggggctgtcaatgaaaaaaccacctacagtggagaaaagagcagagaagcaaaacttcatgttaatctcaggcaatttggtgaagccaagagcttcatttatatttctctgctctttcagctgtcagcaaaacgcatcaatgaaacatga

SEQ ID NO: 15098 - DNA, 361 bp, Homo sapiens
  SIMILAR (3)..(359): 891254mologous to Homo sapiens HTRM clone 438283 protein sequence,accession number Y73345,Smith-Waterman Score=585.
  misc_feature (1)...(361): n = a,t,c or g
ctttggaggagtggaaatgcctgaaccctgcacagagggctttatacagggaagtgatgttggagaactacaggaacctggagtttgtggatagctctttaaaatccatgatggagttctcatcaactgggcacggtaatacaggagaagtgatccacacagggacgttgcaaatacatgaaagtcatcacactggagatttttgcttcccagaaatcaagaaagatattcatcactttgagtttcagtggcaagaaattgaaagaaatggccatgaagcacccatgacggaaaccaaagagttgacaggtagtacagaccgacgtgatcaaagacatgctggaaacaagcctattaaagn

SEQ ID NO: 15099 - DNA, 1038 bp, Homo sapiens
  SIMILAR (181)..(567): 771254mologous to Homo sapiens HTRM clone 438283 protein sequence,accession number Y73345,Smith-Waterman Score=540.
atgaaaatccacaaaagcggtggactgaaggctacaccacagctgtatgcttcccagttctctggtgttgctatactggcgacatggggtccccacagacctagaaattccagcacctctttctcaacccagagcaaattgagacgtccggatgagagttcagttgatttccaaaaactcatgttatgtaaggaagccaccaagaagagcaaagaaaaggagccagggatggcttttcctcagggacacttgattttcagtgatgtggctataaaattctctgtggaggagtggaaatgcctgaaccctgagcagagggctttatacagggaaatgatgttggagaactacaggaacctggagtctgtggatagctctttaaaatccatgatggagttctcatcaacagagcaaggcaatacagaagtgttccacacagggacattggaaagacatgatttttgcttcccagaaatcaagaaagatattcaggactttgagtttcagtggcaagaaattgaaagaaatggccatgaagcacccatgacagaaatcaaagagttaactgagttcatactggagaaaaacctcagaagtgtaatgagtgtggcaagaccttcagtcagaagtcttaccttcaatgccatcatagacttcatactggacagaaaccttacaaatgagaataatgtgacaaagtttacagttgcagatcacaacttaaaacacataggagaattcatactggaggaaaaagcatacaaatgtaaggtttgtgagaaggctttctgggataattcatgcctttcatgccaaaagagagttcacattggagagaaaccttacacagcccttgtaatgcataaggcaattcacactggagagaaaccttacacatgtaatgaatgtggcaaggcttttagtagaaaagcaaaccttgcactttatcatagacttcatactggagagaaaccttacaaatgtgaagaatgtgacaaagtttacagtcgcaggtcacaccttgaaagacataaatga

SEQ ID NO: 15100 - DNA, 1347 bp, Homo sapiens
  SIMILAR (531)..(145): 891254mologous to Escherichia coli product appears to be membrane bound,accession number X54945,Smith-Waterman Score=584.
atgacgatttcaataccactgcggaagacacaggcagcagcttctggatcggcagcaatattaaactcggcgtttggcgtacagttgccgcgtccggcagaaccacccatgatcaccagacggcgaatatacggcttgcattccgggcattgtgaaagtaacagcgcaatattggttaacgggcccgatggccaccagggtaacaggctctggtgcacgcatcagggcatcccgaatcgccagaaacgccggtatcccgagcggctttcggttgtgctcaacaaagtcgtagccagccattcccgattcgccgtgcacagatgccgcatcacgcggtgcgcgtaccagtggcacagcggccccttgggcgagcggaatctccgcattccagaaatgcagcagttgcagggcattgcgggtagttttctcaaccgagacattacccgcgacggtggtcatcagttgcaggtcgagttcgggtgcaaaaatcgcggcggcaatggcgacggcatcgtcaatgccggggctgctaatgacttaatcgacttcacgaatatcgacacgcagctctttcggcacttcgaaaacaatgttttcttcacggccttccagcggaatgcttcaccaccgcccagctgctgcaaacgtgccaccacattctgcaccagaatatccggagctcacggttttgccatgccggtgatacaggcgtttgcgccggtgctgaaactacgcaaatggctgaatccggtgtctctggtgccgggctggcagtgcgaggggagtgcgttgctgttccgccggatggcgctggttgaactggcggagtatcgcgacattatcaaactgctggggcgtcagagcgtcggcccggatgcctccggctgggtgttccgcctgacgccgtatgtgatggtgggcgtcatgctgactatcgctactgcgctgccggtggtgaccgtcggttctccgctgccgcaactgggtgatttgatcaccttactgtatctctttgccatcgcgcgtttcttctttgccatttctggtctggataccggtagcccgtttaccgctatcggcgcgagccgtgaagcgatgcttggcgtgctggtcgaaccgatgctgctgcttggtctgtgggttgccgcacaggttgccggttccaccaacatcagcaacatcaccgacaccgtttatcactggccgctgagccagagcatcccgctggtactggcgctttgtgcctgtgcgttcgccacctttatcgaaatgggcaaactgccgttcgacctggcggaagacgcagccatgcatgcatgcaggtcgcctctagacgttcatcattaa

SEQ ID NO: 15101 - DNA, 1449 bp, Homo sapiens
  SIMILAR (922)..(1038): 511254mologous to Homo sapiens Nef attachable protein,accession number AB015434,Smith-Waterman Score=90.
atgtggcgggagacgaaacgttacgcggcggtactgctgcttacgccccattatagcgcatcgttactgcctgactggctaacctgtaccttcatcaaagtggtcatcacgtacccggggtttacctcaagtttggcctcaagcaatcccatatatccctgtgtagattccgccaaaacagtgtttccaaatgctccactccatgaccgggttcagtctgtgagaagaatgggcccatttaaaggcgttttccgaaaggtcttttccaatttagggtttgagtattccctttccacgtgggccaccatggggtccccaggttccctgggggtgtctccgttcggaaagactctttttgtagaatctgcaagtggatctttggacgctttgtggcctactgtggaaaaggaaatatcttcacataaaaactaccagaagcattctgagaaacaaatttatgatgtgcgcattgaactcacaggcctcaatgcactcccaaatatctctttgaacttttacaagaacagtgtttccaaactgctcaatcgaaagaaaggtttaattcatctcctccaaccctttattttgagactatgcgtgtctctgcataaaaaccgagaagaaaacctaggcattaccattcaggatgtagccatgagactcagtgcgctccccaatatcgtttgcagactctacaaaaagactgcttccgaagtgctcaaagaatggtccactcggtgggatgaatacacacatcacaaggaagtttctcagaaagctttgcctactctttctgtgaagatctacaaaaagaatatttgccaactgctcaatcaaaacaatggtccaaatagtgaaatgaatgctctcatcacaaagaagtctgtcaaatctgcaagtggatatttggagagcattgcggccctagtggaaaaggaaatatcttcatataaaaactacacagaggcattctataatcttctatgtgatgtatacagtcatgtcacagagatgaaactttcttcgattgagcagattggaaacactctttttgtagaatctgcaagtggagtttggagagctttgaggcctcgtggaaaagaggtaaacgatattttcattgatcaaattgcaaactctgttcttgtagattcttcaaaggatatttgtaagcgctttgaggcctgtggtgctatggtgaaaaaggaaaatcttcacataaaaaccagacagaagatttctgagaaacttcattggccatttggggcaccgaggttaacaagtttaacggggcccgaaaaaacaggaaaaggggaacaccccggcgccaaagcccgcggggaactttccggagcaccaccgttaattcacaccagaaaactttctttgatgagcaatgtggaaacactgttgttggagaaactgcagggatatacgggagctcattga

SEQ ID NO: 15102 - DNA, 969 bp, Homo sapiens
  SIMILAR (325)..(504): 261254mologous to Homo sapiens Human neurofilament-H mutant protein fragment 8,accession number Y20849,Smith-Waterman Score=75.
atgacctgtgcgcagcatgcaggccgctgccagctcagccaggacctgagccgcgagcagctggctctgctgaagctggtgctgggcggggcctgtacccacagctggccgtccccgacgccttcaacagcagccgaaggactcagaccagattttccacacgcaggccaagcagggcgccgtgctgcacccacctgcgtcttcgctggcagccccgaggtgctgcacgcacaggagctgaggccagcaactgcgacggaagccgaggggtggcaaggccgcaaaccgaaaaataaaaacaggtggtgccccgcttggcgggagaagaagccctgcctgggtggtagcgcgctaaagcaaaaacgccgacgacgtatacgtgctgcccaccgggcgaagggctgctgcccgcgggaagcacctgcggggaagcagacgatgccgacgtggcgcagtgctaatgcgaggcaacaggcacggggagagcacaagcgcaactgcaaagagctcaagcgctcgcgccaggcggcggctgttgcaggactgtccatgaatactggcggtgcggatgtaacaaacaaacaaaacctgaggaggctcaacccaccggcaaatggcctgccggtgacgcgtgcgcatgctgagcgggacgtgccggggctgacacgcgaggccccgccacggcccgcgtctacgctgcgaggtgggccttcggtgcgcgccgggctacgccggcgccagcgcgcgcccaacttgcgaatgcggggacaccaggtactgcccccaagacccgaaccagacatgaagccgacctgtcccgattatagcgcatcgttactgcctgactggctaacctgtaccttcacaaaaagtggtcatcacgtacccgggtttacctcaactttggtcggtgtgctggctttcaatgaccaacacaacaaagaaaaaataattgtttctgagacttag

SEQ ID NO: 15103 - DNA, 1293 bp, Homo sapiens
  SIMILAR (279)..(374): 651254mologous to Homo sapiens PRO2379,accession number AF116699,Smith-Waterman Score=98.
ctatgtgtatccctctttaaaagtacatcttgcaagttgtctagagggtacttctgagtgttggaagctaataacaacaacaaagtcctctctagcacacatttcagaaacagaaatcttgattgtaaatgctaactgtactacagaagattttagggtgatcatacaacatttctttgtcttctgatggtcaacgcagaatttaagtacaattttaaaacaatcatctcttgagatcttctgaagaaggattctgggcaatatggacattttacaatattcttccgatccatgagcataggatgtttttccatttatttgtgcatcttcaacttctttcatcagtgttttgcagttttccttgtagagatcttcaccttcttggttaaatgcattccacaagtagattccatcgaagacaccacttttggtcatccagaagaagcaactcctcatccattcagttttttcatgagactggagcaattcagtcacatcttcagctcctggcccgtgtccttcactgcacattaaagccacgtagtattcacttgacacatattgccctaggcggtgtagaattcttaagagaacgtcgaagacacgagatgtgaccacaaccagagaaaagagttgccgagacacgcgtttcagccgctcatccctggggccccgtaaagatgccctggtaaagagttttgtaaatcgatgaagttgatccttatatttaaatctcttcagtgtggagctagaatcatgggcagtttttaaactttcctccgtttgtgtgttcctgtttgctgcgacactcttcacagtaatacttgtactcactgcatgggtttctgtgttgctgaaagcccaaattgaggtaaaccccgggtacgtgatgaccacttttgatgaaggtacaggtagccagtcaggcagtaacgatgcgctataatcggggggtctccaaggtagcaacgccattgcggcatggcgtaacatcggtgggtcgcgaagccgggttacagcaaatccacacaattccacatagaatcttgttcccgtgtgtatttgtagctcatggtcatcctgattccgatagcgaacctccagacttgatgaaaacgcccttatttcgaatttgtcattctttaatgctttcttcccgtaactcatcacaatccgctttgtgtcgctacgactcagtttctgggcgccgcgcctgcgctggtctacgtcacaccccgctgtgtagctatagtcgcgcgaaggtccgggcttctggctgcgtgaggcccccat

SEQ ID NO: 15104 - DNA, 1485 bp, Homo sapiens
  SIMILAR (259)..(999): 981254mologous to Escherichia coli caiA,accession number X73904,Smith-Waterman Score=1271.
atgcctgaccgaccgaccgcccgcgcccgcgcgcgctggcgggcgcgcgcggacccccgggccgggccccgcgggtgccaccccccgcggggggcccccggccgagccagtacgggcacggggggaggcccaacccccgacatggctggcatgatgcgttttgccccaacaatacgccataccgcgacacgacccctggacagccgctaccttacccctgggccccttgatatgcgaggggactcaggattccgaaccgggcggggctccgacgtgggtagcctgaaaccgactgatacccgtagaaatggtaagatttatcttaatggtagtaagtgttttattaccagcagcgcctacaccccgtacatcgtggtgatggcgcgcgacggggcttctccggacgaacctgtctacaccgaatggtttgttgatatgagcaaaccgggcatcaaagtgaccaaacttgaaaagctcggtctgcgtatggatagctgctgtgaaatcacctttgacgacgtggaactggacgagaaagacatgttcggtcgggaaggtaacggctttaaccgcgtcaaagaagagttcgaccatgaacgtttcctggtagccctcaccaactacggtacggcgatgtgcgcctttgaagatgcggcgcgctacgccaatcagcgcgtgcagtttggcgaggctattggtcgtttccagttgattcaggaaaaattcgcccacatggcgatcaaattaaactccatgaaaaacatgctgtatgaagcagcgtggaaagcagacaacggcaccatcacctctggcgatgcagcgatgtgcaaatacttctgcgccaatgcggcatttgaagttgtggatagcgcaatgcaggtgctgggcggtgtcgggattgcgggcaaccaccgcatcagccgcttctggcgtgatctgcgtgtagaccgcgtctccgggggatctgacgaaatgcagatcctgacgctgggtcgtgcggagcaaataatggatcatctacccatgccgaaattcgggccgttggccggattgcgcgttgtcttctccggtatcgaaatcgccggaccgtttgccgggcaaatgttcgcagaatggggcgcggaagttatctggatcgagaacgtcgcctgggccgacaccattcgcgttcaaccgaactacccgcaactctcccgccgcaatttgcacgcgctgtcgttaaatattttcaaagatgaaggccgcgaagcgtttctgaaattaatggaaaccaccgatatcttcatcgaagccagtaaaggtccggcctttgcccgtcgtggcattaccgatgaagtactgtggcagcacaacccgaaactggttatcgctcacctgtccggttttggtcagtacggcaccgaggagtacaccaatcttccggcctataacactatcgcccaggcctttagtggttacctgattggtgcctgcactgctaactga

SEQ ID NO: 15105 - DNA, 4599 bp, Homo sapiens
  SIMILAR (4599)..(3961): 1001254mologous to Escherichia coli ETHANOLAMINE AMMONIA- LYASE LIGHT CHAIN (EC 4.3.1.7) (FRAGMENT),accession number D90873,Smith-Waterman Score=1081.
tcattttagcaaacgctttctggtctgccgcagtgggcatcggctgattgcgtagcagggccactggtatctgccggtatcaccgacattaacattgaagacgacccaggcattcacgtccgccaagagaacaaaaagaaacgaaacacataacacagctggatccgctgacgtgtctgagagcctgagctccatgggcctggagagaccatgtcccgtatccatcttcctccggatggaattcttatcacgttcacccgctggtcggtgccagccactaggccgtgaactctctctttccagccgatctagaagagatggcgtcctcagcctttttttcgtcttgcgtgcgttccctcgccttcgatcacttgtctcttgttcctctggccggtgtattccccctttgtacttcctcgtgggggattcccccgggtttctcaacctgcgcttattgaggatgaagcctgaataaccgagttcgtgcgggaacccccggatcgcacccgacggtactgcggcaggtcctgaaatactaaggccaagccgatgtggggaccccattacttcggcttttccgacaggcttctctactgtgagcgccgggtcccccaccccaacaggtgagtaattataacgtaactccggtagaatcgagctcggtacctctcgttcatccactctccgatcatctcttctttcgccgttgcgaagcgtgaagagtacggcgatatggcagaacagaaatgctcgaagatcctggcattcgcacacatcatgatggtgctgaccgtaatgttcttcgtcttcagctgtgtactgagcctgactccggcagacctggctgcggctaaagagcagaacatctcgattctgtcttacctggctaaccactttaacgcaccggttatcgcgtggatggctccgattatcgcgattatcgctatcaccaaatccttcctcggtcactacctgggcgcacgtgaaggcttcaacggtatggtgattaaatctctgcgtggtaaaggtaagtctatcgaaatcaacaagctgaaccgtatcactgcgctgttcatgctggtaacgacctggattgttgccaccctgaacccgagcatcctgggtatgattgaaaccctgggcggtccaatcatcgcgatgatcctgttcctgatgccgatgtacgcaattcagaaagtaccggcaatgcgtaagtacagcggtcacatcagcaacgtattcgttgtcgtgatgggtctgattgcaatctccgcaatcttctactctctgttcagctaagtcctttcgcgccgctttcgggcggcgcttcctccgttttaacgcgatgtatttcctatgattagcgtattcgatattttcaaaatcggcattgggccttccagttctcataccgttggaccatgaagggggtaacattacggcgatctgttgccgtatgttaagagtgacccgtgtgtgcgtgtcgtcgcctcgacgggagccccctgttgctctttggtgtgggctccgggaccgggttttccccgttacgggggctcgggctcggccgctatgggcctgttggttccgcttcagtggttccggggagatttttttgttttttttggtacgtcgtttgtttatcccacgtcgctttctctgtccaaccgcagtggctttcacgtcagggacagtacgcgtctgctctacccatgtgcgtacacttgaccgtgaattccgaaggcacctgcgttgcttagaccaagaatacacagcgcggctggctgtacggtacgtaagctgcaacggtagcgcattgagaccatatgattgctgcagggggccgaaaacacgattggcatccaaattagagaaaactttcatgccaggtgcgtttcgactgctaactgacttacagccatcgtatagcgccgattttgtgtttatcggaggacgtcgcggggccggggaccgcagtgttaaagtgcgtgcaaagacatgggcacgagcacgcgtggttgaaggagagtcgccttgatgggttgtcatgggaggatggaagacgtctgccagatcagaaggaacgatactgatggtaaggtcagggggtggtaatgcgtggagtgggatgctcgtgtacggagtcccccgttcaccatttgcgtaggaggatgcgttcgtcgagtcgcacccgttcaccatttgcatacgaagatgcgttcgtcgagtggcaccggtgcacccccttacacccgtgctgcccacaccccgggcccgcgctgatgccggcggagctaggaccgacgaccctaaggagttagccacgacccgacgatacactgctcggttgttgacatatagacagtaactaagtgtgatgaaactgaaaaggatagtaatacgtaacgggcagactgaaatacgggcgtagcgtactagtactaaagaggacattgggctaaaaggagaaaggtaaggttgtatgcatgcagtacgggtgcaacaagagcgccttagactagcatgcgttacattacttgtggatatataagaaaaggctttataaaaaccaccggggtgtttaaggcagttaatgacgcggggcgaaatgagcgggaggggtaaaaacgcgataactgacatacggggagtaaaagaatagtggaagcgtaatgaacgaacaaccaaaagaacccggaataccgaacagggacgatatattaaccggaaagccgagaacttggtgaccacgggttttgatatagtacggggagtgggggggggggggggagctgccctcaccaccactgtgttacagcatttgcaagtatgccgcctacgcctgccgcggatgtaacggtttgccgccaccgccaactgcacgctggcgggcaaggtgggatacgcgaatgtgtcggattgaacgggcggctccgcggccgaggtggagccggctgcgcatccattataacttgtcaaagggatggggtaccacgggtatgtttgcccgaacctacgcgtcgggggtgagaatatggagggtttaaagcccgggagccttgccaaaatgttcaggtgtcttgtgataactcggagagacacagcgggtacttccgggatcatcaccagaatgtattgcgcggggtccacaggtggcccacggtgtagatttgagatgttgctatgttcataaatgaacttgagtccggaattccgacgctgaatgatgcctccctggcggacacggagggccttccgaggggtaacactaagaaaaataaagtccataaagggggccttcaggagattgctacggtccataccaagagccagtgaacggggacttatggggacaataaagtcgacttgaacccgagagatggtccaccagagattgcacgaaaaaaatattgaaaagctaattaagctattacggggatatcgaggtatggggggagtctttccagcacgataagaaatgaagaccacgggcaaccgggtataagtcacttcgatggtcatatgaaaatccttgggcaaacttttgctaatttccaaatgtgccgtgttgcgaagaggaatactcggcacgttatctttgccagggaatcccgggcttgaccggtccaggtcgggttgccgcagggggcccccgtaccggggccgtggtctcgtcatgacctccggttttgggtggccgggtgcatacagttggacgttgttaacgttctgagtcgagtggaagtgtagggtactagcagtgagctgaatgttggggtgctcggggactaaaaaaatatatataaaataacacgctggccgtgagcgtggccgcgtgcgtggtcgcactgtacttaaaggcatcgtatagcgccgattttgagcagggacggcagggtgccgctggtgccgggtctctgggcctgagagaaacgccagtccgtgttgggcggggcttgcgatctgatcttcaatcttcacgcgaccataacgaacaaagaatggtgtaccgactttcagcccggcctgtttcaggcccgccatcagcggtggcaggatctcttcgtagttcacggtgatcgcatcagttgacaggccatcagaaataacgacctgtacgtccggattggcaacacactgcgctttcagcgcttcaacagcttctgcacacaggcggcggcccatatccgggcgagtcaggtagagatttttgtcgctaatttcagagcgtacttccagcaagccctgcgctttcacccactcttccggcacttctttcagtacggtatctttcgaacgagagtgatcggccaggaaacgcagcagcgcctgcgtacgtggacgcggaccggcacgaccggtacaaacgcgggccacggtgctgcggcgcagttctgttaatacgtctgcgcgatgcggattttcaacaccaatccacgcttttgcttcagcggaacctaaatccagcgcacagctttccgaggtcaccggtgccgcacagttggtggtggcgcactttgcttctgacggcgcgggggccgcttgtcccattgacgccatcacgctgcgtacaatttcttcaatctgtttttgatccat

SEQ ID NO: 15106 - DNA, 2382 bp, Homo sapiens
  SIMILAR (1206)..(595): 991254mologous to Escherichia coli hycD,accession number X17506,Smith-Waterman Score=1021.
ttatgccccaatataaagttggctagattttaaaattggaatttgtctttgtaataaatagacgatctctagctcggtacccatagcttcggcaggcttgccaatcaatcgggcgattaacagactcagtacaccctgatggctgacgactaaaatattctgatagtgctgaaattcactaagccttgcgataaagcgttccacacgttgcgaaaatgcctgaaatccttcaccgttcgtggggattgcatgctgccagtcattgcaccacgcgctatagttttcggcatcttcttgcatgaggtcgcgatgatgtcgcatctcccagtcgccaaaaaacatttcgttgagttcaggtatgatttgcacggggagctggcggtcactgagaaccagtcgcgcggtatgctgtgcccgttccagttcactgcataaaaccagatcaaaggaaacaccatgtagcagcgtatgcagattttgcgcttgctcaataccgcgcgcggtcaggggggtgggcgcatgaccgctgtaaagaccatcgatattcgcttgcgtttcaccatgacgaattaaccacagtcgcatcatgccccagacgaacgctaaaaatgcaaagccaaacccagcccaggtaatgcgcggagtaatatcaagacgcagacgggccatgctgttttcgaacagcgcgataaccaggacgccgaccaccagttttacgatggcaatcaccagcgccagcagcagtccaccggcggtgaaggtttccatttgtccccacggaataaacaccccgacgaacatctgcaacaccaccagctgtttcaggctgataccccatttcatgacgccaaagccgctgccgctgtattcagagagcgggccttcctgcagctcctgctcggcttccgccaggtcgaacggcagtttgcccatttcgataaaggtggcgaacgcacaggcacaaagcgccagtaccagcgggatgctctggctcagcggccagtgataaacggtgtcggtgatgttgctgatgttggtggaaccggcaacctgtgcggcaacccacagaccaagcagcagcatcggttcgaccagcacgccaagcatcgcttcacgggtcgcgccgatagcggtaaacgggctaccggtatccagaccagaaatggcaaagaagaaacgcgcgatggcaaagagatacagtaaggaatcagctcggtacggtacgccaaatttatcggtgactttgccaaagccatgcgcccagaaagtttcctgccaggccatttcgatttttccgttagcggcaagattgtcaaaccagcgttttccttcttcgacctgttgcgaatcgagcaccagcgtaaagccggagtagctggcttttcctgacggcatggcatcgctcatcatgatgtcgcttccggcaatgcgcacattggcgtgggcgatggcggtatcgggaaattgcattccggaagggcagttctcggcgctgtcctgcgctgattttggcatttcgccgaagctgattttatagagcagttccgcgcccaacgtacctggccatgggcatatcctgtccgcgtgctgatgacttacctgaagccggtactgccgaaactgaccgagcgtgcagaagcattcctcaatacggaactgacctgggatggtatccagcaaccgctgctgggccacaaagtgaatccgttcaaggcgctgtataaccgcatcgatatgaggcaggttgaagcactggtggaagcctctaaagaagaagtaaaagccgctgccgcgccggtaactggcccgctggcagatgatccgattcaggaaaccatcacctttgacgacttcgctaaagttgacctgcgcgtggcgttttttggacttcaggtggctggagtgagccctgctcccccctggctccttcccagcctgggcatccttgagttccaaggcctcattcagctctcggaacatctcgaagcgctcacgcccacggatctgaagggtgaaatattctccatccagtggtttcttctttgcctcaaagctgttccgtcccagtagattaccactggagtcttccagtgtgatgatggtgaggatgggcctccggttcatgccgcccatgcaggaactgttacacatgtagttgtagtggatggtggtacagtcagagccaacctcaggcggctcatagggcaccaccacactatgtcgaaaagtgtttctgtcatccaaatactccacacgcaaatttccttccactcggataagatgctgaggaggggccagaccatcgctatctgagcagcgctcatggtggggccagcgcctcacaacctccgtcatgtgctgtgactgcttgtagatggccat

SEQ ID NO: 15107 - DNA, 3132 bp, Homo sapiens
  SIMILAR (1111)..(1755): 961254mologous to Escherichia coli caiA,accession number X73904,Smith-Waterman Score=1093.
atgatagagcatccccgcaggcgagacaactaccgacaaagcggccccccagttgctgataagcccacgacaaaaggcgagccgctgatcagcgatattgtttccgacgcgcaacaagctaatttactgatccctgtggatgaaacaccgcctgtcatcaacgacgaacaatccacatcaacaccgttaaccaccgctcagacgatggcgttggctgcggtggctgacaaaaatacgacaaaagacgaaaaagcggatgatctgaatgaagacgtcaccgcaagcctgagcgccctttttgcgatgttgccgggttttgacaatacgcccaaagtgactgatgcgccgtcaaccgtgttaccgacagagaaaccaacgctcttcacaaaactgacttctgagcaactcacaacagcacagcctgatgacgcccccggcacaccagctcagccattaacaccgctggtagcagaagcccagagtaaagcggaagtcatcagcacaccttcaccgccttccatctctggggtgacccggagtaaaatgcgccaacgagaatggctggttttgccgccagaggatagcctcgttatccgccggagtaacaaaaccagccagcttcccgctttcaacgttccgctaagtgcggcaaaggcagcggcatcaaagccgtggcgggcgtcgaataccgcatgccggaactcgcgcccaagtaaagtttgtagtgccgagggagaacagtggttttcagcatctggccgcggcgaaatccacagccagtcgccagcgcgtgatatggcccagatgtgcaaactggcagcagaagggcattttgccgaggcacgcgttattaatcagcgtctgatgccattacacaacaaactatttgtcgaacccaatccaatcccggtgaaatgggcatgtaaggaactgggtcttgtggcgaccgatacgctgcgcctgccaatgacaccaatcaccgacagtggtcgtgagacggtcagtggtgatgaaacctacctggaagcggcaccgcttgcggagcttcatgccccggctggaatgattttgccggtgacctccggtgattatgcaatcccggtgaccaacggtagtggtgctgtcggttcgtactcagcgatcaccgaaccgggcgcgggctccgacgtgggtagcctgaaaacgacttatacccgtagaaatggtaagatttatcttaatggtagtaagtgttttattaccagcagcgcctacaccccgtacatcgtggtgatggcgcgcgacggggcttctccggacaaacctgtctacaccgaatggtttgttgatatgagcaaaccgggcatcaaagtgaccaaacttgaaaagctcggtctgcgtatggatagctgctgtgaaatcacctttgacgacgtggaactggacgagaaagacatgttcggtcgggaaggtaacggctttaaccgcgtcaaagaagagttcgaccatgaacgtttcctggtagccctcaccaactacggtacggcgatgtgcgcctttgaagatgcggcgcgctacgccaatcagcgcgtgcagtttggcgaggctattggtcgtttccagttgattcaggaaaaattcgcccacatggcgatcaaattaaactccatgaaaaacatgctgtatgaagcagcgtggaaagcagacaacggcaccatcacctctggcgatgcagcgatgtgcaaatacttctgcgccaatgcggcatttgaaataagagggcactttaaatttcgccatattttgttcgcagaagcggaaaaattcctcttcgctcaatgtttcaccttcattcagcaccacaaatgctttgatggcttcatcgcgaatcgaatctttaatacccacaaccacgatgtcctgaattttcgggtgcgcggcgataatattttccagctccacgcaggagacattctcgccgccacgtttaatcatattgcagcggcgatcgacgaaataaaaaaagtcctattcgtcgcggtatccggtatcgcgcgagtcgtcgatatcgatgacgcggtagcacgtcatctgcacggtgtgcggcaggggattaatctaccgttacggctggaaggtgaaattgtcggcgtaattggcctgacaggtgaaccagagaatctgcgtaaatatggcgaactggtctgcatgacgcagtttaaagataaatctgcgcgttatgccgagaacatcaacgctggtctgtttgactatccggtgctgatggcagcggacatcctgctgtatcaaactaatctggtaccgttcgggaaagttgtttttctaaataacaacagatacaactgtgatatctgtctggaactgcgcgacctgctgattgcgctggaaagtcgtctgcatcaaaagcataaactggatgctgctgcacaccttcagtatgagcaagctcgcgataaagtcattaagaaaatggcagaaaacatcccagaaattctggttgatgagcttaaaaatgccgatattaatcgtcgggttaacacgctggaacttaccgataatcaaggcgaaaatcttaccttcgtattaacgctacatgacggtagcaaatgtgagttagtcgtcaatgagttgcagattgaaatgctggcgcgagcaatcattcatgcaattaataatgcggaaatgcgtgaactggcattacgtattacctcactgttagatttcctgccgttatacgacgttgactgccaggacaatggcaatctggaatatgacacctattcccaaccggaatggaaacataacttgttcgaccattatctggcggtgctttaccgctttaaagatgaaagtggcaaagaacaatttagcggcgcagtggtgaaaacgcgtgaagcaacgccggccaagcacacccacgggccgacccgcggaacggtcatgaccaggcggcaccccgtaggcaccccgtcgcaggaccacagccgggcacacctccgagggcgtgggccgtggacgcccacggggtatcacacgtgcggggaacacagaaaaggggacaaccggggggagacagaacaggtctgtctctctgcgctggtggaggcagttcctaaggcagaaacagtgtga

SEQ ID NO: 15108 - DNA, 1905 bp, Homo sapiens
  SIMILAR (886)..(1749): 991254mologous to Escherichia coli yeeF,accession number U00009,Smith-Waterman Score=1472.
atgctggcgattctgaccggtaacgttggtattaacggaggcaacagcggcgcgcgtgaaggttcatacagcttaccgtttgtccgtatgccgaccttggaaaacccgatccagaccagcatttcgatgtttatgtggaccgatgccattgaacgtggcccggaaatgacggcgctgcgtgatggtgtacgcgggaaagataagctggatgtgccgatcaaaatgatctggaactatgccggtaactgcctgattaaccagcattctgaaatcaaccgtacccatgaaatccttcaggatgataagaagtgcgagctgattgtggttatcgactgccacatgacctcatcggcgaaatatgctgacatcctgctgcctgactgcaccgcttccgaacagatggactttgcgctggatgcatcctgcgggaatatgtcttacgtgattttcaacgatcaggtgattaaaccgcgctttgaatgtaagaccatctatgaaatgaccagcgaactggcaaaacctggggttaaccacattcagaaggcgcccagaaaattagtagaccaccaagcagggaaccaccgcatttggcccctacttggaccaacaagcccctacgctgccacaacgacgcccaaattccggcaccgttacatttccacaacggccggagaaaagacttcacaagaagcacaattaacagagtggttttcagcaaggccaccaaccatctctcataagccagcactgcctcttcagcttaccctcatcactacagggcacgaggacgaagatgatagtgagatgtggtcactcaccgccttgatgggttgtcatgggaggatggaagacgtctgccagatcagaaggaacgatactgatggtaaggtagtgctgatcgcggtgattctgggcatggttgtttatggcgtatttgaaggtgaaggcgctggtacgctggcgagcactcgtccattctggtctggcgatgcgcatgttatcccgatgattaccggggcgacaatcctgtgcttctcctttaccggctttgacggcatcagcaacctgtcggaagaaaccaaagatgcagagcgcgtgatcccgcgtgcgattttcctgaccgcgctgatcggcggcatgatcttcatctttgcaacttacttcctgcagctgtacttcccggatatctctcgctttaaagatccggatgcgtcacagcctgaaatcatgctgtacgttgcgggtaaagcgttccaggttggcgcgctgatcttctccaccattaccgtactggcgtccggtatggcggcgcatgcaggcgtagcgcgtctgatgtacgtaatgggtcgtgacggcgtattcccgaaaagcttcttcggttatgtacacccgaaatggcgtactccggcgatgaacatcatcctggttggcgcgattgccctgctggcaatcaacttcgacctggtaatggcaacggcgctgattaactttggtgcgctggtggcgttcactttcgttaacctgtcggtcatctcgcagttctggatccgtgagaagcgtaacaagacgctgaaagatcacttccagtatctgttcctgccgatgtgtggtgcgctgaccgttggtgcgctgtgggttaacctggaagaaagctcaatggttctgggtctgatctgggctgctatcggtctgatttacctggcttgcgtcaccaagagcttccgtaatccggttccgcagtacgaagacagacctataaaatgctgccactggactataactgactcgctgctttactgcttccctgatctgactactgacttctgctactcctcgctgctcctgctgctcctggggctgctgctgctcctgctgaggcttctgctactgctacaactaccctga

SEQ ID NO: 15109 - DNA, 1962 bp, Homo sapiens
  SIMILAR (1314)..(1499): 931254mologous to Escherichia coli hycE,accession number X17506,Smith-Waterman Score=317.
atgactgggcgctaccacgaggttgtattgccagggcggggtgctggctatggccgttttggcgtacggggccgaacgaaggacaatagccggtacaaccggccatgccctggaacggcacccaggaacgcccgccggcaccaaggaggcgaaccgggaaagcgagccgaacaaagactgcccttaacagccttgagaaggccggatagcgaaaacaatggtgggcaagagaaagtacgtaagaagaggtgcccggctacagtgttgaggcgcatgaccgctgatatgcacgggtccacagcgggcgatcatccatacgaagaagcatacccgtttccatttgtatcagatcatccatacgaggatgcgtacccgttgtccattgtatcagatcatccatacgaagaagcatacccgttgaccatttgtatcagatcatccatacgaagaagcatacccgttgtccatttgtatcagatcatccatacgaagaagcccccgattatagcgcatcgttactgcctgactggctacctgtaccttcatcaaaagtggtcatcacgtacccggggtttacctcaatttgtggatactatacgacttctagcaaggcttgcttttcggtgtttgcttggtgtttcgttacatccgatgttccgggccgtttcagtgacgaggacgaagatgatagtgagatgtggtcactcaccgccttgatgggtgtcatgggaggatggaagacgtctgccagatcagaagtatcgatactgtgttccacgtcgtcaaaggtgattcacagcagctatccatacgcagaccgagcttttcaagtttggtcacttgatgcccggtttgctcatatcaacaaaccattcggtgtagacaggttttccggagaagccccgtcgcgcgccatcaccacgatgtacggggtgaaggtgttgaaccgcccggcaactggtacagcacataggttggtgcccccagacgtcccagtccatccacacggcggcgagagtaacaaaccccgcgtccagaccaccgtctcttcagggatcagcagactgtcgatacccatatccgccagtgctttgcaaaacgttccggacaagacacacgacatcagcaacatcaccgacaccgtttatcactgtccgctgagccagagctcccgctggtactggcgctttgtgcctgtgcgttcgccacctttatcgaatgggcaaactgccgttcgacctggcggaagccgagcaggagctgcaggaggcccgctctctgaatacagcggcagcggctttggcgtcatgaaatggaccaaagatcagctgactgtcaccgtaaaggtgcaccacctgccggaagtggtggagtttctttactacaaacaggggggctggctgtcggtgctgtttggtaacgacgaacgcaaactgaatggtcactacgccgtttactacgtgctgtcgagggagaagggcactaagtgttggattacgacagcatggattatcgtcagcgtccgcaccgaccaacgatgctgaaacctacgagttcatcaacgaactgggcgcaagaaaaacaaccgtcgtgccgattggtccgctgcacgtcacttctgagaaccgggccacttacgtctgttcgtcgatggcgaaaacattatcgaagccaataacgaatgaatacaccgtacacagtgctgaaagcagcaaccggccacgtccaaaacagcatggtagtaagttccgcatgaacgaagacaccaacgcaccgctagcgcggacccgaagaacgggcaagccaaaggaacgtaatcggtataggttgtgttgctcaaccgaaccacacactcaccgaataaccaccgcgacgtacacacaaggaataagcacacaacagagcagcgcaacacaccggaccaacaccacgcactggctactgactacagccatcgtatag

SEQ ID NO: 15110 - DNA, 1396 bp, Homo sapiens
  SIMILAR (492)..(1220): 961254mologous to Escherichia coli cadA,accession number M76411,Smith-Waterman Score=1233.
  misc_feature (1)...(1396): n = a,t,c or g
gcgcatttgaacaggataaagccgtagagtgcgattgctgtgaacaacagacgtcagtttattactcgggtcccttttattgcgttgatgaagttgaacatctctgtccgtggtgtattgcggacggttctgctgctgaaaagtttgcaggtagttttcaggatgatgccagcatagaaggtgttgaatttgagtatgatgaagaggacgaatttgccggtattaagaacacatatcctgatgaaatgctgaaagagttggttgaacgcacgccaggttatcatggatggcagcaggaattctggctcgcgcattgtggcgatttctgtgtttttatcggctatgtgggctggaatgatataaaagatcgcctcgatgaatttgccaaccttgaagaagattgtgagaatttcggtattagaaattctgatctagctaaatgcctgcaaaagggtggtcattgtcagggttatctcttccgctgtctccactgcggcaagctgagactcacctggcacggcttcaaaaacatcgataacgagcacatgtatcttgacccgatcaaagtcaccctgctgactccggggatggaaaaagacggcaccatgagcgactttggtattccggccagcatcgtggcgaaatacctcgacgaacatggcatcgttgttgagaaaaccggtccgtataacctgctgttcctgttcagcatcggtatcgataagaccaaagcactgagcctgctgcgtgctctgactgactttaaacgtgcgttcgacctgaacctgcgtgtgaaaaacatgctgccgtctctgtatcgtgaagatcctgaattctatgaaaacatgcgtattcaggaactggctcagaatatccacaaactgattgttcaccacaatctgccggatctgatgtatcgcgcatttgaagtgctgccgncgatggtaatgactccgtatgctgcattccagaaagagctgcacggtatgaccgaagaagtttccctcgacgaaatggtaggtcgtattaacgccaatatgatccttccgtacccgccgggagttcctctggtaatgccgggtgaaatgatcaccgaagaaacccgtccggttctggagttcctgcagatgctgtgtgaaatcggcgctcactatccgggctttgaaaccgatattcacggtgcataccgtcaggctgatggccgctataccgttaagcttggttttgatgataaccatgccatcagcctgttcagcgcatatgcttctctggtttacgttacccctattctcggcggctggcttgccgaccgcctgctcggcaaccgcactgcagtgattgccggcgctttagagcacatccacaacggcacctggaaatccaagctacttggaag

SEQ ID NO: 15111 - DNA, 1399 bp, Homo sapiens
  SIMILAR (899)..(1375): 931254mologous to Escherichia coli cadA,accession number M76411,Smith-Waterman Score=772.
atggcgtccgacactctgtttatgccagcaagaatcgttggtcatcgatcgactggaattgttaccacgcgcgctcgcgctcgctatttacgcctacgcggtccagctattgatcgtttgtcgcagtgcctcgtgaggataagagaaggaaaaataataaacccgtcccaaggctctccggaaaatcgtttccggttgactaacattgtacggatagccaccgtcggtgacgggggttcgcaaaaaccaagcttgaccgacgacttaacccgtcgactgtgtagtataatagatagtgatcctgtggacaaagtggtgttgggtgcacacccagcggttgcaacaccaattgcagtggtagagacagcaagttttgggcgctttgcccctgagactgtacaacaaatcaccgatgcacccgtccacggcgcccagggaaaagctgtctaccggtggatcagcgatgttccgattaggccccaatctccgttggtcctgtttaagactcttgggcggaaacccaagaatcgaaaatccacgttcagactcgaactgggttctctgctggatacaggtggtccacacaaagaagcagaccagtatatcgctcgcgtctttaacgcagaccgcagctacatggtgaccaacggtacttccactgcgaacaaaattgttggtatgtactctgctccagcaggcagcaccattctgattgaccgtaactgccacaaatcgctgacccacctgatgatgatgagcgatgttacgccaatctatttccgcccgacccgtaacgcttacggtattcttggtggtatcccacagagtgaattccagcacgctaccattgctaagcgcgtgaaagaaacaccaaacgcaacctggccggtacatgcttgtaattaccaactctacctatgatggtctgctgtacaacgccgacttcatcaagaaaacactggatgtgaaatccatccactttgactccgcgtgggtgccttacaccaacttctcaccgatttacgaaggtaaatgcggtatgagcggtgcccgtgtagaagggaaagtgatttacgaaacccagtccactcacaaactgctggcggcgttctctcaggcttccatgatccacgttaaaggtgacgtaaacgaagaaacctttaacgaagcttacatgatgcacaccgccgcttctccgcactacggtatcgtggcgtccactgaaaccgctgcggcgatgatgaaaggcaatgcaggtaagcgtctgatcaacggttctattgaacgtgcgatcaaattccgtaaagagatcaaacgtctgagaacggaatctgatggctggttctttgataatgcagccggatatatcgatacgatcacgctgggcggaccgagctga

SEQ ID NO: 15112 - DNA, 846 bp, Homo sapiens
  SIMILAR (249)..(1): 1001254mologous to Escherichia coli YafL,accession number D38582,Smith-Waterman Score=449.
atgatcggctatctcgcggctgtggatatggaaaaacagcaaatctccccggcgcaggtcgttgttcgccacaatcgttgcccggcgatagtggtacatctcattggccgtgcgcgggagcttagcctcaaggatcttgttgtaggcataaaaaaccaacccgctacagtcaaagcctttatcaggccgcgtaccgccccagacgtaaggcttgccaagctgctgctccaggcggtgaatcgccacttcgaaggcgtcgtcatcacgacgctggcccgttagtttgttggggtgaaaagtgccggtaatcggttgaaaaccatagatgagctggcaaatgaatcccgttcatccgttggcctgacgcaggccgcgttgaaaacgctggaatcaagcggagcgatacggattgaacgccgtgggcgcaatggcagttatctggtcgagatggataacaaagcattgctgactcatgtggatatcaacaacgtggtatgtgcaatgcccttgccctatacccgtttgtacgaaggcctggcgagcggattgaaagcccagtttgatggcattcctttttactatgcgcacatgcgtggcgcggatattcgcgtggagtgtctgcttaatggcgtgtatgacatggcggtggtttcgcgactagcggcggaaagttatctcccgcaaaaaggcttatgcctcgcgctgtagttggggccgcccccctacgttggcgagataccagctttagcaagtaaaggcgaagtcagagtacgtgaagcgcgtggggcatgtatagccgttcggtgattctccgggtgccgagctcgcaatcgtattcagtgtctt

SEQ ID NO: 15113 - DNA, 3443 bp, Homo sapiens
  SIMILAR (54)..(3374): 1001254mologous to Homo sapiens DNA polymerase-delta catalytic-subunit,accession number M80397,Smith-Waterman Score= 5789.
agtcaggggtcacggcggcgtaggctgtggcgggaaacgctgtttgaagcgggatggatggcaagcggcggccaggcccagggcccggggtgcccccaaagcgggcccgtgggggcctctgggatgatgatgatgcaccttggccatcccaattcgaggaggacctggcactgatggaggagatggaggcagaacacaggctgcaggagcaggaggaggaggagctgcagtcagtcctggagggggttgcagacgggcaggtcccaccatcagccatagatcctcgctggcttcggcccacaccaccagcgctggacccccagacagagcccctcatcttccaacagttggagattgaccattatgtgggcccagcgcagcctgtgcctggggggcccccaccatcccgcggctccgtgcctgtgctccgcgccttcggggtcaccgatgaggggttctctgtctgctgccacatccacggcttcgctccctacttctacaccccagcgccccctggtttcgggcccgagcacatgggtgacctgcaacgggagctgaacttggccatcagccgggacagtcgcggggggagggagctgactgggccggccgtgctggctgtggaactgtgctcccgagagagcatgtttgggtaccacgggcacggcccctccccgttcctgcgcatcaccgtggcgctgccgcgcctcgtggccccggcccgccgtctcctggaacagggcatccgtgtggcaggcctgggcacgcccagcttcgcgccctacgaggccaacgtcgactttgagatccggttcatggtggacacggacatcgtcggctgcaactggctggagctcccagctgggaaatacgccctgaggctgaaggagaaggctacgcagtgccagctggaggcggacgtgctgtggtctgacgtggtcagtcacccaccggaagggccatggcagcgcattgcgcccttgcgcgtgctcagcttcgatatcgagtgcgccggccgcaaaggcatcttccctgagcctgagcgggaccctgtcatccagatctgctcgctgggcctgcgctggggggagccggagcccttcctacgcctggcgctcaccctgcggccctgtgcccccatcctgggtgccaaggtgcagagctacgagaaggaggaggacctgctgcaggcctggtccaccttcatccgtatcatggaccccgacgtgatcaccggttacaacatccagaacttcgaccttccgtacctcatctctcgggcccagaccctcaaggtacaaacattccctttcctgggccgtgtggccggcctttgctccaacatccgggactcttcattccagtccaagcagacgggccggcgggacaccaaggttgtcagcatggtgggccgcgtgcagatggacatgctgcaggtgctgctgcgggagtacaagctccgctcccacacgctcaatgccgtgagcttccacttcctgggcgagcagaaggaggacgtgcagcacagcatcatcaccgacctgcagaatgggaacgaccagacccgccgccgcctggctgtgtactgcctgaaggatgcctacctgccactgcggctgctggagcggctcatggtgctggtgaacgccgtggagatggcgagggtcactggcgtgcccctcagctacctgctcagtcgtggccagcaggtcaaagtcgtatcccagctgttgcggcaggccatgcacgaggggctgctgatgcccgtggtgaagtcagagggcggcgaggactacacgggagccactgtcatcgagcccctcaaagggtactacgacgtccccatcgccaccctggacttctcctcgctgtacccgtccatcatgatggcccacaacctgtgttacaccacgctccttcggcccgggactgcacagaaactgggcctgactgaggatcagttcatcaggacccccaccggggacgagtttgtgaagacctcagtgcggaaggggctgctgccccagatcctggagaacctgctcagtgcccggaagagggccaaggccgagctggccaaggagacagaccccctccggcgccaggtcctggatggacggcagctggcgctgaaggtgagcgccaactccgtatacggcttcactggcgcccaggtgggcaagttgccgtgcctggagatctcacagagcgtcacggggttcggacgtcagatgatcgagaaaaccaagcagctggtggagtctaagtacacagtggagaatggctacagcaccagtgccaaggtggtgtatggtgacactgactccgtcatgtgccgattcggcgtgtcctcggtggctgaggcgatggccctggggcgggaggccgcggactgggtgtcaggtcacttcccgtcgcccatccggctggagtttgagaaggtctacttcccatacctgcttatcagcaagaagcgctacgcgggcctgctcttctcctcccggcccgacgcccacgaccgcatggactgcaagggcctggaggccgtgcgcagggacaactgccccctcgtggccaacctggtcactgcctcactgcgccgcctgctcatcgaccgagaccctgagggcgcggtggctcacgcacaggacgtcatctcggacctgctgtgcaaccgcatcgatatctcccagctggtcatcaccaaggagctgacccgcgcggcctccgactatgccggcaagcaggcccacgtggagctggccgagaggatgaggaagcgggaccccgggagtgcgcccagcctgggcgaccgcgtcccctacgtgatcatcagtgccgccaagggtgtggccgcctacatgaagtcggaggacccgctgttcgtgctggagcacagcctgcccattgacacgcagtactacctggagcagcagctggccaagcccctcctgcgcatcttcgagcccatcctgggcgagggccgtgccgaggctgtgctactgcggggggaccacacgcgctgcaagacggtgctcacgggcaaggtgggcggcctcctggccttcgccaaacgccgcaactgctgcattggctgccgcacagtgctcagccaccagggagccgtgtgtgagttctgccagccccgggagtctgagctgtatcagaaggaggtatcccatctgaatgccctggaggagcgcttctcgcgcctctggacgcagtgccagcgctgccagggcagcctgcacgaggacgtcatctgcaccagccgggactgccccatcttctacatgcgcaagaaggtgcggaaggacctggaagaccaggagcagctcctgcggcgcttcggaccccctggacctgaggcctggtgaccttgcaagcatcccatggggcgggggcgggaccagggagaattaataaagttctggacttttgct

SEQ ID NO: 15114 - DNA, 684 bp, Homo sapiens
  SIMILAR (325)..(429): 1001254mologous to Homo sapiens DNA polymerase delta,accession number M81735,Smith-Waterman Score=195.
  misc_feature (1)...(684): n = a,t,c or g
atgatcacacttgctggcccatgtctgttaaggcccgaggaccgctnagaccctggggcagacagacgtggttcagtctggggactcagcgatcttcgaaatacctataatgcgttatacttaacacattcgggacgcctcagtgaatgccccacaccagcaaacgaggaaaaagagccgaccaatcacaaccgaacgctaacaaaccaaacacagaaagagaaaaaaaagacaagaacgaaggactgcaccacaaggaacaagaacagcacacgtcccggatcggggataatagccggaccctcttactatactgtagcaggtccaccatcagccatagatcctcgctggcttcggcccacaccaccagcgctggacccccagacagagcccctcatcttccaacagttggagattgaccattatgtggctggtcttactcatgaagtaatgtcactaagtcaccttactcttgttatgcgctggggatcggtatcggcggcacacttggcgcactgggcgcgttgtcgatggatatcaacagagctgacacccaattcgataaccagcacctcttctcctctaaaggattgcagctcctctccagcaatggaacaaagctggttggagaatgactttgatgagctgacagaggacaaaaaaacatgtctctgtgaccattga

SEQ ID NO: 15115 - DNA, 587 bp, Homo sapiens
  SIMILAR (3)..(587): 931254mologous to Escherichia coli K12 aspartokinase I, homoserine dehydrogenase I,accession number AE000111,Smith-Waterman Score=938.
gtgatggtatgcgcaccttgcgtgggatctcggcgaaattctttgccgcactggcccgcgccaatatcaacattgtcgccattgctcagggatcttctgaacgctcaatctctgtcgtggtaaataacgatgatgcgaccactggcgtgcgcgttactcatcagatgctgttcaataccgatcaggttatcgaagtgtttgtgattggcgtcggtggcgttggcggtgcgctgctggagcaactgaagcgtcagcaaagctggctgaagaataaacatatcgacttacgtgtctgcggtgttgccaactcgaaggctctgctcaccaatgaagaactggcgcaagccaaagagccgtttaatctcgggcgcttaattcgcctcgtgaaagaatatcatctgctgaacccggtcattgttgactgcacttccagccaggcagtggcggatcaatatgccgacttcctgcgcgaaggtttccacgttgtcacgccgaacaaaaaggccaacacctcggcgatgggatactaccatcagttgcgttatgcggcggaaaaatcgcggcgtaaatttctctatgaacacaac

SEQ ID NO: 15116 - DNA, 835 bp, Homo sapiens
  SIMILAR (3)..(761): 881254mologous to Escherichia coli K12 aspartokinase I, homoserine dehydrogenase I,accession number AE000111,Smith-Waterman Score=1083.
acatggtgctgatggcaggtttcaccgccggtaatgaaaaaggcgaactggtggtgcttggacgcaacggttccgactactctgctgcggtgctggctgcctgtttacgcgccgattgttgcgagatttggacggacgttgacggggtctatacctgcgacccgcgtcaggtgcccgatgcgaggttgttgaagtcgatgtcctaccaggaagcgatggagctttcctacttcggcgctaaagttcttcacccccgcaccattacccccatcgcccagttccagatcccttgcctgattaaaaataccggaaatcctcaagcaccaggtacgctcattggtgccagccgtgatgaagacgaattaccggtcaagggcatttccaatctgaataacatggcaatgttcagcgtttctggtccggggatgaaagggatggtcggcatggcggcgcgcgtctttgcagcgatgtcacgcgcccgtatttccgtggtgctgattacgcaatcatcttccgaatacagcatcagtttctgcgttccacaaagcgactgtgtgcgagctgaacgggcaatgcgggaagagttctacctggaactggaagaaagcttactggagccgctggcagtgacgggaacggctgcccattattttcggtgggtagtgatgggaatccgccaccttgcggggggatctcgccgaaattcttttgccgcactggccccgcggccaatatcaaaatttgtcgccctttgctcagggattcctttttgagagaaacttgcgagcctggcaagccttgggaattgtgccgtcgttttaccacgggggggact

SEQ ID NO: 15117 - DNA, 1513 bp, Homo sapiens
  SIMILAR (629)..(1309): 991254mologous to Escherichia coli K12 aspartokinase I, homoserine dehydrogenase I,accession number AE000111,Smith-Waterman Score=1135.
ccctaattaaagctaggtacccgccaatctttacatggagctgaaggcatgcttcactggcgctatgagaaaggcgaactggtggtgcttgggcacaacctggccgtctcctactttatcgcgctggctgccagtttacgcgccgattgttgcgagatttggacggacgttgacggggtctatacctgcgacccgcgtcaggtgcccgatgcgaggttgttgaagtcgatgtcctaccaggaagcgatggagctttcctacttcggcgctaaagttcttcacccccgcaccattacccccatcgcccagttccagatcccttgcctgattaaaaataccggaaatcctcaagcaccaggtacgctcattggtgccagccgtgatgaagacgaattaccggtcaagggcatttccaatctgaataacatggcaatgttcagcgtttctggtccggggatgaaagggatggtcggcatggcggcgcgcgtctttgcagcgatgtcacgcgcccgtatttccgtggggctgattacgcaatcatcttccgaatacagcatcagtttctgcgttccacaaagcgactgtgtgcgagctgaacgggcaatgcaggaagagttctacctggtaactgaaagaaggcttactggagccgctggcagtgacggaacggctggccattatctcggtggtaggtgatggtatgcgcaccttgcgtgggatctcggcgaaattctttgccgcactggcccgcgccaatatcaacattgtcgccattgctcagggatcttctgaacgctcaatctctgtcgtggtaaataacgatgatgcgaccactggcgtgcgcgttactcatcagatgctgttcaataccgatcaggttatcgaagtgtttgtgattggcgtcggtggcgttggcggtgcgctgctggagcaactgaagcgtcagcaaagctggctgaagaataaacatatcgacttacgtgtctgcggtgttgccaactcgaaggctctgctcaccaatgtacatggccttaatctggaaaactggcaggaagaactggcgcaagccaaagagccgtttaatctcgggcgcttaattcgcctcgtgaaagaatatcatctgctgaacccggtcattgttgactgcacttccagccaggcagtggcggatcaatatgccgacttcctgcgcgaaggtttccacgttgtcacgccgaacaaaaaggccaacacctcgtcgatggattactaccatcagttgcgttatgcggcggaaaaatcgcggcgtaaatttctctatgaacacaacacttttgtgtctcctcacatccgccccctcatcgaacggcgaggacgatccagtacacgagacaaatggtgtgcacggccgagcacggagagacaacaggacaatagcgctgctcgaatactgtcgtgtcagcagggaaatacgagcttcgagcacactagtagcattcgtgtcggaacgaccaattccctcaacgtactctga

SEQ ID NO: 15118 - DNA, 478 bp, Homo sapiens
  SIMILAR (198)..(305): 1001254mologous to Homo sapiens low affinity sodium glucose cotransporter SAAT1,accession number U41897,Smith-Waterman Score= 172.
agaagagagtgaagagagtaaaaatcgttttgtgaggctatatggaaggtattactctggggccatctcagtggattcttgaagggtaagtaggagtctatcagaaaaagaagggttgagtagagtggacattggggcagagaagccagtggcctcaaatgcatgtttctttctcatcctgactgttccctttttaggcagacatatttgctggagccatattcatcaagctggccttgggattggacctttacctggcaatcttcatcctcttggctatgactgctgtttacaccaccactggtaagtatgttgcatattttgctcactcaggctatcttttgctgatcccaccccaacctgcaattagcattctcagtgttaaccttgtcactgccgaggtaaaggcaccatttcatttccactatgagagtcaagcacagcaccagaaacacaactagaccatacaacacagaat

SEQ ID NO: 15119 - DNA, 1981 bp, Homo sapiens
  SIMILAR (980)..(1981): 641254mologous to Homo sapiens dJ90G24.4 (SAAT1 (low affinity sodium glucose cotransporter (sodium:solute symporter family))),accession number AL008723,Smith-Waterman Score=870.
aggctgatcattaacccagaacttatataaagatggctcatgcgtggaatgggtatagcactgcctgcagccatggccagtacggttagccccagcaccatagctgagaccccagagccacctccattgtctgactggccagagcctctggggtgtctgggtgcacttgctggggcttgaccctcacctgtcttcccttctgctcagcatctgtctattttcaagaagtctgatttggatcttttaactccaaccctagtctgttctcttgcattccagatgggcgcctctctctttgccagtaacatcggcgtcatagaaggagaaggtccacaagccaagcctctttaatgtctcactgtctcttattttgaaatgctgaataatctgaacgcacagggccctaagggtaagttaagtccctgtcaatgtctgtctctgcaggtgatgaccatgccggaatatctcaagaagcggtggacattggggcagagaagccagtggcctcaaatgcatgtttctttctcatcctgactgttccctttttaggcagacatatttgctggagccatattcatcaagcaacccagtggtgaaggtaaatacatgaggacacatggataaaatgccctggttcttttctttctctcactagggggcttggaagtagtcatcataaacattggatgtcttagatttcagtaagacatctcattttactctgatgcctttttagcatttaacgaagttggaggttatgagagctttaccgagaagtacgtgaatgccaccccatccgtagtcgagggggacaacttgacaatcagtgccagttgctacacacctcgggcggactccttccacatcttccgagatgctgtgactggaaagggacgctgactgcctttgaaatcatcccctggcttgtttcatgagtgtgtcacgttctcccggcaggtcattgtgcagcgctgcctggtgtggcaaggacatgtctcacgtgaaggccgcttgcattatgtttctctttgtttaatggttgttggttttgcctatttgggcctcattggactcacttctgaattcttccccagatatggtagcatgtgtggtaccttctgaatgcgtgatttcaaccctctctggtttagcaaggcagtgtccagccactaaccagtgcttgtaccctttcccggctccaggactgcgaggcctgatgctttcggtcatgctggcctctctcatgagctccctgacctccatcttcaacagcgccagcactagaactaaagcacaatggaagtaactatagtgcttttgtttaatgtttaaattatgttgttttcttctcaggatatttgttcttctattaactgttgtgagcattgtgtgggtcccactggtacaagtttctcaaaatggacaactaatccattacacagaatcaatttaatgatgacttacttgaataagcttctcatattttctaaacattctgattttcttcttgcttcttttgcagggagcattctggggtctaatggttggacttgcaatgggcctcattcgtatgataacagagtttgcttatggaacagggagttgcttggctcccagtaactgtcccaagattatctgtggagtgcactatctgtacttttccatcaaggtaccattctattatactattgcaaacatttgcctattactaatgcacttttgtatggtccctgttcagctgtaccgcctgtgctgggttcttcggaacactacactgacaaggatttctagttcctttgtgatctagatcttctgcaatcatttgcttatctttgttccagattatcctgagaaatcacgtggatgcctcaagaaagcttatgacttgttctgcggtttgcagaagggacccaagctaaccaaggaggaggaggaagccttgagcaagaagctcacagacacgtctgagaggccctcgtgg

SEQ ID NO: 15120 - DNA, 1392 bp, Homo sapiens
  SIMILAR (145)..(741): 981254mologous to Escherichia coli branching enzyme (EC 2.4.1.18),accession number M13751,Smith-Waterman Score=1090.
atgccacgaaacgactgggcagacatcgcggaaatgatcgttccactcggcaaacagcggcgggaaatttcccacctgataaccaccaggagcgatatcccacggtttacaactatggtcgccgtgaagtcagtaacttcctcggtcggtaacgcgctttactggattgaacgttttggtattgatgcgctgcgcgtcgatgcggtggcgtcaatgatttatcgcgactacagccgtaaagagggggagtggatcccgaacgaatttggcgggcgcgagaatcttgaagcgattgaattcttgcgtaataccaaccgtattcttggtgagcaggtttccggtgcggtgacaatggctgaggagtctaccgatttccctggcgtttctcgtccgcaggatatgggcggtctgggcttctggtacaagtggaacctcggctggatgcatgacaccctggactacatgaagctcgacccggtttatcgtcagtatcatcacgataaactgaccttcgggattctctacaactacactgaaaacttcgtcctgccgttgtcgcatgatgaagtggtccacggtaaaaaatcgattctcgaccgcatgccgggcgacgcatggcagaaattcgcgaacctgcgcgcctactatggctggatgtgggcattcccgggcaagaaactactgttcatgggtaacgaatttgcccagagccgcgagtggaaccatgacgccagactcgactgtacaaaaaaaagcaaaagacaagagaagaaaaccaaacgcacaaacagaaaacaacacaaacgaatgctgacagaggcggccaagagctcccccatcaaggaggcgccaaccaccggtttcaaacaacttctccgaccggtttattacccacccaaatttacccgaccgaatttatttcccaaaacgttgggcaaccattgcctgactattaatgaaacgctgcccgccaatggcatcactgctatctttggcgtctccggtgccggaaaaacttcgctgattaacgccatcagtggactgacgcgcccgcaaaaagggcggattgtcctcaatgggcgggtactaaatgatgccgaaaaaggtatctgcctgacgccggaaaagcgtcgcgttggctatgtttttcaggatgcgcggctgttcccgcattacaaagtgcgtggcaatctgcgctacggcatgtcgctcatgaacgattacctgcgcaaacagataatcgacatcagcacgcggatcgctggaacggctaataatggcgactttactggtcagtggattaccgccgccaataccgtcaatttccagatcgttaccggaacccataattgccatcaatattttatcgcgctgcgtttgatcttcgggtaa

SEQ ID NO: 15121 - DNA, 1523 bp, Homo sapiens
  SIMILAR (708)..(1523): 891254mologous to Bacteriophage N15 gp4,accession number AF064539,Smith-Waterman Score=1224.
atgttttgctccgctcatgtgtaatcaacaccatgttaattcatggcgtggattaaatcaccattatggtgatggaaaaaatccacatgttgtttaccatgcatggagcggagggttttatgagcagcatttctgaaagaattaaatttttactggcaagggaaggcttgaagcagcgggatttggctgaggctttgtcgactagcccacagaccgtcaacaactggataaaaagagacgcgttaagtcgtgaggcggcgcatcaaatatctgaaaaattcggttattctcttgactggttattaaatgaagagggttctccaaagaaggatctggagagcaacatcccgccagagtctgagtggggaactgtcgacgcttgggacaaaaatacccccctacctgacgatgaggtggaagtaccgtttctgaaggatatcgagtttgcgtgtggtgatggacgagtacacgatgaggatcacaacggttttaaattgcgcttttcaaaagcaacgctccgtcgagttggagccaatagtgatggttctggtgtcctgtgttttcctgcatcaggagacagtatggagccagtcattcctgatggtgcaactgtagctgttgatactggtaataagcgagttattgacggcgaactctacgccatcaaccagggagatctgaagcgcatcaagcaactttatcgcaaaccaggcggaaaaattctaatcagaagcattaatcgtgattatgacgacgaagaggccgatgaggcagatgtcgagataatcggttttgtgttctgcgtgatggagcagatgaaaatgctcgataccctgcaaaatacccagctccagagcgcgatagtgaaggctatgtatgccgctaccatcgagagtgaactggatacccaatcggcgatggactttattctcggcgcggataataaagagcagcagagcaaacttacgggctggctcggtgaaatggcgtcctattactcagctgcgcctgttcgcctgggtggggcaagggttccacacctgttgccgggtgattctctcaaccttcagtcggcgcaggataccgataacggctactcgacttttgaacagtccctgctgcgttatattgccgctgggcttggtgtgtcgtatgagcagctttcgcgaaactattcgcagatgagctactcgaccgcacgcgcaagtgctaacgagtcctgggcgtactttatggggcgtcgcaagtttgtggcatcccgacaggcctgtcagatgtttctttgctggcttgaagaggcgattgtccgccgcgtggtcacgcttccttcgaaagcccggttcagtttccaggaggcgagaacagcctgggggaatgccaactggattggctctggtcgaatggcaattgacgggctgaaagaggtacaggaggccgtcatgctcattgaggcaggtctcagcacgtatgaaaaagagtgcgccaaacgcggtgatgattatcaggagatttttgcccagcag

SEQ ID NO: 15122 - DNA, 1872 bp, Homo sapiens
  SIMILAR (618)..(4): 961254mologous to Escherichia coli enterochelin esterase,accession number J04216,Smith-Waterman Score=1076.
ttaacacgccagttcgtgggcccggtgcgtggtgtcgaaagcgtcgatcaacacatacacggcggaagaaagttgctgacgatggttcagcgaagtcagcactggccagacgggcatactttgcgcccaaaattcgccatcgagcaaaactgccagcgggcgttcttctgctgttgcatcgccggtggtaaaaatccatacacgccgtgactttttcaaccgttcacttttccagataatttctttggcaggtatttctggcgcttgcggacaatcccatcccggttgcagaggcgcttgcggcatttcgagtgcagaaacagcgtgccctcgcccgcctttccagctttgtaggttcagcggatcggctatcgcctggggtaatagttttcgccagccttcgcgcaattcgaggcgatcgggggatggtacagaaaaaatgtcatcgcgttcggtgggaataaagcagtagctgccgcgccagttggcattgagttgtgtcgtccactgccagacgttagtgcctgcaattcgctgcatcgactggggctggctgttctgatggtgatcggtcacaccagtgatgtagacccatacacggttaatcaacgagtatttgcatggagagtctactctagaggatccccgttcaatattgatattgccgtatcctacagaagggacgatttgtcgggtgacggtgccttccaatgcacaactactggaaatagcaatagcaccggttatcgccagcgcgcgatggcaagaatgcggcataaaataacgcacattaattgccccgcctttctgcgctggagaaataagcacaggtttagggataaccatattactgacatcacctaagcccattgctttacccgcttgtagacggatagattcaatgcgggctaataatgctttgtcggcatccagttccgccggtaattcataacctgtttttcccagatattcagccggaataatgacgactggcatcgccatatcgatacaggtcaccgggacatcgtcaaaataatcaatctgattatcagtcgggaaaacttttccggttttggttccagcggcattcaggaaagtgagcgcaaccggtgcggcagtacccggtacgccgtcaattctggcgctaccctcgtactcgacaacaccatttggcgtttgcacatcagcttcgatgaacgtacccgtattgacgttgcggatacgtacgcgagtaactggcgaagtcgctgcaatcaaaccattttcaatggcgaatgccccaacaccagacagcatattgccgcagttaggcgtggtatcgacacgttgctcatgaacgattacctgcgcaaacagataatcgacatcagcacgcggatcgctggaacggctaataatggcgacgccagtatgactaagcccgcgaccagagatcatcggaatatagccgccgcaggctgcgaccatcggccccaacatcagcgaagtcacatcgccgacgccaccggtggagtgtttatcaacaatcgggccattcagatgcaggcttttccagtcgagaacggttcctgaatctcgcatcgccatggtcagcgagacacgctcaggcattgtcatatcgtggaagaaaatggtcatcgcgagggcggcaatctgcccttcggagatagtgttgtcgcgaataccgttgataaagaaacgaatttcttcatcgctcagcgcatgaccatcacgttttttacgaataatttcgtcgccgtgacccagcgctttcagcaggcttgccagcaggctggaagcgccaaagcggtagtgacggggatcctctagaggcgacctcacactgcaatcatatcccttccccaactccat

SEQ ID NO: 15123 - DNA, 1353 bp, Homo sapiens
  SIMILAR (850)..(1203): 1001254mologous to Bacteriophage phi-80 cI gene (AA 1 - 236),accession number X13065,Smith-Waterman Score=634.
atgggtaagatcatgagttcataccagcatgtagatctaattgtggattgtgactttgaggcataccatagacagccctcgagtggcaccaagagtgtggtaacagggcccagtgcacaggctttgatcacagagaagattgtgacataccactgggaccagcacgtaggtgatgtgcttgttctgaatatttattgcgtgattaatgtgctggatcacaccgtgaaagctgtaatcgatgaccgctttatgggcggcataaccacgataaacctccagttgatggccattatcgtgcgttatttcttcgcttccggtagtgcctatatcgttgctatgttaccggtatttgccatgctggcgaacgtctccggcgcaccgttaatgttaaccgcgctggcactgttgttctccaactcctatggcggcatggttactcactatggcggcgcggcaggtccggtcatctttggcgtgggttataacgatattaaatccttgtgcttcgatgaacgtacccgtattgacgttgcggatacgtacgcgagtaactggcgaagtcgctgcaatcaaaccattttcaatggcgaatgccccaacaccagacagcatattgccgcagttaggcgtggtatcgacacgttgctcatgaacgattacctgcgcaaacagataatcgacatcagcacgcggatcgctggaacggctaataatggcgactttactggtcagtggattaccgccgccaataccgtcaatttccagatcgttgccggaacccataattgccatcaatattttatcgcgctgcgtttgatcttcggcattttgaagtatatacaggaccgagcaagggaaggcttgaagcagcgggatttggctgaggctttgtcgactagcccacagaccgtcaacaactggataaaaagagacgcgttaagtcgtgaggcggcgcaacaaatatctgaaaaattcggttattctcttgactggttattaaatggagagggttctccaaagaaggatctggagagcaacatcccgccagagtctgagtggggaactgtcgacgcttgggacaaaaatacccccctacctgacgatgaggtggaagtaccgtttctgaaggatatcgagtttgcgtgtggtgatggacgagtacacgatgaggatcacaacggttttaaattgcgcttttcaaaagtggatccagccacgggtgggatgctaacagggatgaggatgactcttgtacctggactcagtataatagggggatcctctagagtcgacatagaaacaaatacgccctcggaaaatccagagggcgtcgggcaattaaaccggtgttag

SEQ ID NO: 15124 - DNA, 1725 bp, Homo sapiens
  SIMILAR (1078)..(1722): 961254mologous to Cloning vector pBACe3.6 levansucrase,accession number U80929,Smith-Waterman Score=1063.
atgcaactaaaagcaggctcccagtttctggacccttctgagaacctgatagaaacattgaagctggatgagttcccccagagccttctcatcctcaacctgtctggaaacagctgcaccaaccaggatggctaccgcgctcacctccgccgcctgccgcctgccgccagccgccgggtctggctcgccctgggctcctgccccttaccgctggagagctcgccggcgcacagggcctatgagcgaccgtcagtagcgcaccagccagccgtgcccggagcccgccgcagcctcgaggtaggagcgcgggtcggggtggccagggaatgtcaggttctgatgccagtgattggaaagaaatggcgggattttgccgatttcggaaccaccatcaaacaggattttcgcctgctggggcaaaccagcgtggaccgcttgctgcaactctctcagggccaggcggtgaagggcaatcagctgttgcccgtctcactggtgaaaagaaaaaccaccctggcgcccaatacgcaaaccgcctctccccgcgcgttggccgattcattaatgcagctggcacgacaggtttcccgactggaaagcgggcaggattttgccgatttcggaaccaccatcaaacaggattttcgcctgctggggcaaaccagcgtggaccgcttgctgcaactctctcagggccaggcggtgaagggcaatcagctgttgcccgtctcactggtgaaaagaaaaaccaccctggcgcccaatacgcaaaccgcctctccccgcgcgttggccgattcattaatgcagctggcacgacaggtttcccgactggaaagcgggcactggaaaccaaaagcaagacgcagcaccagcgctcacctccgccgcctgccgcctgccgccagccgccgggtctggctcgccctgggctcctgccccttaccgctggagagctcgccggcgcacagggcctatgagcgaccgtcagtagcgcaccagccagccgtgcccggagcccgccgcagcctcgaggtaggagcgcgggtcggggtggccagggaaggggatcctctagagtcgaaccgggggtcagcacccaaaacagaaaccggataccaaggcgaagaatctttatttaacaaagcgtactacggcggcggcacgaacttcttccgtaaagaaagccagaagcttcagcagagcgctaaaaaacgcgatgctgagttagcgaacggcgccctcggtatcatagagttaaataatgattacacattgaaaaaagtaatgaagccgctgatcacttcaaacacggtaactgatgaaatcgagcgcgcgaatgttttcaaaatgaacggcaaatggtacttgttcactgattcacgcggttcaaaaatgacgatcgatggtattaactcaaacgatatttacatgcttggttatgtatcaaactctttaaccggcccttacaagccgctgaacaaaacagggcttgtgctgcaaatgggtcttgatccaaacgatgtgacattcacttactctcacttcgcagtgccgcaagccaaaggcaacaatgtggttatcacaagctacatgacaaacagaggcttcttcgaggataaaaaggcaacatttgcgccaagcttcttaatgaacatcaaaggcaataaaacatccgttgtcaaaaacagcatcctggagcaaggacagctgacagtcaactaa

SEQ ID NO: 15125 - DNA, 1675 bp, Homo sapiens
  SIMILAR (901)..(1356): 961254mologous to Mus musculus Krueppel-like factor 14,accession number AJ275988,Smith-Waterman Score=830.
atgcaggacagcgctcacctccgccgcctgccgcctgccgccagccgccgggtctggctcgccctgggctcctgccccttaccgctggagagctcgccggcgcacagggcctatgagcgaccgtcagtagcgcaccagccagccgtgcccggagcccgccgcagcctcgaggtcccgtctgaggtgcccctgaccgtccctgccctcaccccaccccggatcccggcaatgctaaccgctgtctgcggctctctgggcagccagcacacggaagcgccgcacgcctccccgccgcgcctcgacctgcagcctctccaaacttaccagggccacacgagccctgaggccggggactacccctccccgctgcagcctggagagctgcagagcctcccgctgggcccggaggtggacttctcgcagggctatgagctgccaggggcctcctcgcgggtaacctgcgaggacctggaaagcgacagtcccttggccccgggccccttttccaagctcctgcagccggacatgtcacaccattatgaatcgtggttcaggccgactcacccaggcgcggaggatggctcgtggtgggaccttcatccgggcaccagctggatggacctcccccacactcagggcgcgctgacctcacctggccacccgggggcgcttcaggcgggcttggggggctacgtcggagaccaccagctttgtgccccgccaccccacccgcatgcgcaccacctccttccagctgccggagggcagcatctcctagggccgcccgacggggctaaggccttggaagtagccgccccggagtctcaagggctggattccagcctggacggggcggcgcgtcccaaaggctcccggcggtcggtgccccgcagctcaggccagaccgtctgtcgctgccccaactgtctggaggcggagcgactgggggctccatgtgggcccgatgggggcaagaagaagcatttgcacaactgccacatcccgggctgcgggaaagcctacgccaagacgtcgcacctgaaggcgcacctgcgctggcacagcggcgaccgtcccttcgtgtgcaactggctcttctgcggcaagcgcttcacgcgctcggacgagctgcagcgccacctccagacccacaccggcaccaagaagttcccctgtgcagtctgcagccgcgtcttcatgcgcagcgaccacctggccaagcacatgaaaacccacgagggcgccaaggaggaggcggctggggcggcctcgggagagggcaaggccggcggcgcagtggagccccccgggggcaaaggcaaacgcgaggccgagggcagcatggcgtcgtcgagccctgactccccatgttcctgcgactgctttgtctccgtgcccccggcctcagccatcccggctgtgatctttgctcatgaactcggaccgaccccgggacgaggtgcaggaggtggtgtttgtccccgcaggcactcacactcctgggagccggctccaggcctctgagctgtgggaggtggtggaggagcctcgggtcaggctggggacagagggtgtcatgcctgagaggcaggaaggtcacctgctcaagaagaggaagtggcctctgaagggctggcacaagctagatatctgcaagctcttagcagaattgtga

SEQ ID NO: 15126 - DNA, 471 bp, Homo sapiens
  SIMILAR (3)..(290): 361254mologous to Ostertagia circumcincta cuticular collagen,accession number X96731,Smith-Waterman Score=82.
gcggccgcccatcttcaccaggggtccacggcagcagcacccagacacctgcgcatgtgggcagttttccgggttgtggccccatccctccagatgctgccggagatccaagattcgcgggcctggagggtggggtggggtgggcggggccgtgatggcaggaacagcagggcctgaggaaccttccgtgccccttcttgttccttcccgggccttgagcagccgctccctctccgccatggcctgctgcaggagccgctccatgtgggcaatgtctggatggatggccccacagctattcccacggccacagttcagcagctggtagagggggtatctgccggagtcccccactgctggcgggagagctgaggcctccagggattcagtacaatggaaggacagaggtccgggggatcctctctggctccccctgtccccccttttccggggcaggctcccagtcctctg

SEQ ID NO: 15127 - DNA, 533 bp, Homo sapiens
  SIMILAR (1)..(219): 781254mologous to Rattus norvegicus putative,accession number X74226,Smith-Waterman Score=319.
ggccgcatcaagacctggaggaagcgatggttctgctttgaccgccaagcccgccgcttggcctactatgcggacaaggaagagaccaagctcaaaggtgtcatctacttccaggccattgaggaagtctattatgaccacttacgctgtgccttcaagagccccaacccccgcctgaccttctgcgtcaaaacctacgaacgccttttctacatggtgggctccgagccccgaagccatgcgcatttggatggacgtcatcgtgacagccgctgacgaaaaccacgccccctgagtgggccccgcactcttggggggaagtcccttcgaggctccgccggcgcggggcgcgggggcgttcctaggccccgcccactgccggaaaacttggacgcaccgctttggaactctcccgggaattccgcaggcgcggcagttcagctggcctgagctgctgcgttctgggttgcaggtgcctttgccccgacgggatcgccggcccctaaggccctgcccggggcaagaagaagatt

SEQ ID NO: 15128 - DNA, 1699 bp, Homo sapiens
  SIMILAR (331)..(1125): 1001254mologous to Homo sapiens GPI-anchored metastasis- associated protein homolog,accession number AC018758,Smith-Waterman Score=1424.
ggttactcatcctgggctcaggtaagagggcccgagctcggaggcggcacacccaggggggacgccaagggagcaggacggagccatggaccccgccaggaaagcaggtgcccaggccatgatctggactgcaggctggctgctgctgctgctgcttcgcggaggagcgcaggccctggagtgctacagctgcgtgcagaaagcagatgacggatgctccccgaacaagatgaagacagtgaagtgcgcgccgggcgtggacgtctgcacctgaggccgtggtggcggtggagaccatccatggacaattctcgctggcagtgcgtgcgttgcggttcgggactccccggcaagaatgaccgcggcctggatcttcacgggcttctggcgttcatccagctgcagcaatgcgctcaggatcgctgcaacgccaagctcaacctcacctcgcgggcgctcgacccggcaggtaatgagagtgcatacccgcccaacggcgtggagtgctacagctgtgtgggcctgagccgggaggcgtgccagggtacatcgccgccggtcgtgagctgctacaacgccagcgatcatgtctacaagggctgcttcgacggcaacgtcaccttgacggcagctaatgtgactgtgtccttgcctgtccggggctgtgtccaggatgaattctgcactcgggatggagtaacaggcccagggttcacgctcagtggctcctgttgccaggggtcccgctgtaactctgacctccgcaacaagacctacttctcccctcgaatcccaccccttgtccggctgccccctccagagcccacgactgtggcctcaaccacatctgtcaccacttctacctcggccccagtgagacccacatccaccaccaaacccatgccagcgccaaccagtcagactccgagacagggagtagaacacgaggcctcccgggatgaggagcccaggttgactggaggcgccgctggccaccaggaccgcagcaattcagggcagtatcctgcaaaaggggggccccagcagccccataataaaggctgtgtggctcccacagctggattggcagcccttctgttggccgtggctgctggtgtcctactgtgagcttctccacctggaaatttccctctcacctacttctctggccctgggtacccctcttctcatcacttcctgttcccaccactggactgggctggcccagcccctgtttttccaacattccccagtatccccagcttctgctgcgctggtttgcggctttgggaaataaaataccgttgtatatattctgccaggggtgttctagctttttgaggacagctcctgtatccttctcatccttgtctctccgcttgtcctcttgtgatgttaggacagagtgagagaagtcagctgtcacggggaaggtgagagagaggatgctaagcttcctactcactttctcctagccagcctggactttggagcgtggggtgggtgggacaatggctccccactctaagcactgcctcccctactccccgcatctttggggaatcggttccccatatgtcttccttactagactgtgagctcctcgagggcagggaccgtgccttatgtctgtgtgtgatcagtttctggcacataaatgcctcaataaagatttaattactttgaaaaaaaaaaaaaa

SEQ ID NO: 15129 - DNA, 1986 bp, Homo sapiens
  SIMILAR (1609)..(1782): 431254mologous to Rattus norvegicus metastasis-associated GPI -anchored protein,accession number AJ001043,Smith-Waterman Score= 98.
tttcgtcccagcggccatggggacgcgaagcagccccgaggaggggaccccgccgccgctggtcccggaatgcgacgtggaggtccagccccagggccatcccgaggagtcccgggaacaggaggcatccgaagtcctggcggaaccttcgagccgcgggggagctgagcagcaggcagaggaagaagaagtgggagaaggcagcagcactgagagcagccgcgacgcgcccgaggctacgcctccgatagctatggcggccacacctcccgcatccacctcttcgcgggaaggggtgcgaggggcggcgcggcgcctgcaaggacagcagctggaggcattgactcgtgtggccctgatggagcagcgagtgaaggagcccccagcgccagaggaaggagctgaggatcgaaatggaggtggaggtggccttgctgcggggtgagctggctggggagcgagtggccgctcgccgggaggaggagcagctgcgggagctgctggagcagcaggcggcctcggagcagcgcggccgccagcagcgggaacaggacccaggaatccaagtcctcagtcaccttcttcctctaccaggagtcccagccccagcccactactccctggggtcttagggattcggcctccaccctttttgtgttccgacctatagatgagggaacaactggatgtggcccaacgtgcctatgaggacctggagttccagcaactggagcggggagccggcaggaggaggaggatcgggacagccctgggccccaggtgccaaccccaagctgtgttcacccagaagacagaccgccagctgctggtgctccaggatgccgtggcccactccgctgccacccctacttcttcctgcctcttttctgtccacagctccctgcagggctccattggctccagaggactgggagcctgccccggaaaaggggggagagggggagccgagaggatccccccgacctctgtccttccattgtactgctgtggggccatccatccagacattgcccacatgagcggctcctgcagcaggccatggcggagagggagcggctgctcaaggccgggccgcgaatcttggatctccggcagcatctggagggatggggccacaacccgaaaactgcccacatgtgcaggtgtctgggtgctgctgccgtggacccctgtgaagatgggcggccgcatcaagacctggaggaagcgatggttctgcttgaccgccaagcccgccgcttggcctactatgcggacaaggaagagaccaagctcaaggtgtcatctacttccaggccattgaggaagtctattatgaccacttcgctgtgccttcaagagcttcgtgacattcagagaggattcacagaaagtgctaagcacagagagcgcaggccctggagtgctacagctgcgtgcagaaagcagatacggatgctccccgaacaagatgaagacagtgaagtgcgcgccgggcgtgacgtctgcaccgaggccgtgggggcggtggagaccatcctttctggatctggccacgcccctttaacgcggccccaccccccctttcagcctggccgggaccctacgacacagccttgcaggccaggcctctctattaacaattacaagcgcgaggagcagagagttgagaactggtccacggcaattctcgctggcagtgcggggttgcggttcgggactccccggcaagatgaccgcggcctggatcttcacgggcttctggcgttcatccagctgcagaatgcgctcaggatcgctgcaacgccaagctcaacctcacctcgcgggcctcgacccggcaggtacatcgccgccggtcgtgagctgctacaacgccagcgatcatgtctacagggctgcttcgacggcaacgtcaccttgacggcagagcccacgactgtggcctcaaccacatctgtcaccacttctacctcgccccagtga

SEQ ID NO: 15130 - DNA, 964 bp, Homo sapiens
  SIMILAR (313)..(963): 991254mologous to Escherichia coli dTDP-glucose 4,6- dehydratase (EC 4.2.1.46),accession number D90842,Smith-Waterman Score=1134.
atgaacgtgaaaggcgatacccaagggaacactcgcgttcgggttgataacattggcggcgtcggtgcacaaacggtcaacggtattgaactcattgaggttggcggtaattctgcaggtaacttcgcgctgaccaccggaactgtcgaagctggggcttacgtctacacgctggctaaagggaaggggaatgacgagaaaaactgccccatcagtttatcgcccggagccggaagctatatcagcaacattgccgcagccaactcgctgtttagccatcgtttacacgaccggcattcatgcctgcagcctttgaaaatacttgttactggtggcgcaggatttattggttcagctgtagttcgtcacattataaataatacgcaggatagtgttgttaatgtcgataaattaacgtacgccggaaaccgggaatcacttgctgatgtttctgattctgaacgctatgtttttgaacatgcggatatttgcgatgcacctgcaatggcacggatttttgctcagcatcagccggatgcagtgatgcacctggctgctgaaagccatgttgaccgttcaattacaggccctgcggcatttattgaaaccaatattgttggtacttatgtccttttggaagccgctcgcaattactggtctgctcttgatagcgacaagaaaaatagcttccgttttcatcatatttctactgacgaagtctatggtgatttgcctcatccagatgaagtaaataatacagaagaattacccttatttactgagacgacagcttacgcgccaagcagcccttattccgcatccaaagcatccagcgatcatttagtccgcgcgtggaaacgtacatatggtttaccgacaattgtgactaattgctcgaacaactatggtccttatcatttcccggaaaagcttattccactggttattcttaatgcactggaag

SEQ ID NO: 15131 - DNA, 597 bp, Homo sapiens
  SIMILAR (210)..(596): 661254mologous to Escherichia coli Adhesin AidA-I precursor,accession number D90793,Smith-Waterman Score=392.
  misc_feature (1)...(597): n = a,t,c or g
cgcccgatagctcatgctctcagtcgccgtgtgcgcgggataggcgggcttcctgagagaatggctttttcttttcacaagaatagcgaacgggggaaaccggggaatgtacttatccgttaacggcaactataccggaaacaatggcctgatgacgttcaacgcgacgctgggcggcgataattcgcccaccgataagatgaacgtgaaaggcgatacccaagggcacgcctcgcgttcgggttgataacattggcggcgtcggtgcacaaacggtcaacggtattgaactcattgaggttggcggtaattctgcaggtaacttcgcgctgacccaccggaactgtcgaagctggggcttacgtctacacgctggcttaagggaaggggaatgacgagaaaaaactggtatctgaccagtaaatgggaacggcgtaacgccagcggatacacccgatcccatcaataatccccctgttgtggatccggaaggcccatcagtttcccgcccggaggccggaagctatatcagcaacattgccgcatcctactccccgtttaaccatcgcttacgcccccgtntgggtgactcgcagt

SEQ ID NO: 15132 - DNA, 501 bp, Homo sapiens
  SIMILAR (4)..(138): 561254mologous to Homo sapiens adaptor protein APPL,accession number AF169797,Smith-Waterman Score=114.
atgactcgctctttactgagcgtgtttgaagaagatgctggcaccctcacagactataccaaccagctgctccaggcaatgcagcgcgtctatggagcccagcttaatcttctccatacagagctggctaaacagttggcagacacaatggttctacctatcatacaattccgagaaaaggatctcacagaccctcagcgctatgtggagaggcagggctgctcaggccatcagggtcactgggtgtggggcatggttgaagccgtatgttccaaagtaagcactttaaaggatctatttggactcgctagcaatgagcatgacctctcaatggcaaaatacagcaggctgcctaagaaaaaggagaatgagaagctggctgcgttcggacagccaacctggtgcgacccggcggagcgcgtgggcttcctggagcctgtgggccctgaccctggtgccaagagcgcacccagtcccagggaccgggcctctacgctgtga

SEQ ID NO: 15133 - DNA, 1227 bp, Homo sapiens
  SIMILAR (712)..(2940): 971254mologous to Homo sapiens putative p150,accession number U93568,Smith-Waterman Score=3707.
atggttaaaaagggtcaacttacagctcaggccatttcttcagagggtgcaaaccccaagccttggcgcctcccacttggtgttgagcctgcaggtgcacagaagtcaaggattgaggtttgggagcctctgcctagatttcagaggatgtacggaaatgcctggatgtccaggcagaagtctgctgcagcagtggagccctcatggagaacctctgctaggacagcttacgtcagtttacatactcagagctccttgaacaaagtaggcttaaagggacctgcatcaattgcactggcaaaaggaaacacccagacctttcaggattgtggcccttgctctgagcactctctaattcctagggattcagaataccaatatacagcacttaaaatggaaacttaccagactcaggaaagcagttcctcaccagcaacggaacaaagctggatggagaatgactttgacgagctgagagaagaaggcttcagacgatccaattactctgagctacgggaggacattcaaaccaaaggcaaagaagttgaaaactttgaaaaaaatttagaagaatgtataactagaataaccaatacagagaagtgcttaacagagctgatggagctgaaaaccaaggctcgagaactatgtgaagaatgcagaagcctcaggagaccaaatctacgtctgattggtgtacctgaaagtgacggggagaatggaaccaagttggaaaacactctgcaggatattatccaggagaacttcaccaatctagcaaggcaggccaaccttcagattcaggaaatacagagaacacaacaaagatactcctcgagaagagcaactccaagacacataattgtcagattcaccaaagttgaaatgaaggaaaaaatgttaagggcagccagagagaaaggtcgggttaccctcaaagggaagcccatcagactaacagcagatctctcggcagaaactctacaagccagaagacagtgggggccaatattcaactttcttaaagaaaagaattttcaacccagaatttcttatccagccaaactaagcttcataagtgaaggagaaataaaatactttacagaaaagcaaatgctgagagattttgtcaccaccaggcctgccataaaagagctcctgaaggaagcgctaaacatggaaaggaacaaccagtatcagccactgcaaaatcatgccaaaatgtaa

SEQ ID NO: 15134 - DNA, 1356 bp, Homo sapiens; identical to SEQ ID NO: 2089
  SIMILAR (403)..(1353): 951254mologous to Homo sapiens p40,accession number U93564,Smith-Waterman Score=1552.

SEQ ID NO: 15135 - DNA, 2583 bp, Homo sapiens
  SIMILAR (754)..(2319): 891254mologous to Homo sapiens putative p150,accession number U93568,Smith-Waterman Score=2308.
atgaccttagagagcacaaacgtgaagcttaaaggagaaatggatcacgcaggaaactttgccggctataattgtggagactgcaagtttggctggaccggtcccaactgcgagcggaagaaaccaccagtgattcggcagaacatccattccttgagtcctcaggaaagagagcagttcttgggcgccttagatctcgcgaagaagagagtacaccccgactacgtgatcaccacacaacactggctgggcctgcttgggcccaatggaacccagccgcagtttgccaactgcagtgtttatgatttttttgtgtggctccattattattctgttagagatacattattagattatgcattagatgcagtcatggccataaatctcactaatggccagtgctgtacggcatcttatggtcagcatctgagtgtgcaggctctctgtgctaatcctgggattccaaaattatgcactgacactttaggcctgccttacaaattgcacattggatttgcttatatcgttgaaccaaaaaaaattgtgagctatgttgtgctgtgtgtcacctgtcaggggtgctggactttcccagtgtgcaaggtgtggcctcctctgctggcagctgttgagttcaactctctcagtgccacattcaggcctttcccagggtaccagttatcccagggtttggcacctcttgttcctgaacaaactgatccctttcctgcagaaaaaggggaacgcagttcctcaccagcaatggaacaaagctggatggagaatgactttgacgagctgagagaagaaggcttcagacgatcaaattactctgagctacgggaggacattcaaaccaaaggcaaagaagttgaaaactttgaaaaaaatttagaagaatgtataactagaataaccaatacagagaagtgcttaaaggagctgatggagctgaaaaccaaggctcgagaactacaaatacaaactaccatcagagaatactacaaacacctctatgcaaataaactagaaaatctagaagaaatggataaattccttgacacatacactctcccaagactaaaccaggaagaaattgaatctctgaatagaccaataacaggatctgaaattgtggcaataatcaatagcttaccaaccaaaaagagtccagaaccagatggattcacagccgaattctaccagaggtacaaggaggaactgcatataaacagagccaaagacaaaaaccacatgattatctcaatagatgcagaaaaagcctttgacaaaattcaacaacccttcatgctaaaaactctcaataaattaggtattgatgggacgtatttcaaaataataagagctatctatgacaaacccacagccaatatcatactgaatgggcaaaaactggaagcattccctttgaaaactggcacaagacagggatgccctctctcaccactcctattcaacatagtgttggaagttctggccagggcaattaggcaggagaaggaaataaagggtattcaattaggaaaagaggaagtcaaattgtccctgtttgcagacgacatgattatatatctggaaaaccccattgtctcagcccaaaatctccttaagctgataagcaacttcagcaaagtctcaggatacaaaatcaatgtagaaaaatcacaagcattcttatacaccaacaacagacaaacagagagccaaatcatgagtgaactcccattcacaattgcttcaaagagaattaaatacctaggaatccaacttacaagggatatgaaggacctcttcaaggagaactacaaaccactgctcaaggaaataaaagaggatacaaacaaatggaagaacattccatgctcatgggtaggaagaatcaatatcgtgcaaaatggaccatactgcccaaggttctataaccctcgcctgcgtacgtccttgtgtagaaatggggaaagcctgagcagaatactcacttgctttccttggtttcttgatcaggtcacagacataaaagagaaattgaagctctctaaaaaggtctggtcagcattaccctacactatctgcaaggacgagagcgtgacagcgggcacgtccaacgaggaggaatgctggaacgggcacagcaaagccagggagcccctgctgtttttcaaggcacctgatcctgacagaaatattgtgtccccaaggaaatccttcccaaggccaagagggcaagccgcattggcaaaccatgacatccctgctcaactctccaggttgtcctcacttctggcttctcccaaggctggatccaccagatacttgcctgagatcatgaatgatgggctcaccaaccagatcaacaatcccgaggtggatgtggacatcactcggcctgacactttcatcagacagcagattatggctctccgtgtgatgaccaacaaactaaaaaacgcctacaatggcaatgatgtcaatttccaggacacaaagagaaccaccagaaaagaagagcaggtagacatagctggaaaatcgaagccccaattttctgacaaacaaaactag

SEQ ID NO: 15136 - DNA, 3120 bp, Homo sapiens
  SIMILAR (466)..(2532): 951254mologous to Homo sapiens putative p150,accession number U93574,Smith-Waterman Score=3515.
atgggccgcactcgggaagctggctgcgtggccgctggtgtggttatcggggctggtgcctgctactgtgtatacagactggcttggggaagagacgagaacgagaaaatctgggacgaagacgaggagtctacggacacctcagagattggggttgagactgtgaaaggagctaaaactaacgctggggcagggtctggggccaaacttcagggtgattcagaggtcaagcctgaggtgagtttgggactcgaggattgtccgggtgtaaaagagaaggcccattcaggatcccacagcggaggtggcctagaggccaaggccaaggcccttttcaacacgctgaaggaacaggcaagtgcaaaggcaggcaaaggggctagggtgggtaccatctctgggaacaggacccttgcaccgagtttaccctgcccaggaggcaggggtggaggctgccaccccaccaggagtggatctagggccgggggcagggcaagtggaaaatccaagggaaaggcccgaagtaagagcaccagggctccagctacaacatggcctgtccggagaggcaagttcaactttccttataaaattgatgatattctgagtgctcccgacctccaaaaggtcctcaacatcctggagcgaacaaatgatccttttattcaagaagtagccttggtcactctgggtaacaatgcagcatattcatttaaccagaatgccatacgtgaattgggtggtgtcccaattattgcaaaactgataaaaacaaaagaccccataattagggaaaagacttacaatgcccttaataacttgagtgtgaacgcagaaaatcagggcaagattaagacgtacatcagtcaagtgtgtgatgacaccatggtctgtcgcttggactcagctgtgcagatggctgggctaagactgttaaccaacatgactgtgactaatcattaccaacatttgctttcctattcttttccagacttttttgctttgttattcctgggaaatcacttcaccaagatacagattatgaaactaattataaactttactgaaaatccagccatgacaagagagctggtactgctgtcctttggcacacctctagtgctgaccactgaccttctccaggctctctcctctttgcctttcatggaatcagggctttttcaaggtgaaggagatgaaatacaaattaccagcatagaatactataaacacctctacgcaaataaactagaaaatctagaagaaatggataaactcctcgacacatacaccctcccaagactaaaccaggaaggagttgaatctctgaatagaccaataacaggatctgaaattgaggcaataattaatagcttaccaaccaaaaaaggtccaggaccagatggattcacagccaaattctgccagaggtacaaggaggagctgcacatcaaaaagcttatccaccatgatcaagtgggcttcatccctgggatgcaaggctggttcaacatacgcaaatcaataaacgtaatcgagcatataaacagaaccaaggacaaaaaccacatgattatcttaatagatgcagaaaaggcctttgacaaaattcaacaacccttcatgctaaaaactctcaataaattaggtattgatgggacgtatctcaaaataataagagctatctatggcaaacccacagtcaatatcatactgaataggcaaaaactggaagcattccctttgaaaactggcacaagacagggatgccctctctcaccactcctattcaacatagtgttggaagttctggccaaggcaattaggcaggagaaggaaataaagggtattcaattaggaaaagaggaagtcaaattgtccctgtttgcggacgacatgattgtatatctagaaaaccccatcatctcagcccaaaatctccttaagctgacaggcaacttcagcaaagtctcaggatacaaaatcaatgtgcaaaaatcacaagcattcttatacaccaataacagacaaacagagagccaaatcatgagtgaactcccattcacaattgcttcaaagagaataaaatacctaggaatccaacttacaagggatgtgaaggacctcgtaaaggagaactacaaaccactgctcaaggaaataaaagaggatacaaacaaatggaagaacattccatgctcatgggtaggaagaatcaatatcctgaaaatggccatactgcccaaggaacgcagttcctcaccagcaacggaacaaagctggatggagaatgactttgacgagctgagagaagaaggcttcagacgatcaaattactctgagctacaggaggacattcaaaccaaaggcaaagaagttgaaaactttgaaaaaaatttagaagaatgtataactagaataaccaatacagagaagtgcttaaaggagctgatggagctgaaaaccaaggctcgagaactacgtgaagaatgcagaagcctcaggagccgatgcgatcaactggaagaaagggtatcagcaatggaagatgaaatgaatgaaatgaaaccaaatctacgtctgattggtgtacctgaaagtgatggggagaatggaaccaagttggaaaacactctgcaggatattatccaggagaacttccccaatctagcaaggcaggccaacattcagattcaggaaatacagagaacgccacaaagacactcctcgagaagagcaactccaagacacataattgtcagattcaccaaagttgaaatgaaggaaaaaatgttaagggcagccagagagaaaggtcgggttaccctcaaagggaagcccatcagactaacagcggatctctcggcagaaaccctacaagccagaagagagtgggggccaatattcaacattcttaaagaaaagaattttcaacccagaatttcatatccagccaaactaaacttcataagtgaaggagaaataaaatactttacagacaagcaaatgctgagagattttgtcaccaccaggcctgccctaaaagagctcctgaaggaagcgctaaacatggaaaggaacaaccggtaccagccgctgcaaaatcatgccaaaatgtaa

SEQ ID NO: 15137 - DNA, 1263 bp, Homo sapiens
  SIMILAR (307)..(1260): 941254mologous to Homo sapiens p40,accession number U93569,Smith-Waterman Score=1536.
atggatccaaaccaagaagtaatctctgaattgccagaaaaagaattcagaaggttgattattaaactgctgaaagttcccgagagatcccatgatccagagacaaaggtggcagctttggagcaagtggagagccagaaaaggatccagaactggagtggaaggctccacctctgggggcagggcacagacaaacaaaaagacagcagtaacctctgcagacttaaatgtccctgtctggacagctttgaagagagcagtggttctccccagcatgcagctggagatctgagaacgggcagactgcctcctcaagaacgcagttcctcaccagcaatggaacaaagctggatggagaatgactttgacgagctgagagaaggcttcagacgatcaaattactctgagctatgggaggacattcaaaccaaaggcaaagaagttgaaaactttgaaaaaaatttagaagaatgtataactagaataaccaatacagagaagtgcttaaaggagctgatggagctgaaaaccaaggctcgagaactacgtgaagaatgcagaagcctcaggaggcgatacgatcaactggaagaaagggtatcagcaatggaagatgaaatgaatgaaatgaagcgagaagggaagtttagagaaaaaagaataaaaagaaatgagcaaagcctccaagaaatatgggactatgtgaaaagaccaaatctacgtctgattggtgtacctgaaagtgatggggagaatggaaccaagttggaaaacactctgcaggatattatccaggagaacttctccaatctagcaaggcaggccaacgttcagattcaggaaatacacagaacgccacaaagatactcctcgagaagagcaactccaagacacataattgtcagattcaccaaagttgaaatgaaggaaaaaatgttaagggcagccagagagaaaggtcgggttaccctcaaagggaagcccatcagactaacagcggatatcttggcagaaaccctacaagccagaagagagtgggggccaatattcaacattcttaaagaaaagaattttcaacccagaatttcatatccagcccaactaagcttcataagtgtaggaaaaataaaatcctttacagacaagcaaatgctgagagattttgtcaccaccaggcctgccctaaaagagctcctgaaggaagcactgaacatggaaaggaacaaccgataccagccgctgcaaaatcatgccaaaatgtaa

SEQ ID NO: 15138 - DNA, 2145 bp, Homo sapiens
  SIMILAR (163)..(1932): 951254mologous to Homo sapiens putative p150,accession number U93563,Smith-Waterman Score=2945.
atggccgctggcgtggactgcggggacggggttggcgcccggcagcacgtgttcctggtttcagcgccacctgcaggctctgagggtacaacaaggtttgacagcgactgcagtgcaacactagttctcaaacttgagggcatcatttacctggggagctgggcctcagttcccagagaagatgagaaatcagcctgcttagttacccattcgggagttggaaacgatatgcccttggctgagggagcaccatactccagtaaagctgggcccttaataaagaaaacaaagattattaaacatttttcaaaagtatttggcggaggcggcttgtattcggttttagaaaacttgggatctgaagaacttactttgtgtactgaaaactactgtgatggccggtataacgagggcacacaagctgtgaggctggggaagtttcagccccttgatcaagttgtggtggataacgtgtttccaaattgcatcttgttgctgaaacttcctggacttgagaagttacttcatcatgtgacagaggaaaaaggtaatccagaaatagacaacaagaaatattacaagtacagcaaagagaagacattaaagtggctggaaaaaaaggttaatcaaactgtggcagcattaaaaaccaataatgtgaatgtcagttcccgggtacagtcaactgcatttttctctggtgaccaagcttccactgacaaggaagaggattatattcgttatgcccatggtctgatatctgactacatccctaaagaattaagtgatgacttatctaaatacttaaagcttccagaaccttcagcctcattgccaaatcctccatcaaagaaaataaagttatcagatgagcctgtagaagcaaaagaagattacactaagtttaatactaaagatttgaagactgaaaagaaaaatagcaaaatgactgcagctcagaaggctttggctaaagttgacaagagtggaatgaaaagtattgataccttttttggggtttgtgcttctcggttctgcactgccaaagagactctcctctatggcagcacaaagacagaaaaggggcaagtgatggtggtggctccacgcaaggcttggcggttttccctgcaacttcagacactcccagaggactcggactttttcttctgcacttttttggaaaatcgccaggaacgcagttcctcaccagcaacggaacaaagctggatggagaatgactttgacgagctgagagaagaaggcttcagacgatcaaattactctgagctacgggaggacattcaaaccaaaggcaaagaagttgaaaactttgaaaaaaatttagaagaatgtataactagaataaccaatacagagaagtgcttaaaggagctgatggagctgaaaaccaaggctcgagaactacgtgaagaatgcagaagcctcaggagccgatgcaatcaactggaagaaagggtatcagtgatggaagatgaaatgaatgaaatgaagcaagaagggaagtttagagaaaaaagaataaaaagaaatgagcaaagcctccaagaaatatgggactatgtgaaaagaccaaatctacgtctcattggtgtacctgaaagtgatggggagaatggaaccaagttggaaaacactctgcaggatattatccaggagaacttccccaatctagcaaggcaggccaacactcagattcaggaaatacagagaacaccacaaagatactcctcgagaagagcaactccaagacacatatttgtcagattcaccaaagttgaaatgaaggaaaaaatgttaagggcagccagagagaaaggttgggttacccacaaagggaagcccatcagactaacagcagatctctcagcagaaaccctacaagccagaagagagtgggggccaatattcaacattcttaaagaaaagaattttcaacccagaattgcatatccagccaaactaagcttcataagcgaaggagaagtaaaatactttacagacaagcaaatgctgagagattttgtcaccaccaggcctgccctaaaagagctcctgaaggaagcactaaacatggaaaggaacaaccggtaccagccactgcaaaatcatgccaaaatgtaa

SEQ ID NO: 15139 - DNA, 1416 bp, Homo sapiens
  SIMILAR (463)..(1413): 951254mologous to Homo sapiens p40,accession number U93564,Smith-Waterman Score=1552.
atggcagaaggcaaggaggagcaagtcccatcttacatggatggcagcaggcaaagaaagaatgaggaagatgtaaaagcagaaacccctgataaaaccatcagctctcgggcagcactcaggagaggcacttcttctgatggaagaaaactgaatgggacatttgcagtaaggggtgctggtgggtactacatgtggggccacactcgagctgccttctcagtcaacccctttggcagcttgggccaagtctctttgaagaggaagactgtgatatctgaactcaaacaggcagtgcccagagagagaagcacaggtccacgcaggcagccaaagccatcttcttggttgaaagatactcttttcggggggaggagccaagatggccgagtaggaacagctccggtctacagctcccagcgtgagcgacaaagaagacgggtgatttctgcatttgcatctgaggaacgcagttcctcaccagcaacggaacaaagctggatggagaatgactttgacgagctgagagaagaaggcttcagacgatcaaattactctgagctacgggaggacattcaaaccaaaggcaaagaagttgaaaactttgaaaaaaatttagaagaatgtataactagaataaccaatacagagaagtgcttaaaggcgctgatggagctgaaaaccaaggctcgagaactacgtgaagaatgcagaagcctcaggagccgatgcgatcaactggaagaaagggtatcagcgatggaagatgaaatgaatgaaatgaagcgagaagggaagtctagagaaaaaagaataaaaagaaatgagcaaagcctccaagaaatatgggactatgtgaaaagaccaaatctacgtctgattggtgtacctgaaagtgatgcggagaatggaaccaagttggaaaacactctgcaggatattatccaggagaacttccccaatctagcaaggcaggccaacgttcagattcaggaaatacagagaacgccacaaagatactcctcgagaagagcaactccgagacacataattgtcagattcaccaaagttgaaatgaaggaaaaaatgttaagggcagccagagagaaaggtcgggttaccctcaaagggaagcccatgagactaacagcgaatctctcggcagaaaccctacaagccagaagagagtgggggccaatattcaacactcttaaagaaaagaattttcaacccagaatttcatatccagccaaactaagcttcataagcgaaggagaaataaaatactttacagacaagcaaatgctgagagattttgtcaccaccagacctgccttacaagagctcctgaaggaagcacgaaacatggaaaggaacaaccggtaccagctgctgcaaaattatgccaaaatgtaa

SEQ ID NO: 15140 - DNA, 4051 bp, Homo sapiens
  SIMILAR (891)..(2645): 881254mologous to Homo sapiens putative p150,accession number U93574,Smith-Waterman Score=2657.
atggggagaaaccagagcagaaaagctgaaaattctaaaaatcagagcacctcttctcctccaaaggaacgcacctccttgccagcaacggaacaaagctggatggagaatgactttgacgagttgagagaagacggcttcagacaatcgaccactagcaagactaataaagaagaaaagagagaagaattgaatagtcgcaataaaaatgataaaggggatatcatctccaatcccacagatatacaaactaccatcagagaatactataaacacctgtactcaaataaactagaaaatctagaagaaatggataaattcctcgacacatacaccctcccaaggctaaaccaggaagaagttgaatccctgaatagaccaataacaggctatgaaattaaggcaataattaatagcctatcaaccaaaaaaagtccaggacagatggattcacagccgaattctaccagagatattattttaaatttccgaacaacttatgtcagcaagtctggccaagttatctttgaagcaagatcaatttgcatccactatgtcacaacctggttcatcattgatttaatcgctgccctgccttttgatcttctgtatgctttcaacgtcacagtgaatgtttttgtagataaaccagcatttccggagtataaagtttctgatgcaaaaaagtccaaattcatacttctgcattttagcacttttaaagctggctgggactggtttattttgttggcaacgttttatgttgctgtgactgtaccttacaacgtttgctttattggcaatgacgacctgtccacaactcggagcacaaccgtcagtgacattgcagtggagattctttttattataggtcctctagatgttagggtgtctctcgtgcatcttctaaagacagtgcgcctcttgcgtcttttgcgtctgctgcagaagttagaccgctattcccaacacagtactatcgtcctgactctgctcatgtccatgtttgcactccttgcacactggatggcgtgtatctggtacgtcattggaaaaatggagagggaagacaacagccttctgaagtgggaagttgaaggaaaactaacaaacagaaaggacatccacaccaaaaacccatctgtacatcaccatcatcaaagaccaaaagtagataaaaccacaaagatggggaaaaaacagaacagaaaaactggaaactctaaaaaccagagtgcctctcctcctccaaaggaacggagttcctcaccagcaacggaacaaagctggatggagaatgactttgacgagctgagagaagaaggcttcagacgatcaaattactctgagctacgggaggacattcaaaccaaaggcaaagaagttgaaaactttgaaaaaaatttagaagaatgtataactagaataaccaatacagagaagtgcttaaaggagctggtggagctgaaaaccaaggctcgagaactacgtgaagaatgcagaagcctcaggagccgatgcaatcaactggaagaaagggtatcagcaatagaagatgaaatgaatgaaatgaagcaagaagggaagtttggagaaaaaagaataaaaagaaatgagcaaagcctccaagaaatatgggactatgtgaaaagaccaaatctatgtctgattggtgtacctgaaagtgatggagagaatggaactaagttggaaaacactctgcaggatattatccagaagaacttccccaatctagaaagggcaggccaacgttcagattcaggaaatacagagaaggccacaaagatactccttgagaagagcaactccaagaaaaagagagaagaatcaaatagacacaataaaaaatgataaaggggatatcaccaccgatcccacagaaatacaaactaccatcagagaatactacaaacacctctacgcaaataaactagaaaatctagaagaaatggatacattcctcgacgcatacactctcccaagactaaaccaggaagaagttgaatctctgaatagaccaataacaggagctgaaattgtggcaataaccaatagtttaccaaccaaaaagagtccaggaccagatggattcatagccgaattctaccagaggtacaaggaggaactggtaccattccttctgaaactattccaatcaatagaaaaagagggaatcctccctaactcatttcatgaggccagcatcattctgataccaaagccaggcagagacacaaccaaaaaagagaattttagaccaatatccttgatgaacattgatgcaaaaatcctcaataaaatactggcaaaccaaatccagcagcacatcaaaaagcttatacaccatgatcaagtgggcttcatccctgggatgcaaggctggttcaatatacgcaaatcaataaatgtaatccagcatataaacagaaccaaagacaaaaaccacatgattatctcaatagatgcagaaaaagcctttgacaaaattcaacaacccttcatgctaaaaactctcaataaattaggtattgatgggacgtatttcaaaataataagagctatctatgacaaacccacagccaatatcatactgaatgggcaaaaactggaagcattccctttgaaaactggcacaagacagggatgccctctctcactgctcctattcaacatagtgttggaagttctggccagggcaatcaggcaggagaaggaaataaagggtattcaattaggaaaagaggaagtcaaattgtccctgtttgcagacgacatgattgtttatctagaaaaccccatcatctcagcccaaaatctccttaagctgataagcaacttcagcaaagtctcaggatacaaaatcaatgtgcaaaaatcacaagcattcttatacaccaataacagacaaacagagagccaaatcatgagtgaactcccattcacaattgcttcaaagagaataaaatacctaggaatccaacttacaagggatgtgaaggacctcgtaaaggagaactacaaaccactgctcaaggaaataaaagaggatacaaacaaatggaagaacattccatgctcatgggtaggaagaatcaatatcctgaaaatggccatactgcccaaggaacgcagttcctcaccagcaacggaacaaagctggatggagaatgactttgacgagctgagagaagaaggcttcagacgatcaaattactctgagctacaggaggacattcaaaccaaaggcaaagaagttgaaaactttgaaaaaaatttagaagaatgtataactagaataaccaatacagagaagtgcttaaaggagctgatggagctgaaaaccaaggctcgagaactacaaagggtatcagcgatggaagatgaaatgaatgaaatgaagcgagaagggaagtttagagaaaaaagaataaaaagaaatgagcaaagcctccaagaaatatgggactatgtgaaaagaccaaatctacgtctgattggtgtacctgaaagtgatggggagaatggaaccaagttggaaaacactctgcaggatattatccaggagaacttccccaatctagcaaggcaggccaacattcagattcaggaaatactgagaataccacaaagatactcctcgagaagagcaactccaagacacataattgtcagattcaccaaagttgaaatgaaggaaaaaatgttaagggcagccagagagaaaggtcgggttaccctcaaagggaagcccatcagactaacagtggatctctcggcagaaaccctacaagccagaagagagtgggggccaatattcaacattcttaaagaaaagaattttcaacccagaatttcatatccagccaaactaagcttcataagtgaaggagaaataaaatactttacagacaagcaaatgctgagagattttgtcaccaccaggcctgccataaaagagctcctgaaggaagcgctaaacacggaaaggaaccaccggtaccagccgctgcaaaatcatgccaaaatgtaa

SEQ ID NO: 15141 - DNA, 384 bp, Homo sapiens
  SIMILAR (151)..(333): 361254mologous to Drosophila melanogaster Atu,accession number U75467,Smith-Waterman Score=85.
atgctgatgcttaatattggttttaagaattttcagtttgagcatctgaaatgttctcatggcagctattcggaggacattggtttccctaatgctggtgccctgtcaggggccatgtttctgttggaagagaagcacctgctctttgggctgaaagaagaagaacgtttgagggcttccatacgtagggaatctcagcagcgccgaatgagagagaaacagcaccagcgggggctgagcgccagttacctggaacctgatcgatacgatgaggaggaggaaggcgaggagtccatcagcttggctgccattaaaaaccgatataaagggggcattcgagatcagaagccttcttatgatagccttaatctctgcatgacctga

SEQ ID NO: 15142 - DNA, 467 bp, Homo sapiens
  SIMILAR (47)..(355): 521254mologous to Homo sapiens p40,accession number U93571,Smith-Waterman Score=249.
gatcacagctcctcaccagcaagggaacaaaactggatggagaattgagtttgatgaattgacagaagtaggcttcagaaggtgggtaataacaaactcctctgagctaaagaagcatgttctaacccaatgcaaggaagctaagaaccttgaaaaaaggttaggtgaattgctaactagaataactagcttagagaagaacataaatgacctgatggagctgaaaaacacagcacgagaacttcatgaagcatacacaagtatcaatagctggatcaatcaagcagaagaaaggctatcagagattgaagatcaacttaatgaaataaagcgtgaagacaagattacagaaaaaatgaagaattccaccacagtgcgggtcgctgcaagcatgcagagcaaactgctgcagggggtagctgaagagggacctctccggctcacccggagtgcttctttctctgcag

SEQ ID NO: 15143 - DNA, 1143 bp, Homo sapiens; identical to SEQ ID NO: 6970
  SIMILAR (1565)..(2869): 921254mologous to Homo sapiens unknown protein,accession number M22334,Smith-Waterman Score=2240.

SEQ ID NO: 15144 - DNA, 2643 bp, Homo sapiens
  SIMILAR (532)..(2244): 941254mologous to Homo sapiens putative p150,accession number U93574,Smith-Waterman Score=2805.
acactccaatccaaaagccattatatgggccaagcaaggcaagcatctggagcgtctgtgtggagggcagggtgtggccatggccaacagcaggtgttggagcctaaatgggatgaacggggctcctccattgaggaggaacatgaacaggaacataagcaagctagatctggcatggtcaaccggtatcacgatggtcccagcagcactccattctcaggcatttattctcagggcccagtcaatgtcataagtggggccgacagacacctcatacagaagagctctagctggcatctgttgggtgcccttctgggacaaagcttccagagaaaggaacaggcagcaatctttgctgttctgcagcctctgctggtgatacccaggcaaacagggtctggagtggacctccagcaaactccagctgacctgcagaagaggggcctgactgtcagagggaaaactaacaaacagaaaggaatagtagcaacatcagcaaaaaggacgtccactcagagaccccatccaaaggatcacaactccttgccagcaagggaacaaaactggatagagaatgagtttgatgaacggacagaagtaggcttcagaaggtgggtaataacaaactcctccaagctaaaggagcatgttctaacccaatgcaaggaagctaataacgcctggcttctagttgagtttgttcagtgggacctattagcaagagatggagggtggaaagagaaattggggtatctcttcctccttttctacccactttggtgtcatagttccggtagtgactgtgtccctgtgcaggtctacctgatcaaccatacaggcattcctttctcagcacattgccaggaagacaggcacagggccttcctcctaaaggattcagacccctctgctctcatccgctccaggcagttgcaagtttttgtcaagacattagacattagacaaggatcccagttgagaaatgtatgtggacagtgcccctctcaggaacacagctccgagtcctggggctctgtaatggctctcacgtgcccttctcagagagcatgcagaggagccagagtgacaggatccaaagttcctgggccaggctgggaagagctccccctggaagtagctatggctccccagaacattcatgcaagtgggaggggctgtggcatgaccagaactggggagaccaggccctgcttttcccctgccatcctggtcctaaggccacttcacacccagagcacagcttgctctagaagacttttctcccagaaaaatttctgggaacacactgaggtcaggatcagcttggatccagggggaacttcttcctatgaggaaaagctgataagcaacttcagcaaagtctcaggatacaaaatcaatgtacaaaaatcacaagcattcttatacaccaataacggacaaacagagagccaaatcatgagtgaactcccattcacaattgcttcaaagagaataaaatacctaggaatccaacttacaagggacgtgaaggacctcttcaaggagaactacaaaccactgctcaaggaaataaaagaggatacaaacaaatggaagaacattccatgctcatgggtaggaggaatcaatatcgtgaaaatggccatactgcccaaggtaatttacagattcaatgccatccccatcaagctaccaatgcctttcttcacagaattagaaaaaactaccttaaagttcatatggaaccaaaaaagagcccgcatcgccaagtcaatcctaagccaaaagaccaaagctggaggcatcacactacctaacttcaaactatactacaaggctacagtaaccaaaacagcatggtactggtaccaaaacagagatatagatcaatggaacagaacagagccctcagaaataacgccgcatagctacaactatctgatctttgacaaacctgaggaaaaaaagcaatggggaaaggattccctatttaataaatggtgctgggaaaactggcgagccatatgtagaaagctgaaactggatcccttccttacaccttatacaaaaatcaatttgagatggattaaagacttaaacgttagacctaaaaccataaaaaccctagaagaaaacctaggcattaccattcaggacataggcatgggcaaggacttcatgtctaaaacaccaaaagcaatggcaacaaaagacaaaattgacaaatgggatctaattaaactaaagagtttaattaaactaaagagcacagcaaaagaaactaccatcagagtgaacaggcaacctaaaaaatgggagaaaattttcccaacctactcatctgacaaagggctaatatccagaatctacaatgaactcaaacaaatttacaagaaaaaaacaaacaaccccatcaaaaagtgggcgaaggacatgaacagacgcttctcaaaagaagacatttatgcagccaaaaaacacatgaaaaaatgctcaccatcactggccatcagagaaatgcaaatcaaaaccacagtgagataccatctcacaccagttagaatggtgatcattaaaaagtcaggaaacaacaggtgctggggaggatgtggagaaataggaacacttttacactgttga

SEQ ID NO: 15145 - DNA, 717 bp, Homo sapiens
  SIMILAR (234)..(413): 961254mologous to Homo sapiens Lsm4 protein,accession number AJ238096,Smith-Waterman Score=314.
atggataaattcctggacaattacaccctccgaagactaaaccaggaagaagtcaaatccctgaatagaccaataacaagttctgaaattgaggcagtaattaatagcctaccaaccaaaaaaagcccagaaccagaaagattcacagctgaattcttccaaaagtacaaagaggagctgtccaccatccgtttagtcccacacttcatgttcagaacttctccttacgctcctccaattttaagtcaaaggctgccagcgaagttcagcacgtgggctttggattccaacagaccagctgtgtctcttgaaaggggcctacctgtgacaatatcgttaactgaagctcaattgatgaatcccattaaaggaaagctgctattgctaaatcaaagcatggagtctctgccctccccagtaggctatgccatccaggatcacaactcctcaccagcaaggaaacaaaattgcatggagaatgagtttgatgagttgacagaagtagggttcagaaggtgggtaataacaaactcctctgagctaaaggagcatgttctaacccaatgcaaagaagctgagaactttgaaaaaaggttacatgaattgctaactagaataaccagtttagagaagaacataaatgacctgatggagctgaaaaacacagcacgagaacttcgtgaagcatacacaagtatcaatagccaaactgattaa

SEQ ID NO: 15146 - DNA, 546 bp, Homo sapiens
  SIMILAR (217)..(543): 501254mologous to Homo sapiens p40,accession number U93571,Smith-Waterman Score=242.
atgaaacagcccaacaggaaaaggaagcttaatatggattccaaagagcgtttggatcaggacggacgcttggtgaagatgtcattctttgtgttctgctgtgtcgtgtcctctgaggaatcagagcacgaggagactcaggatttgatgtgttcagagttattctgggtacttctccacatgtggtccctggaccagcagcatcagcatcacctggaggatcacaactcctcgccagcaaggggacaacactggatggagaatgagtctgatgaattgacagaagtaggcttcagaaggtgggtaataacaaactcctctgagctaaaggagcatgctctaacccaatgcaaggaagctaagaaccttgaaaaaaggttagacaaattgctaactagaataatcagtttagagaagaacataaatgaactgatggagctgaaaagcacagcacgagaacttcgtgaagcatacacaagtatcaatagccaaattgatcaagtagaaaaaggatatcagagattgaagatcaacttaatgaaataa

SEQ ID NO: 15147 - DNA, 735 bp, Homo sapiens
  SIMILAR (1441)..(1785): 981254mologous to Escherichia coli similar to ~start codon is not identified yet,accession number D90869,Smith-Waterman Score= 557.
atggttattgcggaacaggtggtgtttggttacattagtaaatcagagatttcttcttggtttggagccattgctgggagacacctcccagtaggggccgacagacacctcatacaggagagcactggctggcatctggcaggtgcccctctgggatggagcttccagaggaaggaacagacagcaatctttgctgttctgcagcctctgctggtgatacccaggcaaacagggtatggagtggacctccagcaaatgccagcagacctgcagcagaggttcctgactgttagaaggaaaactaacaaacagaaaggaatagtatcaacatcaacaaaaaggacgtcatccgaaggtcaccaacatcaaagacgaaaggtagataaattcacagagatggggagaaaccagcacaaaaaggctgaaaattccaaaaaccagaatgcctcgtctccttcaaaggatcacaactcctcgccagcaagggaacaaaactggatggagaatgagtttgacgaattgacagaagtaggcttcagaaggtcagtaataacaaactcctccaagctaaaggagcatgttctaacccaatgcaaggaagctaggaaacttgaaaaaaggttagatgaattgctaactagaaaaaccaatttagagaagaacataaatgacctgatggagctgaaaaacacagcacaagaacttggtgaagcatacacaagtatcaatagctga

SEQ ID NO: 15148 - DNA, 1603 bp, Homo sapiens
  SIMILAR (1440)..(16): 991254mologous to Escherichia coli formate dehydrogenase-O alpha subunit,accession number L19201,Smith-Waterman Score=2562.
cagcattactcacaatagccaaaaggtagaaaccaccaaatgtccacgaatggatgaatggataaacaaaagacagtatatccatacaatggaatattattcagccttaaaaaggaaggaaagtctgttacatgctgactctgaaaacattatgctaagtgaaagaagccagacacaaaaggacaaaagtgccattgccaagatttataagaagaaagtcaattcagctaaagaggtgctaaataaagagcccaagagaagatctgaaggtagtcgttcaaacccgctcctgcagaagttaaaattaaatcataaacaaaaggcaaatggcacctggaacaccagcaagtcagaaccgttcactcccctggaaagggggctgaagccagggagccaaatggtatggctcgttgggtcccacccccatagagcccagcaaactaagatccactggcttgaaattcttgctgccagcacagcagcagtctgggatcgacctggggtgcttgagctcgagcacctgggggaaggggcagctgttaggcgcagcttcagcagacttaaacgtccctgcctgacagctctaaagagagcagtggacctcccagcacagcgttcgagctctgctaagggtcagactgcttcctcaagtgggtccctgatccccgtgtatcctgactgggagacacctcccagtcacaaacatcgaagaccaaaggtagataaatccacaaaaatggggagaaaccagcgcaaaaaggctgaaaattccaaaaacaagaatgcttcttttcctccaaaggatctcaactcctcgccagcaagggaacaaaactggatggagaatgagtttgatgaattgacagaagtaggcttcaaaatgtgggtaataacaaactcctccgagctaaaggagcatgttctaacccaatgcaaggaagctaagaaccttgaaaaaaggttagatgaattgctaactagaataaacagtttagagaagaacataaatgacctgatggagctgaaaaacacagcatgggaacttcgtgaagtatacacaacacgtcatcacacttattctaaaattgacaacataattggaagtaaaacactcctcagcaaatgcaaaagaacggaaatcaaaacaaacagtctcccagaccacagtgcaagcaaattagaactcaggattaagaaactcactaaaaactgcacgactacacagaaactgaacaacctgctcctgaatgactgctgggtaaataacgacatgaaggcagaaataaagatgttctttgaaaccaatgagaacaaagacacaacgtaccacaatctctgggacacatttaaagcagtgtgtagagggaaatttatagcactaaatgcccaaaagagaaagcaggaaagatctaaaactgacaccctaacatcaaaattaaaagaactagagaagcaacagcaaacaaattcaaaagctagcagaagacaagaaataactaagatcagaacagaaccgaaggagatagagacacaaaaaacccttcaaaaaatcaatgaatccaggagctggatttttgaaaagatcaacaaaatagaccactag

SEQ ID NO: 15149 - DNA, 2223 bp, Homo sapiens
  SIMILAR (173)..(349): 941254mologous to Homo sapiens HSPC004,accession number AF070660,Smith-Waterman Score=275.
ggggccgccgcccccgcgtgcgcgcatgagccgccggccccccgagcgccacggccggagctgcggcggcggcatcatggccccgaccctgctccagaagctcttcaacaaaaggggcagcagcggcagctccgcggcggcgtctgcccagggcagggctcctaaggaaggacccgcctttagttggtcatgttcggagtttgacctgaatgagattcgcctgatagtttaccaggactgtgacaggagcggccgacaagtcttgtttgactctaaagctgttcaaaagattgaggaggtgacagctcagaaaacagaggatgttcctattaaaatatcagccaagtgctgccagggaagcagcagtgtcagcagcagtagcagcagcagcatctcttcccacagttcttctgggggatcttcacatcatgctaaggaacagcttccaaagtaccagtacacaagaccagcttccgatgtcaacatgttaggggaaatgatgtttggctcagttgccatgagttacaaaggctccaccttaaagatacactacatacgttctcctccacaactgatgattagtaaagtcttctctgctagaatgggcagcttctgtggaagtacaaataacttgcaagacagctttgagtacatcaaccaagatcctaatttgggaaaactgaacacaaatcaaaatagtttgggtccttgtcgtactggaagtaacctaggtctgctgcaagcatgcagcagcaaactgctgcagggggtagctgaaggaggacctctccggctcacccggagtgcttctttctttgcagcacacagcacaccagttgatatgccaagcagaggacagaatgaagacagggacagtggcattgctcgatcaggtacttgtactctgtttattggtttaactaacagagtgaactatctacagtggtgtggaagaaattttcaagtagggtcttgggagagaagagggttgggtgtcagccatactaggaggttgcatcagcaaagttcagtgattaatgggacacaggttatggaggaggaaggaggaaccaaggatgcatctccagtttctaacctgagaaagcgagtggaagcctcactaagcagtcttttgatcacacctttcccatctccaagctcctctacatcttcttccagcagttaccagcgccgctggcttcgaagtcagacaacaagtttggaaaatggcatcatcccaagaagttgagttgcaagtttcctcttgctgagaaaacctccgctggtgatacccaggcaaacagggtctgtagtgtacctccaacaaaccacagcagacctgcagcagacaggcctgttagaaggaaaattaacaagcagaaaacagccacatcaacatcaacaaaaaggacgtccactcagagaccccatccgaaggtcaccaacgtaaaagaccaaaggatcacagctcctcaccagcaagggaacaaaactggatggagaattgagtttgatgaattgacagaagtaggcttcagaaggtgggtaataacaaactcctctgagctaaagaagcatgttctaacccaatgcaaggaagctaagaaccttgaaaaaaggttaggtgaattgctaactagaataactagcttagagaagaacataaatgacctgatggagctgaaaaacacagcacgagaacttcatgaagcatacacaagtatcaatagctggatcaatcaagcagaagaaaggctatcagagattgaagatcaacttaatgaaataaagcgtgaagacaagattacagaaaaaatgaagaattccaccacagtgcttgtgtccacttggggcagccaactagaacaaaataaccttccccacataatttcccctttatttcacagcacccatgacctaaatattagcttttatggaggctgtctgctgcaagcatgcagcagcaaactgctgcaggggttagctgaaggaggacctctccggctcacccggagtgcttctttctttgcagctaaactgtgtttaaccaaacacttccttcctacggaaatgatccttatcaaaagcaggaaaacaacccctgatacacaaccaaggcgattgtacttgttacaaggtgttgtggatcaaactagtagaaaaggccctaccgccttgaatattcggcaaaagaccttcgccgctgctccgccacatcgatga

SEQ ID NO: 15150 - DNA, 1995 bp, Homo sapiens
  SIMILAR (1330)..(1902): 791254mologous to Homo sapiens p40,accession number U93569,Smith-Waterman Score=758.
atgcttgcaggccagcagcgcgagttcccggtgggcgtgggctccgcggaccccgcactcggagccgccggctggccccagcggcctgggcaggctcgggacctgcagctcgccatgcctgagcctcctatcccctccatgggctcctgtgcggctggagcctcgcctacgagcaccgccccctgctccaaggcgcccagtcccatcgaccacccaagggctgcggagtgcaggcgcagggcgcgggactggcaggcagctccacctgcagcccccgtgcgggatccactgggtgaagccagcagggctcctgagtctggtggggcctcggagaacctttatgtctagctcagggattgtaaatacaccagttggcactctatctgtagctcaagctaatctggtggggacatggagaacctttgtgtctagctcagggattgaaaacgcaccaatcagcgccctctcagaccactgggctctaccaatcagcaggatgtggagctgtattccaattttcgctgctcttaaaattttttttaatatcattgcttcccaattgactcacaataacgcagacatagggactgctggagactgtgaccttaaacagttaaagatgtctgcatatacgacatcatgtttgatgggggtgcagggcggtttgccgctgccaccctcggcaccatctctgaactgcccgcttttccggaggagcggaaaagttggaagccgaaaagacaggcgcccggagccctggtctaggtatcaggtgatccggagccctagtcggtgcccactaagaacaccccttctcccatcgggggttcggaggagtgttaagcctgcgggtctgccagtccctaaggcggaactgaaagcgaagatcagccaagagcacagtcggaggcggcagagacggtggcggcctgacctggctctttcgcccctcggagaaccggatcacaactcctcacaagcaagggaacaaaactggatggagaatgagtttgatgaattgacagaagtgggcttcagaaggtggggtaataacaaactcctccctcctgagcctaaagaagcctggttcctaccccaatgccaggaagcctaagaacccttgaaaaaagggttagggtgaattgcctaacctagaataacctagccttagagaagaaccataaatgaccctgatggagctgaaaaacacagcacgagaaccttcatgaagcatacacaagtatcaatagcccaagccgatcaagcggaagaaaggatatcagagattgaagatcaacttaatgaaataaagtgtgaagacaagattagagaaaaaagaatgaaaaaggaacaaacaaagcctccaagaaatatgggactatgtgaaaaagaccaaaactacgtttgattggtgtacctgaaaatgacagggagaatggaaacaagttggaaaacacacttcaggatactattcaggaaaacttccccgaactagcaagataggccaacattcaaattcaggaaatacagagaacaccacaaagatacaccttgagaagagcgaccccaagacacataattttcagattcaccaagattgaaatgaaggaaaaaatgttaagggcaaccagaaagaaaggtcgggttacccacaaagggaagcccatcagactaacagtggatctcttgggtgaaactctacaagccagaaaagagtggggaccaatattcaacattcttaaagaaaagaattttcaacccagaatttcatatccagccaaactaagcttcataagcaaaggagaaataaaatcctttacagacaatcaaatgctgagagattttgtcaccaccaggcctcccttacaagagctcctgaaggaagcactaaatatggaaaaactggtacctcccactgcaaaaacataccaaattgtaaagaccatcaacactatgaagaaactgcatcaactaatgggcaaaataaccacctag

SEQ ID NO: 15151 - DNA, 473 bp, Homo sapiens
  SIMILAR (253)..(86): 671254mologous to Homo sapiens similar to golgi antigen; similar to Q08379 (PID:g2498401),accession number AC004460,Smith- Waterman Score=178.
  misc_feature (1)...(473): n = a,t,c or g
ttcatctcctccntgagctccagcntgatggtgtcctcctcccagtgctgcatctttggcacggccccctggttctgataaaaggtggtccataaagctgctctggagccaaaatattgcagtcacatctcggcagcgacctgccctcaggtggcattttcaagtcatggagaaggtggagagagaagcaatcagcagccacccacttgcaggtgggagaccccagaacttggtgtctgcctcccatggcactgggaaggctggagacaggaagaggaagacagagctcttaccagggggaggcagagatggcacagcaagagacatgcccccagaatgccaccaatgccccaggacaggcccacccatgggaccaggttatcggggccctgaggggatggggtggaatctgaagggtgagccttcttccagcagtcatgttgcaaggaaacgaaatcacgttacttcttcca

SEQ ID NO: 15152 - DNA, 371 bp, Homo sapiens
  SIMILAR (3440)..(4789): 981254mologous to Escherichia coli phenylalanyl-tRNA synthetase beta-subunit,accession number K02844,Smith-Waterman Score=2278.
ctgaacccttgcccccggagcccccagcagtgccctctgaggtggagctgcagcacctgaggaaggaactagagagagtggcaggagagctccagtcccaggtcaaaaacaatcagcacataagtctcctgaaccggcgacaagaagagaggattcgggaacaggaagagaggcttcggaagcaggaggagaggcttcaggagcagcacgagaagcttcggcagctggccaagccacagagcgtggagttgaaagagccaagaggttcagagtttgcagcagcagccagaccatttccctgggtcacctggcagcagtacgttggccaccctatcagcagcaaggtgggccgcctatcagcagctggacct

SEQ ID NO: 15153 - DNA, 558 bp, Homo sapiens
  SIMILAR (467)..(556): 931254mologous to Homo sapiens similar to golgi antigen; similar to Q08379 (PID:g2498401),accession number AC004460,Smith- Waterman Score=145.
cagatgtgcacattaaagaaagagaagcagcaagatatgcgtcgggtagagcagctggagtggagcttgtccaaactcaaaaaccagacgggtaagatggggctggcatgacctgggagcaggactggcatcagagggctgtgagggtggcttagagtgccccagggaggtgggtggatggaagggctttgaggcagagggaaagagatctgtgccaggagaccgcaagtcttgtcatctcagtgagtctcagtgtctcagtgtccccatcagcaaagagggcccgttgtcagccacccgcagtgctctttctctgaaagtgctttggaagactggctaccatctgggtgcgaggaatcattagcagtgaggccaagtttgaggagcctgagaggagctgtgcgccaagaggagggtttttcttttccgagaatccagaggcccttattatctgcttcctttgtcagctgaacccttgcccccggagcccccagcagtgccctctgaggtggagctgcagcacctgaggaaggaactagagagagtggcaggagagct

SEQ ID NO: 15154 - DNA, 784 bp, Homo sapiens
  SIMILAR (453)..(19): 1001254mologous to Escherichia coli 4-aminobutyrate aminotransferase (EC 2.6.1.19) (Gamma-amino-N-butyrate transaminase) (GABA transaminase) (Glutamate:succinic semialdehyde transaminase),accession number D90768,Smith-Waterman Score=752.
tcagcaacaggtatccacggggagggccctacatcatctgctaccctgaaggatctggagagcccgtgccaagagccagcagtagtcctgaacccaaggtccgtaaaaatcagtcaactgaagaacaccatcaaatctttgaaacaacagaagaaacaagtggaacatcagctggaagaagtaacgtgatttctttatttgctcgcgacacgactgctggggtccctgataacctggtcccatgggtgggcctgtcctggggcattggtggcattctgggggcatgtctcttgctgtgccgtctctgcgtctccctggtaagagctctgtcttcctcttcctataggaaaagcaaacgagaaacaaaaagccaaaagggagctagagttctcgagccgcagcagagcacatacggagtgggagttagagcagtccctacaggagaaggcacggctgaaggcatagctaacacaggtgaggttttgcagagggagggatgtggaaggaagatgaccccaggtggccaggagcaggtgaggaccagtgacagcccttcctaacttctgtgcccattcttgcagttgaaggagtcatttcaacaactccaattagaaagagatgagtgtgctgaacatatagaaggagagagggcccggtggcatcagaggatgagtaaaatgtcgcaggaggtgagatctgacccttcagcccccccacattagataggtcactggatctttctgggcatctgtaaaatgggaatagtaaagccagaggtggtccg

SEQ ID NO: 15155 - DNA, 654 bp, Homo sapiens
  SIMILAR (21)..(518): 581254mologous to Homo sapiens similar to golgi antigen; similar to Q08379 (PID:g2498401),accession number AC004460,Smith- Waterman Score=425.
cccgggtcgacgatttcgtggagccagaggcagccagaggccctggagccccagggcctgggggcgagtctgtgagtggggagacccactgtgccctgcaggaagtcacggagaagctggcccatgccaggactcacctccgccttctccatgacttgaaaatgccacctgagggcaggtcgctgccgagatgtgactgcaatattttggctccagagcagctttatggaccaactggaggagaaggcagacctgagtgagctggtgaagaaaaaagaactttgcttcatccaccactggcgagatagatgccatcaatgagtgggaggccagggcacggcagggggagctgcacgaccgtcggaggggccccagcgtctgagccctgtcctcccgcaggaaaatccatcaccttttatcagaaccaggggggccgtgccaaagatgcagcactgggaggaggacaccatcaggctggagctcagggaggagatgaaggtgaagctgctggagctgcagcagatggtattgcggcttacagcaactacaacaatgggcacagaaaattcctggccgctgcccacaaccctgctgatgagcccggtccaggagccccagccccccaggagcttggggctgcagacaagcatggtg

SEQ ID NO: 15156 - DNA, 1270 bp, Homo sapiens
  SIMILAR (373)..(329): 461254mologous to TT virus ORF2 protein,accession number AB031700,Smith-Waterman Score=47.
atgaagaaagttctggagatggatggtggtgatggctgcacaacactcacaagcagctcagggccagcggcgcaggaaaaccccagggtccagccaggtcacgggcacaggcctgcactcacgggtcactgcagtgaggatggaggtgtcactgcaaatgcggctggggaccctcaggaaagtcaggtgtccctgagaaacacccggcaacatgcagaaccacagagacaggaggcaaggttccagacaaatacacccagtagacagttaaagatttcagagctggagagagcttccaacccaacacagcacaaagacgtcttccccaacaaccgcacatcccacttgcaaaacgatgacacgctcctctccaggggctcagaatctagcagtcaggccaggtgggaagtgcagggacctgtggccaaaatcggcccactcatcactcagctgacagctttcacgcgtactagccagaatcagttagaggctggaggtagtgccaggtgtctgaaacccagcaggcaggttggtaaaacactcacacatcctaaccctggtgactgcactgactgcgtgctttactgtagcagaacagttgcacacatctcatctcctccatccatagtaactcagtggctggcacccctactcgagtccttgctacacacgccctggggttgttgcctcttggggaagtgctggcctgactggttgtcaggggccccgtatttctgccatgactcagtccctaatttgctctttgattctggacaagccacctctcctttttgggctcgtgtttccagaggaggtagtgagtatcaaagggtccctgataacctggtcccatgggtgggcctgtcctggggcattggtggcattctgggggcatatctcttgctgtgccttctctgcctccccctggtaagagctctgtcttcctcttccttttcagtgcctctttcagcgacatgaagttaaacccaggtactgtgagtcctcgcctaatttttggttcttatgatgatggttttctggtggaaacagttgttaaatttgattttcaattatggcagaagacacctcttcacagggcagcaggagagagaaggagagccgagcaaaggggaaagctgtctttcgtaatgccttaaatccgtcctcagttaaaccggcggttggcgctggttttttccagggcaggattctgggagacggaggagcagacgccagcatttcgccccggcacctccagcgggctgcggtc

SEQ ID NO: 15157 - DNA, 1808 bp, Homo sapiens
  SIMILAR (2293)..(3057): 951254mologous to Escherichia coli glycine-tRNA synthetase, beta subunit,accession number U00039,Smith-Waterman Score=1230.
atggcagaagaaactcaacacaacaaattggctgcagccaagaaaaagtcagcaacaggtttccacagggaaggccctacatcatctgctaccctgaaagatctggagagcccgtgccaagaacgagcagtagtcctggattcaacgtccgtaaaaatcagtcgactgaagaacaccatcaaatctttgaaacaacagaagaaacaagtggaacatcagctggaagaagtaacggcccctgataacctggtcccatgggtgggcctgtcctggggcattggtggcattctgggggcatgtctcttgctgtgccatctctgcctccccctggaaaagaaagcaaacaacgagagacagaaagccgaaagggagctagaggttcaaatccagacattgatcatacagaaagaggaactaaatacggacctgtaccacatggaacgttctctcagatactttgaagaagagtccaaggacctggctgtccgcctgcaacattcattgcagtgtaaaggagagttagagagcgctctgtctgctgtcatcgccacagagaagaagaaggcaaaccagttgtccagccgcagcaaagcacgtacggagtggaagttagagcagtccatgcgggaggaggcactactgaaagtgcagctgacacagttgaaggagtcttttcaacaagtccaattagaaagagatgagtattctgaacatctaaaaggagagagggcccggtggcagcagaggatgagaaaaatgtcgcaggagatttgcacattaaagaaagagaagcagcaagatatgcgtcgggtagaggagctggagaggagcttgtccaaactcaaaaaccagatggctgaacccttgcccccggagcccccagcagtgccctctgaggtggagctgcagcacctgaggaaggaactagagagagtggcaggagagctccagtcccaggtcaaaaacaatcagcacataagtctcctgaaccggcgacaagaagagaggattcgggaacaggaagagaggcttcggaagcaggaggagaggcttcaggagcagcacgagaagcttcggcagctggccaagccacactgcgcgttttcgaggagctgaacaatgagaacaagagcacacttgcagttggagcagcaagtaaaggagctacaggagaagccttggcgagggtcttcctgcaggtggagctgaagagccaagaggctcagagtctgcagcagcagccagaccattacctgggtcaccctgcagcagagcacctggaagcggccagccagcagaaccagcagctaacggcccagctgagcctcatggctctccctggggaaggacacggaggagaacatctggacagtgagggggaggaggcacctcggcccatgccgagtgtcccagaggacctggagagcagggaggccatggtggcatttttcaagtccgctggagctagtgcccaggagaagcaggcacagttacaagagcaggtgaaagagcagagggtgtgctgccagcgcctggctcacccggtggcctcggcccagaaggagccagaggcagccagaggccctggagccccagggcctgggggcgagtctagcagctttatggaccacctgaaggagaaggcagacctgagtgagctggtgaaaaaaggactctgcttcatccaccactggcgagacagacgccatcagaaaacccatcaccttttatcagaaccagggggctgtgccaaagagcagcactgggaccaggacaccatcaggctggagctcagggaggagatgaag

SEQ ID NO: 15158 - DNA, 2700 bp, Homo sapiens
atgaaactgcagattcaggaagctcatagaacaggaaacaggataaatactaagaagtatacatctatgtacatattcaaactgcagaaaatcaaagagaaaaaaaatcttgaaagaagctggaggaaaaacaagtgtgagagaaatcctttctctgtctatcctctcaacacttggccgcctagcgtgacccctgaaagggaaatgcacagcaatgtgaggacacaaaagacttaccttctagctagaggatcagagaaagtccccagggacccagtgagcttgggaaaaaccactgagagtagcgaatgttggttaaagtctagaaaaaaacccagcaagttagactctggaaaaataatttatctgaaagggtacactcgccagcagttttgccatgagagtacaccaaacaaaggagacagggtcatttataacctgacatgtccaccctactgctgtgtctggtttccattggctggaacgggacctcacattctttatttgtcccgattggctagcaacttagagctttttaaaagaggcaaaggtagaggagaacaaaggaaggaggaagtaacttgtggaatgctgagaaagaaagggtacactcgccagcagttttgccacgagaatacaccaaacaaaggagacagggtcatttatgacctgacgcatccaccctactgctgtgtccggtttccattggctggaacgggacctcacattctgtattcgtcccgaatggctagcaacttaggagtttttagaagaggcaaagtttttagactagtcattggagaacagatgattgatgtcttagggccggagaaacgcagacggcgtaccacacaggaaaagatcgcaattgttcagcagagctttgaaccggggatgacggtctccctcgttgcccggcaacatggtgtagcagccagccagttatttctctggcgtaagcaataccaggaaggaagtcttactgctgtcgccgccggagaacaggttgttcctgcctctgaacttgctgccgccatgaagcagattaaagaactccagcgcctgctcggcaagaaaacgatggaaaatgaactcctcaaagaagccgttgaatatggacgggcaaaaaagtggatagcgcacgcgcccttattgcccggggatggggaacgaaccgatgactggatggatggccgccgcagtcgtcacactgatgatacggatgtgcttctccgtatacaccatgttatcggagagctgccaacgtatggttatcgtcgggtatgggcgctgcttcgcagacaggcagaacttgatggtatgcctgcgatcaatgccaaacgtgtttaccggatcatgcgccagaatgcgctgttgcttgagcgaaaacctgctgtaccgccatcgaaacgggcacatacaggcagagtggccgtgaaagaaagcaatcagcgatggtgctctgacgggttcgagttctgctgtgataacggagagagactgcgtgtcacgttcgcgctggactgctgtgatcgtgaggcactgcactgggcggtcactaccggcggcttcaacagtgaaacagtacaggacgtcatgctgggagcggtggaacgccgcttcggcaacgatcttccgtcgtctccagtggagtggctgacggataatggttcatgctaccgggctaatgaaacacgccagttcgcccggatgttgggacttgaaccgaagaacacggcggtgcggagtccggagagtaacggaatagcagagagcttcgtgaaaacgataaagcgtgactacatcagtatcatgcccaaaccagacgggttaacggcagcaaagaaccttgcagaggcgttcgagcattataacgaatggcatccgcatagggagggactggcaggagtggagctactctttcttcctctgaaaagaggatgcccaagatggacattaactcgacccaggtgtacaactgaggtcctaagaattggtcaatttggtctgccactctcaaggcaagttacttctataaaagggtatgcccttacagatggagcaatgcctcctcgggtgattgatacccaggcaaacggggtctggagtggacctaggcaaactccaacagacctgcagctgaaggtcctgacgaaatgcagctccttgccagcaacagaacaaagctggatggagaatgactttgacgagttgagaaaagaaggcttcagacgatcggtaataacaaacttctccaagctaaaggaggatgttcaaacccatcgcaaagaagctaaaaatcttgaaaaaggattagatgaatggctaactagaataaacagcatagagaagaccttaaatgacctgatggagatgaaaaccatggcatgagaactacatgacacatgcacaagcttcagtagccgagttgatcaagtggaagaaaggttatcagtgatttaagatcaaatgaatgaaatgaagtgagaagagaagtttagagaaaaaaagagtaaaaagaaatgaacaaagcctccaagaaatatggaactatgtgaaaagaccaaatcttcatctgattggtgtatctgaaattgacagggagaatggaaccaagttggaaaacactcttcaggatattttccaggagaacttcacctacctagcaaggcaggccaacattcaaattcaggaaataca

SEQ ID NO: 15159 - DNA, 2128 bp, Homo sapiens
  SIMILAR (701)..(1270): 971254mologous to Escherichia coli glycine-tRNA synthetase, beta subunit,accession number U00039,Smith-Waterman Score=958.
atgggcatgggacctgccaagccaggcatgggagggaatctcctggtctgctggttgcaaagaccatgggaaaagcgcagtatttgggcagaagtgtaccgttcctccaggtatagtcactcatggcttcccttgtctaggaaaggttgtgattttagtggaacctgcaggcagactttaagtatcttaacccagccattgagacagtggggcttagaaggtatcaagaaaccaaacagctggattataagtgaagagtcagtcagtaatggagggcctccgctgctgatacccaggcaaacagcgtctggagtggacctccagcaaactccaacagacctgcagctgagggtcctgactgttagaaggaaaactaacaaacagaaaggaatagcatcaacatcaacaaaaaggacatccacaccaaaaccccatctgtacgtcaccatcatcaaagaccaaagttacataaaaccacaaagatggggaaaaaacatagcagaaaagctgaaaattctaaaaatcagagtggctctctccctccaaaggaatgcagctcctcaccagcagtggaacaaagctggacggagaatgagtttgatgagttcacagaagaaggcttcagaagtgattgaaagtcaaatgaatgaaataaagggagaagagaagtttagagaaaaaagagtaaaaagaaacgaacaaagcctacaagaaatatgggactatgtgaaaagaccagatctacgtctgattggtgtacctgatagtgacggggagaatggaaccaggttggaaaacactctgcaggatattatccgggagaatttccccaacctagcaaggcaggccagcattcaaattcaggaaatacagagaacgccacaaagatactcctcaagaagagcaactccaagacacataattgtcagattcaccaaagttgaaatgaaggaaaaaatgttaagggcagccagagagaaagaactcaagattaagaaactcactcaaaactgcttaactacatggaaactgaacaacctgctcctgaatgactactgggtacataatgaaatgaagggagaaataaagatgttctttgaaaccaatgagaacatagacacaacataccagaatctctggcatacatttaaggcagtgtgtagagggaaatttatagcactaaatgcgcacaagagaaagcaggaaagatctaagattgacaccctagcatcacaattaaaagaaatagagaagcaagagcaaacacattcaaaagctagcagaagacaagaaataactaagatcagagtagaactgaaggagatagagacacaaaaaagccttcaaaaaatcaatgaatccaggagctggttttttgaaaagatcaacaaaattgatagaccactaccaagactaataaagaagaaaagagagaagaatcaaatagacacaataaaaaatgataaaggggatatcaccaccaatcccacagaaatacaaactatcagcagagaatactataaacacctctatgcaaataaactagaaaatctagaagaaatggataaattcctggacacatacaccctctcaggactaaacaaggaagaagttgaatctctgaatacatcaataacaggctctgaagttgaggcaataattaatagcataccaaccaaaaaaaagtccaggaccagatggattcacagccgaattctaccagaggtacaaggaggagctgcctgactgggaaacccctgccagtaggggctcacggacacctcaaacaggcaggtgcccctccgggatgaaccttccagaggaaggatcaggcagcaatatttgctgttctacaatatttgctgttctgcagcctccgctggtgatacccaggcaaacagggtctggagtggacctccagcaaactccaacagacctgcagctgagggacctgactgttaaaaggaaaactaacaaacagaaaggaatagcatcaacatcaacagaaatggacatcaacaccaaaaccccatctgtaggtcaccatcatcaaagaccaaaggtagataaaaccacaaagatcggggagaaaccagagcagaaaagctgaaaattctgtttttttttt

SEQ ID NO: 15160 - DNA, 1272 bp, Homo sapiens
  SIMILAR (694)..(1116): 1001254mologous to unidentified bacterium transposase,accession number Z78058,Smith-Waterman Score=725.
atgagtgctttggagaaaataaagaaggatacggagtggagaaaatggttacagggacttgtcttttcctatttccaggatttggatgctgaggaagaagacattttgttctgccggagatggtccaggactcacagctggtttcctgaaaggctgccacaagatggcgacaacgtcacagtggagaatggccaattgcttctgctggacactaacacaagcatcctcaacttactgcacattaaagggaaagggaattccacaggcttcctcgactatccatttgactatttaataattgaaagggatgcagtccaagttggtctggtgtctggaatgagactggggcctaataaaaaggagcgtcttatacaggagctcaaatgggctgtaccttgtagcattccgagttcaggcctgaattctgagaagggcaagtggcttccgaggcaatcgggcagtatcagtcttcagctgcttatccaagaagatctgggaaggagtcagtcagagagccttgggccagagttccaggggctctggaagtggcttccagggggcaagctgattttcatggccccaggacccatcgagctcagggcacacgccatccttgtttctgatggtggagagctccggattggatccgaagacaagcccttccaaggcagagctcagatcacactctacgggagttcctactcaactcccttctttccctatggagtcaagttcctggctgtgaggaatggaactctttctctgcacgctgggtgcccctctgagatgaagcttccagaagaaggatcaggcagcaacatttgctgttctgcaatatttgctgttcttcagcctctgctggtgatacccaggcaaacagggtctggagtggacctccagcaaactccaatagacctgcagctgagggtcctgactgatagaaggaaaactaacagaaaggaacagcatcaacatcaacaaaaaagacatccacaccaaaaccccatctgttggtcaccatcatcaaagaccaaagatcgcagctccttgccagcaatagaacaaagctggatggagaatgactttgatgagttgacagaagtaggcttcagaagatcggtaataacaaacctctccaagctaaaggaggatgttcgaatccctcacaaagaagctacaaaccttgaaaaaagattagatgaatggctaactagaataaacagcatagagaagaccttagatgacctgatggagctgaaaaccatggcatga

SEQ ID NO: 15161 - DNA, 694 bp, Homo sapiens
  SIMILAR (472)..(648): 931254mologous to Escherichia coli o188,accession number L10328,Smith-Waterman Score=271.
gtcctgtcggcaaagattattgatttacttcaagagttaagagtggcagtttggggatagcaccaggagatatcagctgtgatggcttggagaaacagtgtaaaccggcagtgtaaacaagagcagggcatgtatgagtagttgagaacggtgaatacgagtatgaactagacagaagccagtagggatgacaagtttttttttgggcacagtctaagttggtctggtgtctggaatgagactggggcctaataaaaaggagcgtctatacaggaccttaaatgggctgtaccttgtagcattctgaggacaggccagaattctgagaagggaaagtggtaaaaagtattgtccagtcctttttaagctggtggctgagcttggtgaggtgtgtttttaaaagacctttagtccgttctacttttcttgaagaaggaggaccgtaagggatataaatggtttcactgaatactaagagcctgaaaaactgcttggctgatttgactaataaaggctcgtctgttatcagactgtattgaaggtgggaaggctaaactgaggaattatgtctgacagaatgggaagaaatgactgcggtggccttctcagaccctgtaggaaaggcctttacttattcagtgaaagtgtctatttagactaagaggtattttagtttcctgactcagggcatgtt

SEQ ID NO: 15162 - DNA, 972 bp, Homo sapiens
gaaagtttaggaaccactgacctcaccaataccactttttccacagcaaataggttagaggaggcagaatccaaatccaggatgctatgaatcaaaaggtcaaccctttctcttctgccacggtgcacccccttccctcccccggccaaggccccagcggggtctgcaccctgcctcaggcccattctcttcttctgtgccccactccaccccacccaggatgacttgttcgcggacctggccaacctgagccacctcttcctccacgggaaccgcctgcggctgctcacagagcacgtgtttcgcggcctgggcagcctggaccggctgctgctgcacgggaaccggctgcagggcgtgcaccgcgcggccttccgcggcctcagccgcctcaccatcctctacctgttcaacaacagcctggcctcgctgcccggcgaggcgctcgccgacctgccctcgctcgagttcctgcggctcaacgctaacccctgggcgtgcgactgccgcgcgcggccgctctgggcctggttccagcgcgcgcgcgtgtccagctccgacgtgacctgcgccacccccccggagcgccagggccgagacctgcgcgcgctccgggagggccgattccaggcgtgtccgcccgcgggacccacgcggccgggcagccgggcccgcgggaacagcttctccaaccacctgtacggtccatccagaggctttacagtgtacatatcaacccatgtgtcattccctatatttatcgggttacagaaccggtttacgcagtttcggcttagtgaaacaaaagaaatcaccaatccgtatgccatgcgtttatacgaatccctgtgtcagtatcgtaagccggatggctcaggcatcgtctctctgagagtcgactggatcatagagcgttaccagctgcctcaaagttaccagcgtatgcctgacttccgccgccgcttcctgcag

SEQ ID NO: 15163 - DNA, 1479 bp, Homo sapiens
  SIMILAR (394)..(2): 971254mologous to Plasmid F Protein A,accession number M12987,Smith-Waterman Score=656.
atgggtatcatcgtcatcatcggcgtcagcattgtcaagcagacattgggctgtgagctcagtagtatctcctttaatcctcacaacccctgctcgccaagggcgctcgccgacctgccctcgctcgagttcctgcggctcaacgctaacccctgggcgtgcgactgccgcgcgcggccgctctgggcctggttgcagcgcgcgcgcgtgtccagctccgacgtgacctgcgccacccccccggagcgccagggccgagacctgcgcgcgctccgcgaggccgacttccaggcccgcgcccgcggcaacagctcctccaaccacctgtacggggtggccgaggccggggcgcccccagccgatccctccaccctctaccgagatctgcctgccgaagactcgcgggggcgccagggcggggacgcgcctactgaggacgactactgggggggctacggggcccagacagacccacggacgcccatcacgtgcacacccacactcccgagctctcacacacactcgcaccaagcagagccatgtagcacgtgcaagcacaccaaccacccacgggtcccacaaacaggcagctttttctttccaaccccaaagatgtctctggctattgcttcgaaggtgaatctgggcctcctgctattctcactcctgggattcctgttgccttcctacctcttctattaccgtgcccggctccagcaggagtacgccgccaatgggatgggcccactgaaggtgcttagcggctctgagaatgtctgcagcagatgctacggaggcaaccttgtctctatccatgacttcaacttcaactatcgcattcagtgctgcactagcacagtcaaccaagcccaggtctggattggaggcaacctcaggggctggttcctgtggaagcggttttgctggactgatgggagccactggaattttgcttactggtccccagggcaacctgggaatgggcaaggctcctgtgtggccctatgcaccaaagagcaccaacaatataggaagttccttaatataagcatctccactaatctcatgaagactatactgttgttgagtcattgtacagatgaggagacagataatgatattagtaataataacagcggctgtgaccagcaggacgagatgctcaacctgggcttcaccattggttccttcgtgctcagcgccaccaccctgccactggggatcctcatggaccgctttggcccccgacccgtgcggctggttggcagtgcctgcttcactgcgtcctgcaccctcatggccctggcctcccgggacgtggaagctctgtctccgttgatattcctggcgctgtccctgaatggctttggtggcatctgcctaacgttcacttcactcacggtgagtgtcacaggcctggcctggcagcagagttcccccgagtgggagcccatgaatgtccatggagctctgttctag

SEQ ID NO: 15164 - DNA, 2425 bp, Homo sapiens
  SIMILAR (3378)..(2983): 1001254mologous to Homo sapiens dJ1022E24.3 (KIAA0835, similar to myelin transcription factor 1 (MYT1)),accession number AL121581,Smith-Waterman Score=683.
atgaatgggaagaataagaccaacatttatcaagagccgactgtatgccaggcactgcattggaccctggcacggataggaaaggaggagccgcggcgcgggcagcggggcgaggggcttctgtgctcgcgggagcggcagcccagggggctcagcagccccggcaccgccgcacctgcggctccagcagccccaaccccgccagcgctgcctggccaccgtacccgaagcggctcccccgagggccccgagcctatcctacgccggggcggctccgcggacgcgccgggccgagtcaagacctgggtcaaccgccctgcagcctttgtagggaagtgcctaggtgatgggtctgctgataccgcctgtgaccaggccatgaagggccagaggggctccaatcgcaagcgcaaaacctcgcacagcctcacgtttcccaccagctcagacatgcacgctggcggactttcagcggctcacccgtgtgcacactcacgtgcccccccccccgcttccccaagcccgtacaaaggcagcctgggcacacggacagacggactgacggactctcgagcggacagcgcagctagcggggcgcgggcgctgggcgtcgacggccagccccagccttccccgccccgtcgcgccccgccccgtcccgtcggggccgatggctcctcccgaggcccgcagcccgggcggcgcagggtagagcgccgcggcccggccacgcagcccggggactcccgggccctcccggagccccgcggggtccccgccgtgcatccggcgggctcagggagcgagtgggagcgccctccccccgctgccccctcccccgagcatcgagacaagatgctgcccgggctcaggcgcctgctgcaagcatctgcccgcaggccccagcccttccctgaagcagcccgttgggtgtggagcccttgcttctcgtctgggaccctgtgcccctccttccagagcgagaggcctctgctgcctttccagggagcatcctttcctgggaccactctgcaccagcgactctgccctgtggctgctttgcacggcagtggcaagggccagaaatggcaacagagtcactgttatgcagcagctgttatggaggagcccccagcaccgggtcgctcttcagagagcctgcagggaccactatcatgggctgggggagctcccgcctcggcctgcctcctgctgatgctcctggccctgcccctggcggcccccagctgccccatgctctgcacctgctactcatccccgcccaccgtgagctgccaggccaacaacttctcctctgtgccgctgtccctgccacccagcactcagcgactcttcctgcagaacaacctcatccgcacgctgggggccaggcacctttgggtccaacctgctcaccctgtggctcttctccaacaacctctccaccatctacccgggcactttccgccacttgcaagccctggaggagctggacctcggtgacaaccggcacctgcgctcgctggagcccgacaccttccagggcctggagcggctgcagtcgctgcatttgtaccgctgccagctcagcagcctgcccggcaacatcttccgaggcctggtcagcctgcagtacctctacctccaggagaacagcctgctccacctacaggatgacttgttcgcggacctggccaaccttgagcccacctctttcctccacgggaaccgcctgcggctgctcacagagcacgtgtttcgcggcctgggcagcctggaccggctgctgctgcacgggaaccggctgcagggcgtgcaccgcgcggccttccgcggcctcagccgcctcaccatcctctacctgttcaacaacagcctggcctcgctgcccggcgaggcgctcgccgacctgccctcgctcgagttcctgcggctcaacgctaacccctgggcgtgcgactgccgcgcgcggccgctctgggcctggttccagcgcgcgcgcgtgtccagctccgacgtgacctgcgccacccccccggagcgccagggccgagacctgcgcgcgctccgcgaggccgacttccaggcgtgtccgcccgcggcacccacgcggccgggcagccgcgcccgcggcaacagctcctccaaccacctgtacggggtggccgaggccggggcgcccccagccgatccctccaccctctaccgagatctgcctgccgaagactcgcgggggcgccagggcggggacgcgcctactgaggacgactactgggggggctacgggggtgaggaccagcgaggggagcagatgtgccccggcgctgcctgccaggcgcccccggactcccgaggccctgcgctctcggccgggctccccagccctctgctttgcctcctgctcctggtgccccaccacctctga

SEQ ID NO: 15165 - DNA, 501 bp, Homo sapiens; identical to SEQ ID NO: 4250
  SIMILAR (179)..(487): 1001254mologous to Homo sapiens hnRNPcore protein A1,accession number X79536,Smith-Waterman Score=538.

SEQ ID NO: 15166 - DNA, 636 bp, Homo sapiens; identical to SEQ ID NO: 5058
  SIMILAR (1)..(543): 851254mologous to Homo sapiens hnRNPcore protein A1,accession number X79536,Smith-Waterman Score=844.

SEQ ID NO: 15167 - DNA, 894 bp, Homo sapiens; identical to SEQ ID NO: 945
  SIMILAR (277)..(834): 961254mologous to Homo sapiens hnRNPcore protein A1,accession number X79536,Smith-Waterman Score=985.

SEQ ID NO: 15168 - DNA, 478 bp, Homo sapiens; identical to SEQ ID NO: 9547
  SIMILAR (82)..(285): 981254mologous to Homo sapiens hnRNPcore protein A1,accession number X79536,Smith-Waterman Score=378.

SEQ ID NO: 15169 - DNA, 1677 bp, Homo sapiens; identical to SEQ ID NO: 4253
  SIMILAR (1)..(771): 961254mologous to Homo sapiens hnRNPcore protein A1,accession number X79536,Smith-Waterman Score=1344.

SEQ ID NO: 15170 - DNA, 2093 bp, Homo sapiens
  SIMILAR (471)..(1307): 411254mologous to Homo sapiens hnRNPcore protein A1,accession number X79536,Smith-Waterman Score=400.
  misc_feature (1)...(2093): n = a,t,c or g
tttagattcaaatgtgaatgattggtcggttggccaatcagactggttaacaataacattactcgggaaccaatggactccaaggggtggagacggcgtagaacgaccgaaggaatgacgttacacagcaatgtggcaccacaggccaatagcagggggaagcgatttcaagtatccaatcagagctgttccagggcggagtctaccaatgccgaaagcgaggaggcggggtaaaaaagagagggcgaaggtaggctggcagatacgttcgtcagcttgctcctttctgcccgtggacgccgccgaagaagcatcgttaaagtctctcttcaccctgccgtcatgtctaagtcagagtctcctaaagagcccgcaacagctgaggaagctcttcattggagggttgagctttgaaacaactgatgagagcctgaggagccattttgagcaatggggaacgctcacggacctgtgtggtaatgagagatccaaacaccaagcgctccagggggctttgggtttgtcacatatgccactgtggaggaggtggatgcagctatgaatgcaaggccacacaaggtggattggaagagttgttggaaccaaagagagctgtctccagagaagattctcaaagaccaggtgcccactttaactgtgaaaaaggatatttgttgggtggcattaaagaaagacaaccttttgggggggaaaaaaaaaaagggnaaaaaaacatcacctaagagattattttgaacagtatggaaaaattggaagtgattgaaatccattgactggaccggaggccagtggccaagaaaaaggggctttgcctttgtaaccttttgacgacccttgactccgtggataagattgtcattcagaaataccatactgtgaatggccacaactgtgaagttaagaaaagccctgtcaaagcaagaagatggctagtgcttcatccagcccaaagaggtccgaagtggctctggaaactttggtggtggtcgtggaggtgggtttcggtgggaatggacaacttcggtccgtggaggaaacttcagttggtccgtggtggctttggtggcaccccgtggtggtggtggatatggtgggcagtgggggatggctataatggatttggtaatgatggaagcaattttggaggtggtggaaagctacaatgattttgggaattacaacaatcaagtcttcaaattttggacccatgaaagggaggaaattttggaaggcagaagctctgggccctatgggcggtggaggccaatacttttgctaaaccccgaaaaccaaggtggctatggcggttccagcagcagcagtagctatggcagtggcaggaggttctaattacagccaggaaacaaagcttagcaggaagaggagagccagagaagtgccaggggaagctacaggtttacaacagatttgtgaactcagcctaagcacagtggtggcagggcctagcctgctacaaagaagacatgttttagacaaatactccatggtgtaatgggcaaaaaactccgaggactgtatttgtgactaattgtataacaggttattttagtttcctgttcctgtggaaagtgttaagccattcccaccaaagggttttaatgtagattttttttttttgcaccccatgctgttgattgctaaatgtaacagtctgatcgtgacgctgaataaatgtcttttttttaatgtgctgtgtaaagttagtctactcttaagccatcttggtaaatttccccaacagtgtgaagttagaattccttcagggtgatgccaggttctatttggaatttatatacaacctgcttgggtggagaagccattgtcttcggaaaccttggtgtagttgaactgatagttactgttgtgacctgaagttcaccattaaaagggattacccaagcaaaatcatggaatggttataaaagtgattgttggcacatcctatgcaatatatctaaattgaataatggtaccagataaaattatagatgggaatgaagcttgtgtatccattatcatgtgtaatcaataaacgatttaattctcttgaa

SEQ ID NO: 15171 - DNA, 911 bp, Homo sapiens
  SIMILAR (443)..(910): 631254mologous to Homo sapiens NAG13,accession number AF194537,Smith-Waterman Score=460.
atgcgaaggctcgcattgcgaattttagctccagagcgactgcaagaacaaaccaacaatcccaagaggacccacagaccctctgaaggaagtagactgctcctgcaggaccacagagacaccacaaatactgtgagtgccccaactgcagaagtgggaaagcctccaccacctccactagaacaggtgctggtattcacggctgagagacccatagacggttcacatcacaggactctgtgtggacaaccaccagtaccagcccggagtcagattatccaccatgatcaagtgggtttcataccggggatgcagggatggtttcacgtactcaagccaataaatgtcacacatgacataaacagaattaaaaacaaaaatcacatgatcatctcaatagatgcagaaaaagcattcaacaaaatccagcatctctttatgattaaaactttcagcaaaatcggcatacaagggacacactttaatgataataaaagccatctacgacaaacccacaaccagcataataatgaatgaggaaaagttgcaagcattccctctgagaactggaacaagacaaggatgcccaatctcaccacccctctgcagcatagtactggaagtcctagccagagcaatcagacaagagaaagaaataaagggcatccaaatcagtaaagagaaagtcaaactgtccctgtttgctgatgatatgattgtttaccttgaaaaccctaaggactcctctagaaagctcctagaactgataaaagaattcagcaaagtttccagatacaagattaatgtaaacaaatcagtagctcttctatacaccaacagtgatcctagctgagaatcaaatcaataattcatccccttttacaatagctgcaaaaaaaaaaaatacttag

SEQ ID NO: 15172 - DNA, 539 bp, Homo sapiens
  SIMILAR (12)..(323): 841254mologous to Homo sapiens L7a protein,accession number X52138,Smith-Waterman Score=455.
  misc_feature (1)...(539): n = a,t,c or g
caagatgcggcagagggaaagagcccaaggaaagaaggtgctccggccccagctgtcgtgaagagcaggaggctaagaaagtggtgaatcccctgtttgagaaaaggcctaagaattttggcattggacaggacatccagcccaaaagagacctcacccgctttgtgaaatggcnccgctatatcaggttgcagcggcagagagccatcctctataagcggctgaaagtgcctcctgcgattaaccagttcacccaggccctggaccgccaaacagctactcagctgcttaagctggcccacaagtacagaccagagacaaaggcgctttggctaagctggtggaagctatcaggaccaattacaatgacagatacgatgagatccgccgtcactggggtggcaatgtcctgggtcctaagtctgtggctcgtatcgccaagctcgaaaaggcaaaggctaaagaacttgccactaaactgggttaaatgtacactgttgagttttctgtacataaaaataattgaaataataaaaaaa

SEQ ID NO: 15173 - DNA, 906 bp, Homo sapiens
  SIMILAR (209)..(820): 571254mologous to Mus musculus surfeit 3 protein,accession number M14689,Smith-Waterman Score=452.
cgccgcccaagatgccgaaaggaaagaaggccaagggaaagaaggtggctccggccccagctgtcgtgaagaagcaggaggctaagaaagtggtgaatcccctgtttgagaaaaggcctaagaattttggcattggacaggacatccagcccaaaagagacctcacccgctttgtgaaatcggccccgctatatcaggttgcagcgggcagagagccatcctctataagcggctgaaagtgcctcctgcgattaaccagttcacccaggccctggaccgccaaacagctactcagctgcttaagctgtggcccacaagtacagacccagagacaaagcaagagaagaagcagagactgtttggcccgggccgacgaagaaggctgcttggcaaaaggggacgtccccaacgaagagaccacctggtccttcgaagcaggaagttaacacccagtcaccaccttggtggaggaacaagaaagcttcagctgggtggtggattgcacaccgacgtggattcccatcgagcttggtggtcttcttgccttgccctgtgtcgtgaaaaatgggggtccccttacttgcattatcaagggaaaggcaagacttgggacgtctagtcaccaggaagacctgcaccactgtcgcctttcacacaggtgaacctcggaagacaaagggcgcttttgcttaagctggtggaagctatcaggaccaattacaatgacagatacgatgagatccgccgtcactggggtggcaatgtcctgggtcctaagtctgtggctcgtatcgccaagctcgaaaaggcaaaggctaaaagaacttgccactaaactgggttaaatgttacactgttgagttttctgtacataaaaataattgaaataatacaaattttccttca

SEQ ID NO: 15174 - DNA, 5799 bp, Homo sapiens; identical to SEQ ID NO: 14240
  SIMILAR (3559)..(7917): 1001254mologous to Homo sapiens BC85722_1,accession number AC006486,Smith-Waterman Score=7603.

SEQ ID NO: 15175 - DNA, 6249 bp, Homo sapiens
  SIMILAR (191)..(925): 531254mologous to Homo sapiens BC85722_1,accession number AC006486,Smith-Waterman Score=570.
atgccaagagtggagaaaaacattccaggcagaaggaacagcaaaggctttgaggatccgctggaagttactcaagatgtgaccagagaatgggctaaaaaagttgtttggaagagagaaaaggctagtaagatcaatggtgcttatttctgtgaagggcgagttcgaggagaggcaatcaggatacgaaccatgaagatgcgtcaacaagctactttaactatgactgtggacaagggagataacgtgaacatatctttcaaaaaggtattgattaaagaagaagatgcagtgatttacaaaaatggttccttcatccattcagtgccccggcatgaagtacctgatattctagaagtacacctgcctcatgctcagccccaggatgctggagtgtactcggccaggtatataggaggaaacctcttcacctcggccttcaccaggctgatagtccggattcttcctcctcaaccagaaaacatcaagatttccaacattacacactcctcggctgtgatttcttggacaatattggatggctattctatttcttctattactatccgttacaaggttcaaggcaagaatgaagaccagcacgttgatgtgaagataaagaatgccaccatcactcagtatcagctcaagggcctagagcctgaaacagcataccaggtggacatttttgcagagaacaacatagggtcaagcaacccagccttttctcatgaactggtgaccctcccagaatctcaagcaccagcggacctcggaggggggaagatgctgcttatagccatccttggctctgctggaatgacctgcctgactgtgctgttggcctttctgatcatattgcaattgaagagagcaaatgtgcaaaggagaatggcccaagccttccaaaacgtgagggaagaaccagctgtgcagttcaactcagggactctggccctaaacaggaaggtcaaaaacaacccagatcctacaatttatccagtgcttgactggaatgacatcaaatttcaagatgtgattggggagggcaattttggccaagttcttaaggcgcgcatcaagaaggatgggttacggatggatgctgccatcaaaagaatgaaagaatatgcctccaaagatgatcacagggactttgcaggagaactggaagttctttgtaaacttggacaccatccaaacatcatcaatctcttaggagcatgtgaacatcgagaaaggggtgacagacggcacctggaaaatcaggtcactcccaccctaatactgcgcttttccaacactcttagcaaacggcacaccagaagattatatcccgagcctggctcagagggtcctacacccacggagcctcgctcattgctagcacagcagtctgagatcaaactgcacggtggcagcgagcctccactgctgatattcaggcaaacagggtctggagtggacctccagcaaactccaacaaacctgcagctgagggtcctgactgttagaaggaaaactgacaaacggaaaggacatccacaccaaaaacccatctgttcatcaccatcatcaaagaccaaagaaggcttcagacgatcaaactactccaagctaaaggaggaagttcaaacccatggcaaagaagttaaaaaccttgaaaaaaaattagacaaatggctaactagaataacaaatgcagagaagtccttaaaggacctgatggagctgaaaaccaaggcacgagaactatgtgatgaatgcgcaagcctcactagccaattcgatcaactggataaaagggtatcagtgatggaagatcaaatgaatgaaatgaagcaagaagagaagtttagagaaaaaagaataaaaagaaatgaacaaagcctccaagaaatatgggactatgtgaaaagaccaaatctatgtctgattggtgcacctgaaagtgatggggagaatggaaccaagttggaaaacactctgcaggatattatccaggagaacttccccaatataacaaggcaggccaacattcaaattcaggaaatacagagaacaccacaaagatactcctcgagaagagcaactccaagacacataatagtcagattcaccaaagttgaaatgaaggaaaaaaatgttaagggcagccagagagaaaggagctggttttttgaaaagatcaacaaaattgatagaccgctagcaagactaataaggaagaaaacagagaagaatcaaatagatgcaataaaaaatgataaaggggatatcaccaccaatcccacagaaatacaaactaccatcagagactactataaacacctctatgcaaataaactagaaaatctagaagaaatggataaattcctcgacacatacaccctcccaagattaaaccaggaagaagttgaatctctgaatagaccagtaacaggctctgaaattgaggcaataattaatagcttaccaaccaaaaaaagtccaggaccagatggattcacagccgaattctaccagaggtacaaggaggagctggtatcattccttctgaaactattccaatcaacagaaaaagagggaatcctccctgactcattttatgaggccagcatcatcctgataccaaagcctggcagagacacaacaaaaaaagagaattttagatcaatatccctgatgaacattgatgcaaaaatcctcaatataatactggcaaaccgaatccagcagcacatcaaaaagcttatccaacatgatcaagtgggcttcatccctgggatgcaaggctggttcaacataagcaaatcaataaacgtaatccagcatataaacagaaccaacgacaaaaaccatatgattatctcaatagatgcagaaaaggcctttaacaaaattcaacaacccttcatgctgaaaactctcaataaattaggtattgaagggatgtatctcaaaataataagagctgtctatgacaaccccacagcctatatcttactgaatgggcaaaaactggaagcattccctttgaatactggcacaagacaaggatgccctctctcaccactcctattcaacatagtgttggaagttctggccagggcaatcaggcaggagaaagaaataaagggtattcagttaggagaagaggaagtcaaattgtccctgtttgcagatgacatgattgtatatctagaaaaccccattgtctcagcccaaaatctccctaaactgataggcaacttcagcaaagtctcagtatacaaaatcaatgtgcagaaatcacaagcattcttatacaccaataacacacaaacagagagccaaatcatgagtgaactcccattcacaattccttcaaagacaataaaatacctaggaatccaactcaaaagggatgtgaaggacctcttcaaggagaactacaaaccactgctcaatgaaataaaagaggatacaaatacatggaagaacaattccatgctcatgggtaggaagaatcaacaatgtgaaaatggccatagtgcccaagaattggaaaaaactactttaaagttcatatggaaccaaaaaagagccctcattgccaagtcaatcctaagccaaaagaacaaagctggaggcatcacactacctgacttcaaactatactacaaggctacagtaaccaaaacagcatggtactgttaccaaaacagagatatagaccaacggaacagaacagagccctcagaaataacgccgcatatctacaaccatctgatctttgacaaacctgacaaaaacaagcaatggggaaacaattccctatttaataaatggtactgggaaaactggctagccatatgtagaaagctgaaactggatcccttccttacaccttatacaaaaattaattcaagatggattaaagacttaaatgtcagacctaaacccataaaaaccctagaaggaaacctaggcaataccatgcaggacataggcatgggcaaggacttcatgtctaaaacaccaaaagcaatggcaacaaaagccaaaattgacaaatgggatctaattaaactaaagagcttctgcacaggaaaagaaactaccattggagcgaacaggcaacctacagaatgggagaaaatttttgcaatctactcatctgacaaagggctaatatccagaatctacaatgaactcaaacaaatttacaagaaaaaaaacaaacaaccccatccaaaagtggccaaaggatatgaacagacacttctcaaaagaagacgttatgcagccaaaagacacatgaaaaaatgctcatcatcactggccatcagagaaatgcaaatcaaaaccacaatgagataccatctcacaccagttagaatggcgatcattaaaaagtcaggaaacaacagtgtccagaaaccccataccatcatcgaccaaactctactgccagtagtaggggccagagaagtcaccgaaacagcaattcagaaattaaagatgttcttgggcaagggttttggtgctgtccacccccagcccagccagaaatgtggcttctgtacttctgctgcagttcaagccacttttccagcacatctgtatggttttcgaatagaacgcttctctgaacaccttggcactcccacactcagtctcctttttctcgatgtttcctattatataaggtgtggcagtccaggtcagtatgcaagagatgtagtagctgcagtcagctctgcagcagaaagaaatgacgagcaggatgtgtcactaatgctccacctcaccctttggaagaaaggaaagctgtttcctcctggtgccctgagcgggcaggagagagcagcagatctcccagcacagcacttgagctctgctaaaggacagactgcttcctcaagtgggtccctgacccccatgcctcctgactgggagatacctctcagaagggatcaacagacacctcatgcaggagagctccagctggcatctggagggtgccactctgggatgaagctaccagaggaaggaacaggcagcaatctttactgttctgcatcttccgctggtgatacccaggcaaacagggtatggagtggaccctccagcaactccggcagacctgcacagaggggcctgaccgttagaagaaaaactaacaaatggaaaggaatagcatcaacatcaacaaaaagaacatccacacaaaaaccccatctgaaggtcaacaacagcaaagaccaaaggaggaaattacaattcatccatgggctgtttacccttgaaaatgaatgggcccaggaacaatccataatacaaaagaaatatgcattatggattggaaccaagcagatctgggtggcacaagatcaagcatgcaaaggcaagtctccacattggctcatttaccttttctctcccatctcatctggaataatcctacttcatgttttgtttcggcacctaagaagctctgttgtcgatgtggaaaaatatatgtcctcagtggctttgaatctcaatacggctgttgtggaggtttccttggatcgccccggtgtcaggtcgccaagggtttctacagagagatccgctgttagtctgatcggcttccctttgtgggtaacccaacctttccctctggctgcccttaacattttttctttcatttcaaccttggtgaatctaacagttacgtgtattggggttgctcttatcgaggagtatctttgtggatcaaccccaaacgtgcctgcattttggacaatgttagctaaagctataaatggaacagcagtggtcatggatgataaagatcaattatttcacccaattccagagtctgatgtgaatgctacacagggagaaaatcagccagatctagaggatctgaagatcaaaataatgctgggaatctcgttgatgaccctcctcctctttgtggtcctcttggcattctgtagtgctacactgtacaaactgaggcatctgagttataaaagttgtgagagtcagtactctgtcaacccagagctggccacgatgtcttactttcatccatcagaaggtgtttcagatacatccttttccaagagtgcagagagcagcacatttttgggtaccacttcttcagatatgagaagatcaggcacaagaacatcagaatctaagataatgacggatatcatttccataggctcagataatgagatgcatgaaaacgatgagtcggttacccggtga

SEQ ID NO: 15176 - DNA, 743 bp, Homo sapiens
  SIMILAR (160)..(741): 781254mologous to Homo sapiens p40,accession number U93567,Smith-Waterman Score=790.
cctccactgctgatattcaggcaaacagggtctggagtggacctccagcaaactccaacaaacctgcagctgagggtcctgactgttagaaggaaaactgacaaacggaaaggacatccacaccaaaaacccatctgttcatcaccatcatcaaagaccaaagaaggcttcagacgatcaaactactccaagctaaaggaggaagttcaaacccatggcaaagaagttaaaaaccttgaaaaaaaattagacaaatggctaactagaataacaaatgcagagaagtccttaaaggacctgatggagctgaaaaccaaggcacgagaactatgtgatgaatgcgcaagcctcactagccaattcgatcaactggataaaagggtatcagtgatggaagatcaaatgaatgaaatgaagcaagaagagaagtttagagaaaaaagaataaaaagaaatgaacaaagcctccaagaaatatgggactatgtgaaaagaccaaatctatgtctgattggtgcacctgaaagtgatggggagaatggaaccaagttggaaaacactctgcaggatattatccaggagaacttccccaatataacaaggcaggccaacattcaaattcaggaaatacagagaacaccacaaagatactcctcgagaagagcaactccaagacacataatagtcagattcaccaaagttgaaatgaaggaaaaaaatgttaagggcagccagagagaaag

SEQ ID NO: 15177 - DNA, 621 bp, Homo sapiens
  SIMILAR (271)..(615): 781254mologous to Homo sapiens p40,accession number U93564,Smith-Waterman Score=466.
atgactcttggctatggtcagagaggagctaataaagatttaagaactggtttcgacccagacttgtgcaccatggacaattttgctgagggagatttcactgtggcggattatgccttgttagaagattgccctcacgtggatgattgtgtctttgctgctgaatttatgagcaatgattatgttcgtgtgactcagctttactgtgatggggtgaatgattcattccttattggaggcttattgagaattggttgtaaaatagaaaatgaacgcagctcctcaccagcaatggaacaaagctggacggagaatgactttgacgagttgagagaggaaggcttcagaagatcaaactactccgagctaaaggaggaagttcgaaccaatggcaaagaagttagaaactttgaaaaaaaattagatgaatggataactagaataaccaatgcagagaagtccttaaaggacctgatggagctgaaaaccacggcacgagaactatgtgacaaatgcacaaacctcagtaaccgatgcgatcaactggaagaaagggtatcagcgatggaagatgaaatgaatgaaatgaagcatgaagataagtttagagaaaaagaataa

SEQ ID NO: 15178 - DNA, 621 bp, Homo sapiens
  SIMILAR (298)..(618): 761254mologous to Homo sapiens p40,accession number U93567,Smith-Waterman Score=421.
atgactgttcagtgccagccctggagtctgcacagaaaagtgagtcctttagtgctacttgcaacagttaaaaaccagtttggtatatgtcagaccatcaggacagaaaacagagtctgcaatgaacatgcttatggcccacactttccagtcaaagagaatcaagacctacacaaatgggtgagggcttgctacatgagaagtaagcaggaacaatacgagaaccaagacaagctacaagcaggacatgaacacatcaaaaggcttctgaaaagacacgtctacctagcctgtgaccaggaacgcagctcctcaccagcaacggaacaatgctggacggagaatgactttgacgagttgagagaagaaggcttcagaagatcaaactactccgagctaaaggaggaagttcgaaccaatggcaaagaagttaaaaaccttgaaaaaaaattagatgaatggctaactagaataaccaatgcagagaagtccttaaaggacctgatggagctgaaaactatggcacgagaactatgtgacgaacgcacaagcctcagtagccgatgcgatcaactggaagaaagggtatcagtgatggaagacgaaatgaatgaaatgtag

SEQ ID NO: 15179 - DNA, 597 bp, Homo sapiens
  SIMILAR (274)..(594): 731254mologous to Homo sapiens p40,accession number U93567,Smith-Waterman Score=398.
atgtctctaggccatgcagactggctttgtgctgggttctttaaagcctgcacaaagtgtatgttcactcttgcactgagtgaagttcaagttcactcttgcgcagagcttgcactgaggggagggatcggccaagacaaaatttccagaggaatgatcaggcagcagcatttgctgctcaccaatatccactgttctgcagccaccgctgctgacacccaggcaaacagggtctggagcgacctccagcaaaatccaacagacctgcagctgagggaatgcagctcctcaccagcaaaggaacaaagctggatggagaatgactttgacgagttgagagaaggcttcagaagatcaaactactctgagctaaaggaggaagttcaaacccatggcaaagaagttgaaaaccttgaaaaaaaaatagatgaatggctaactagaataaccaatgcagagaagtccttaaaggacctgatggagctgaaaaccatggcacgagaacaatgtgatgaatgcacaagcctcagtagccgacgcgatcaactggaagaaagggtatcagtgattgaagatcaaattaatgaaatgaagtga

SEQ ID NO: 15180 - DNA, 1453 bp, Homo sapiens
  SIMILAR (19)..(171): 361254mologous to Caenorhabditis elegans similar to myoblast cell surface antigen (SP:CS24_HUMAN, P23246) and D. melanogaster No -on-transient A protein (PIR:JH0162),accession number U23172,Smith- Waterman Score=72.
ctctgtctgatctggagctcgcagcccagtcaataatcttcatttttgctggctatgaaaccaccagcagtgttctttccttcactttatatgaactggccactcaccctgatgtccagcagaaactgcaaaaggagattgatgcagttttgcccaataaggaacgcagctcctcaccagcaacggaacaaagctggacggagaatgactttgacgagttgagagaagaaggcttcagacgatcaaactaccctgagctaaaggaggaagttcgaacccatggcaaagaagttagaaaccttgaaaaaaagattagacaaatggctaactagaataatcaatgcagagaagtccttaaaggacctgatggagctgaagaccatggcacgagaactacgtgatgaatgcacaagcctcagtagccaattcaatcaactggaagaaagggtatcagtgatggaagatcaaatgaatgaaatgaagaaagaagagaagtttagaagaaaaagaataaaaagaaaggaacaaagcctccaagaaatatgggactatgtgaaaagaccaaatctacgtctgattggtgtacctgaaagtgacggggagaatagaacgaagttggaaaacactctgcaggatattatccaggagaacttccccaatctagcaaggcaggccaacattcaaattcaggaaatacagagaacgccacaaagatactcctcgagaagagcaactccaagacacataattgtcagattcaccaaagttgaaatgaaggaaaaaatgttaagggcagccagagagaaagaaatacaaactaccatcagagaatactataaacacctctatgcaaataaactagaaaatctagaagaaatggataaattcctcgacacatacactctcccaagactaaaccaggaagaagttgaaactctgaatagaccaataacaggttctgaaattgaggcaataattaatagcttaccaaccaaaaaaagtccaggaccagatggattcaccgccgaattctaccagaggtacaaggaggacctggtaccattctttctgaaactattccaatcaatagaaaaagagggaatcctccctaactcattttatgaggccagcatcatcctgataccaaagcctggcagagacacaaccaaaaaagagaattttagaccaatatccctgatgaacagtgatacaaaaatcctcaataaaatactggcaaaccgaatccagcagcacatcaaaaagcttatccaccatgatcaagtgggcttcatccctgggatgcaaggctggttcaacatacgcaaatcaataaacataatccagcatataaacagaaccaacgacaaaacccacatgattatctcaatagatgcagaaaaggcctttaacaaaattcaacagcccttcatgctaaaaactctgaataaattag

SEQ ID NO: 15181 - DNA, 538 bp, Homo sapiens
  SIMILAR (99)..(1): 691254mologous to Homo sapiens PRO2550,accession number AF130089,Smith-Waterman Score=102.
acctgagtccgggagtttgagaccagcttgatcaacatgggataacctcgtctctactaaaaacacgttaaaattagctgggcgtggtggcgcatgcctcattcacgtacatgggagagtctacaaagtcacacgtatttaataggttaagccacatgctgacaaaatgtcataagaagacccttacacttttaccttggccgatcccctcccctcagtgcaagctctgtgcaagagtgaacttgaactrtcactcagtgcaagagtgaacacacactttgtgccggctttaaagaacccagcacaaagccagtctgcatggcctacagacatattttggctgggacaatgattacttgcttttctttttgtttttcttgtatttgcctgtttgattgggctcctgacataccagaaaatcactgtcaaaacattagcttaacatttgttaaggaaacaaaaagacttcggtgaccacaccttataaaccaaacagttttgtaaatcactttggaaaatttcactaaaaactcgtgcc

SEQ ID NO: 15182 - DNA, 5466 bp, Homo sapiens
  SIMILAR (1)..(3003): 971254mologous to Homo sapiens unknown,accession number AF149422,Smith-Waterman Score=5062.
cgggcccggtgctgaagggcagggaacaacttgatggtgctactttgaactgcttttcttttctcctttttgcacaaagagtctcatgtctgatatttagacatgatgagctttgtgcaaaaggggagctggctacttctcgctctgcttcatcccactattattttggcacaacaggaagctgttgaaggaggatgttcccatcttggtcagtcctatgcggatagagatgtctggaagccagaaccatgccaaatatgtgtctgtgactcaggatccgttctctgcgatgacataatatgtgacgatcaagaattagactgccccaacccagaaattccatttggagaatgttgtgcagtttgcccacagcctccaactgctcctactcgccctcctaatggtcaaggacctcaaggccccaagggagatccaggccctcctggtattcctgggagaaatggtgaccctggtattccaggacaaccagggtcccctggttctcctggcccccctggaatctgtgaatcatgccctactggtcctcagaactattctccccagtatgattcatatgatgtcaagtctggagtagcagtaggaggactcgcaggctatcctggaccagctggccccccaggccctcccggtccccctggtacatctggtcatcctggttcccctggatctccaggataccaaggaccccctggtgaacctgggcaagctggtccttcaggccctccaggacctcctggtgctataggtccatctggtcctgctggaaaagatggagaatcaggtagacccggacgacctggagagcgaggattgcctggacctccaggtatcaaaggtccagctgggatacctggattccctggtatgaaaggacacagaggcttcgatggacgaaatggagaaaagggtgaaacaggtgctcctggattaaagggtgaaaatggtcttccaggcgaaaatggagctcctggacccatgggtccaagaggggctcctggtgagcgaggacggccaggacttcctggggctgcaggtgctcggggtaatgacggtgctcgaggcagtgatggtcaaccaggccctcctggtcctcctggaactgccggattccctggatcccctggtgctaagggtgaagttggacctgcagggtctcctggttcaaatggtgcccctggacaaagaggagaacctggacctcagggacacgctggtgctcaaggtcctcctggccctcctgggattaatggtagtcctggtggtaaaggcgaaatgggtcccgctggcattcctggagctcctggactgatgggagcccggggtcctccaggaccagccggtgctaatggtgctcctggactgcgaggtggtgcaggtgagcctggtaagaatggtgccaaaggagagcccggaccacgtggtgaacgcggtgaggctggtattccaggtgttccaggagctaaaggcgaagatggcaaggatggatcacctggagaacctggtgcaaatgggcttccaggagctgcaggagaaaggggtgcccctgggttccgaggacctgctggaccaaatggcatcccaggagaaaagggtcctgctggagagcgtggtgctccaggccctgcagggcccagaggagctgctggagaacctggcagagatggcgtccctggaggtccaggaatgaggggcatgcccggaagtccaggaggaccaggaagtgatgggaaaccagggcctcccggaagtcaaggagaaagtggtcgaccaggtcctcctgggccatctggtccccgaggtcagcctggtgtcatgggcttccccggtcctaaaggaaatgatggtgctcctggtaagaatggagaacgaggtggccctggaggacctggccctcagggtcctcctggaaagaatggtgaaactggacctcaaggacccccagggcctactgggcctggtggtgacaaaggagacacaggaccccctggtccacaaggattacaaggcttgcctggtacaggtggtcctccaggagaaaatggaaaacctggggaaccaggtccaaagggtgatgccggtgcacctggagctccaggaggcaagggtgatgctggtgcccctggtgaacgtggacctcctggattggcaggggccccaggacttagaggtggagctggtccccctggtcccgaaggaggaaagggtgctgctggtcctcctgggccacctggtgctgctggtactcctggtctgcaaggaatgcctggagaaagaggaggtcttggaagtcctggtccaaagggtgacaagggtgaaccaggcggcccaggtgctgatggtgtcccagggaaagatggcccaaggggtcctactggtcctattggtcctcctggcccagctggccagcctggagataagggtgaaggtggtgcccccggacttccaggtatagctggacctcgtggtagccctggtgagagaggtgaaactggccctccaggacctgctggtttccctggtgctcctggacagaatggtgaacctggtggtaaaggagaaagaggggctccgggtgagaaaggtgaaggaggccctcctggagttgcaggaccccctggaggttctggacctgctggtcctcctggtccccaaggtgtcaaaggtgaacgtggcagtcctggtggacctggtgctgctggcttccctggtgctcgtggtcttcctggtcctcctggtagtaatggtaacccaggacccccaggtcccagcggttctccaggcaaggatgggcccccaggtcctgcgggtaacactggtgctcctggcagccctggagtgtctggaccaaaaggtgatgctggccaaccaggagagaagggatcgcctggtgcccagggcccaccaggagctccaggcccacttgggattgctgggatcactggagcacggggtcttgcaggaccaccaggcatgccaggtcctaggggaagccctggccctcagggtgtcaagggtgaaagtgggaaaccaggagctaacggtctcagtggagaacgtggtccccctggaccccagggtcttcctggtctggctggtacagctggtgaacctggaagagatggaaaccctggatcagatggtcttccaggccgagatggatctcctggtggcaagggtgatcgtggtgaaaatggctctcctggtgcccctggcgctcctggtcatccaggcccacctggtcctgtcggtccagctggaaagagtggtgacagaggagaaagtggccctgctggccctgctggtgctcccggtcctgctggttcccgaggtgctcctggtcctcaaggcccacgtggtgacaaaggtgaaacaggtgaacgtggagctgctggcatcaaaggacatcgaggattccctggtaatccaggtgccccaggttctccaggccctgctggtcagcagggtgcaatcggcagtccaggacctgcaggccccagaggacctgttggacccagtggacctcctggcaaagatggaaccagtggacatccaggtcccattggaccaccagggcctcgaggtaacagaggtgaaagaggatctgagggctccccaggccacccagggcaaccaggccctcctggacctcctggtgcccctggtccttgctgtggtggtgttggagccgctgccattgctgggattggaggtgaaaaagctggcggttttgccccgtattatggagatgaaccaatggatttcaaaatcaacaccgatgagattatgacttcactcaagtctgttaatggacaaatagaaagcctcattagtcctgatggttctcgtaaaaaccccgctagaaactgcagagacctgaaattctgccatcctgaactcaagagtggagaatactgggttgaccctaaccaaggatgcaaattggatgctatcaaggtattctgtaatatggaaactggggaaacatgcataagtgccaatcctttgaatgttccacggaaacactggtggacagattctagtgctgagaagaaacacgtttggtttggagagtccatggatggtggttttcagtttagctacggcaatcctgaacttcctgaagatgtccctgaatgtgcagctggcattccctcgacttctctcccgcccgagcttcccagaacatcacatatcactgcaaaaatagcattgcatacatggatcaggccagtggaaatgtaaagaaggccctgaagctgatggggtcaaatgaaggtgaattcaaggctgaaggaaatagcaaattcacctacacagttctggaggatggttgcacgaaacacactggggaatggagcaaaacagtctttgaatatcgaacacgcaaggctgtgagactacctattgtagatattgcaccctatgacattggtggtcctgatcaagaatttggtgtggacgttggccctgtttgctttttataaaccaaactctatctgaaatcccaacaaaaaaaatttaactccatatgtgttcctcttgttctaatcttgtcaaccagtgcaaggtggaccgacaaaattccagttatttatttccaaaatgtttggaaacagtataatttgacaaagaaaaatgatacttctctttttttgctgttccaccaaatacaattcaaatgctttttgttttatttttttaccaattccaatttcaaaatgtctcaatggtgctataataaataaacttcaacactctttatgataacaacactgtgttatattctttgaatcctagcccatctgcagagcaatgactgtgctcaccagtaaaagataacctttctttctgaaatagtcaaatacgaaattagaaaagccctccctattttaactacctcaactggtcagaaacacagattgtattctatgagtcccagaagatgaaaaaaattttatacgttgataaaacttataaatttcattgattaatctcctggaagattggtttaaaaagaaaagtgtaatgcaagaatttaaagaaatatttttaaagccacaattattttaatattggatatcaactgcttgtaaaggtgctcctcttttttcttgtcattgctggtcaagattactaatatttgggaaggctttaaagacgcatgttatggtgctaatgtactttcacttttaaactctagatcagaattgttgacttgcattcagaacataaatgcacaaaatctgtacatgtctcccatcagaaagattcattggcatgccacaggggattctcctccttcatcctgtaaaggtcaacaataaaaaccaaattatggggctgcttttgtcacactagcataggagaatgtgttgaaatttaactttgtaagcttgtatgtggttgttgatcttttttttccttacagacaaccataataaaata

SEQ ID NO: 15183 - DNA, 1832 bp, Homo sapiens
  SIMILAR (766)..(2145): 961254mologous to Homo sapiens putative p150,accession number U93563,Smith-Waterman Score=2329.
  misc_feature (1)...(1832): n = a,t,c or g
atagattccggaagggccggagatccagtctgcacaaggttctggggggtttttcttccagccagggtaggacgggaccctgaaggtatgggggcccaaaatttttaaaacccagggtatttaggttttttttcccccttttccccttaaaaannnnnnnnnncccctgagggcttaaaatttggtgggggggtgggcccaattgggcccccccccaaaaaaaggtttctttccaaaaattcccaggagggttttaattgggcccccataaggggaaaaactatggccttgccaggcccgggtaaaattgggccccccaaggggtcttttaaaagggcccccccnnnnnnnnnnnnnnnngtcttttttnnnctagaacaactcagccaaaataaaattccctgtttattgttggacaacatatgtttcaaaacatacatcaaaacaggccaaaaaaaaataaacagcaacttcatagacagaaagaaaaggaaaaaaaaaaatctttttatctttcggcctttttaacccatctccatacaaacccaactacttataggtacaggctaaggtacatacacaaaaaaagttacttggaatgcctccggaataaagattggtttttctgttggtccatttttggctttttttaccaaggtttttttttttctcctttgaggattataatggaacatgggtcaccacccacaaggtaaaggtcaggaaggtaggggccggaggaaccgcttccggaaaggctgggtttgggtccatcccgaggatccattaaaaaatggggctggaccccttaacaattatgtaccaaaaaatataaaaatgtaaaaataaaaaaatacaaaacaaaatttcccctttttaaagtaccttttaagaaaaaaaagcaggggcctttggaagttttgggttccttttttccctcccctgttgcaaaattctcatggtttgggtttgggtggtggagagcgccgttgtcatctgcggggtgggcactgcccacgggtgggcggggccgggcctctcttactcgaaggtgaccaacgtttagattctgaggacggggaagtgggaggggtgaatagggtcacgggcggccttttttttttttagttttaacttttcgcttttttgctgtcttagttcatccccgtcgggtcttctggcttcttgggtatcggacatcgtcatcctcatcatccttcagctgcccgcttgcccggtagctgactcagcttcctcaatcttcaatctcccatcctcttcctcaaccaatcaaccttccttccttccctccctccctccttccctccccaaccttccttccctccttcttcgtctaacctccatttgtccagcctcccttgcttccccaattttccctcattctcagcattccccgttaagcaagggcggtcttcttcccattttctgccttcttccacaacttccttcttctccctttaaagtcccttggtgggtgatttcggagcctggtgtctacggctggcgtctggacatggtggggcacgccgggtgatccgatgcagggggattaaaaagaaaagcgagagttcagggactctgggcgataaagactgccggagatscgcggcggcggaggaaggcgcgcgaacggaggcggcttgcggccgagcaaggaaggcggatgaaggaacaatgcaaagatggcttttcagagcagccagtggggccctgaagctgatggggtcaaatgaaggtgaattcaaggctgaaggaaatagcaaattcacctacacagttctggaggatggttgcacgaaacacactgggga

SEQ ID NO: 15184 - DNA, 422 bp, Homo sapiens
  SIMILAR (1)..(333): 391254mologous to Arabidopsis thaliana F5A9.21,accession number AC004133,Smith-Waterman Score=199.
tctttaataggatgctttaatctggatcccaatagagtcttggatgtcattttagaagtgtttgaatgcaggccagaacacgatgacttctttatatctttgttagaatcttacatgagtatgtgtgaaccgcaaacactgtgtcatattcttgggttcaaattcaagtcttaccaggaaccaaatggcgagacaccatcatctttatacagagttgcagcggtacttctacaatttaatcttattgatttagatgatctttatgtacatcttcttccggctgataattgcattatggatgaacacaaacgagaaattgcggaagctaagcaaattgttagaaagctaacgataatagagtaagtcttctgaaaaaatggatgagcgagagaaagaaaaggaaaaagaagaggagaacagag

SEQ ID NO: 15185 - DNA, 1782 bp, Homo sapiens
  SIMILAR (1087)..(2478): 961254mologous to Homo sapiens unknown,accession number AF148856,Smith-Waterman Score=2341.
ttttttttttagagaaagaaaaaagggggcccaggggaccggcgttcagcatacggaggacccatgccggcactggcctctgagttcccttagtatttattgatcatttttaggtgtttctcggagaggggggtgtggcagggtcatagaataatagtggagagaaggtcagcagataaacacgtgaccaaagttcttggcatcatagccaatgtaaaggattaagtgctgtgcttttagatatgcatacacataaacatctcaatgccttaaagagcagtattgctgccagcatgtcccacctccagtcctaaggcggttttctcctatctcagtagatggaatatacaatcgggctttacaccgagacattccattgcccagggacgagccggagacagatgccttcctcttatctcaactgcaaagaggccttccttcctcttttactaatcctcctcagcacagaccctttacgggtgtcgggctgggggacggtcaggtctttcccttcccacgaggccatatttcagactttcacatggggagaaacgttggacaatacctggctttcctaggcagaggtccctgcggccttccgcagtttttgtgtccctgggtacttgagattagggagtggtgatgactcttaaggagcatgctgccttcaagcatctgtttaacaaagcacatcctgcaccgcccttaatccattcaactctgagtggacacagcacatgtttcagagagcacggggttgggggtaaggtcatagattaacagaatctcaaggcagaagaatttttcttagtacataacaaaatggagtctcctatgtctacttctttctacacagacacagtaacaatctgatctctcttgcttttccccacatttcccccttttcttttcgacaaaaccgccatcgtcatcatggcccgttctcgatggtcgctgtctcttcggagctgttgggtacacctgcagacaccattgatacaatcatcaaggctgcaagcagcatactctctggggtttgtttcacctttgtgttctctagatattttgtagctaactgcgtcagcttctttagttgtgcccaagttggcggctctgccttcttggtggatggcaacttcatctgttcttctgacgtcaccattttgttcatcttgtgagtcaacggtgctcgattgcgatgtctccgtctccgcggaggtgcttttctttgcatctctgatgggttcattgtagaacttcaaatgtcgtaaggctgactgtagatgtactcgggatctctcgtcgacttgtcctcaatgaccacgctcgagcgtaccttcaccctagagaaaagcctccacgttgggcaccagatgtaggggtgggttgcccctacacacctgtgggtgtttctcgtaaggtgggacgagagatttggaaaagaaaaagacacagagacaaagtatagagaaagaaagaaggggacccggggaaccagcgttcagcatatggaggatcccgccagcctctgagttcccttagtatttattgatcatctgtgggtgtttctcaaagagggggatgtgtcagggtcacaagacaattgtggggagagggtcagcagacaaacacgtgaacaaaggtcttggcatcatagacaatgtaaaggattaagtgctgtgcttttggatatgcatacacataaacatctcaatgctttacaaagcagtattgctgcccgcaggtcccacctccagccctaaggcggtttttccctatctc

SEQ ID NO: 15186 - DNA, 1167 bp, Homo sapiens
  SIMILAR (493)..(969): 321254mologous to Arabidopsis thaliana F5A9.21,accession number AC004133,Smith-Waterman Score=146.
gcggccgcggctgtggtggttcccgcagagtggataaagaactgggagaaatcagggagaggcgaatttttgcatttatgtcggatcctcagtgaaaataaaagccatgatagttcaacatacagagatttccagcaagctctctatgagttgtcatatcatgtaattaaaggaaatctaaagcatgaacaggcatctaatgttcttagtgacattagtgtaagaatttcgtgaggatatgccctccattcttgctgatgtattctgcatattagacattgagacaaattgtttagaagaaaaaagcaagagagactattttacacagttggtattagcatgtttgtatttagtttcagacacagttctaaaggaacgcctggatccagaaacactggaatcattagggcttatcaaacaatcacagcaattcaatcaaaagtcagttaaaatcaagacaaaactcttttataaagcagcaaaaattcaattttggttaaagaagagaatgaaggttatgccaagctgattgctgaattggggcaagatttatctggaagtattactagtgatttaatcttagaaaatatcaaatctttaataggatgctttaatctggatcccaatagagttttggatgtcattttagaagtgtttgaatgcaggccagaacacgatgacttctttatatctttgttagaatcttacatgaccctaaggcggttttcccctatctcagtagatggaatatatgatcgggttttacaccgagacattccattgcccagggaggagcaggagacagatgccttcctcttgtctcaactgcaacgaggcgttccttcctcttttactaatgctcttcagcacagaccctttacgggtgtcggactgggggacgagaggaatgtacatggcgcattgtctgcttacaagcgaatctgtgatgaaacaaacaaaccaggcaaaccatcgtggcatggacatatttctgaaaagagtgacacctcctcaagaagagcctcaggtccttcaggaggtattccagaagaagacattgtcatcatagatgaccgcttcatgagtgttattgcccctaaacatcttctagtgggacaagatgtggagatggaagacagtgatactgatgattctgatcctgtgtag

SEQ ID NO: 15187 - DNA, 379 bp, Homo sapiens; identical to SEQ ID NO: 1692
  SIMILAR (90)..(377): 981254mologous to Homo sapiens SIL1 protein,accession number AJ299442,Smith-Waterman Score=481.
  misc_feature (1)...(379): n = a,t,c or g

SEQ ID NO: 15188 - DNA, 994 bp, Homo sapiens
  SIMILAR (337)..(1851): 941254mologous to Homo sapiens putative p150,accession number U93563,Smith-Waterman Score=2435.
gctcgacttttttttttttttttttttttttggcgttcaggtttccatttaatggccaagccagcactgccaagatgtcctcctgcctgagaagcccacccacgctggcacccctcagcctcactagcggcatcccagtccagtcctggtgtggggcctcatctcagctccttcagcaagctgttgacagagcccagcagctcctggaagtagccctcgtcctcaccatcctgcagctccaggctggccagcacctggtactcagcctgcaggctggccaagtgtcctgccgaagctgggggtcctgacggtagcggtcccgggcaggtggtcagggaggacgcccagtgtctgcagcaccttctcacgggcatcatgctcgggcagcgccaggaggtgggccgtgatctcgcaccagccctgttcccacaggcctggcaggaggtgtacctggcgatactgctgcagcttctctggggacatctcctgggtcagctcagcctcctcctcggcgaacatctgtgcttcctgcggcagcaggaagtcgtggggctgattggggctggcagaggaaactgaggaggggtgcaatcctgcatccttctccgtgaccaggtcgtagagcagtgtgaccacgcgcacggcgagcacctccgtgcccttctcctgcaccagggtcctcaggacctgcagccccccgagcttcaggaactgccgctgggcataggggaagtggcgcagcagggagcacagtgcaaacaggaccttcttctttgcagtgagcggctgctccgtggccaggatgaccagcagcttctgcagggctcccccttcgatggcctccacctggaccttggggttgctggggaagaagcacaggacagcatgactacccttttgtaaattgctgaaatcaggttcataaggcaataaattcatgttttcacccacagccaagtctgtgggtacggcaggaccatgggccaaacatggg

SEQ ID NO: 15189 - DNA, 1329 bp, Homo sapiens
  SIMILAR (145)..(1083): 801254mologous to Homo sapiens SIL1 protein,accession number AJ299442,Smith-Waterman Score=1169.
ggaattcccgggtcgacgatttcgtcggaggccgaaggtccctgactatggctccccagagcctgccttcatctaggatggctcctctgggcatgctgcttgggctgctgatggccgcctgcttcaccttctgcctcagtcatcagaaccgtgaaggagtttgccctgaccaacccagagaagagcagcaccaaagaaacggagagaaaagaaaccaaagccgaggaggagctggatgccgaagtcctggaggtgttccacccgacgcatgagtggcaggcccttcagccagggcaggcttgtccctgcaggaatcccacgtacgggctgaatcttcagactggggaaagagaggcaaaactccaatatgaggacaagttccgaaataatttgaaaggcaaaaggctggatatcaacaccaacacctacacatctcaggatctcaagagtgcactggcaaaattcaaggagggggcagagatggagagttcaaaggaagacaaggcaaggcaggctgaggtaaagcggctcttccgccccattgaggaactgaagaaagactttgatgagctgaatgttgtcattgagactgacatgcagatcatggtacggctgatcaacaagttcaatagttccagctccagtttggaagagaagattgctgcgctctttgatcttgaatattatgtccatcagatggacaatgcgcaggacctgctttcctttggtggtcttcaagtggtgatcaatgggctgaacagcacagagcccctcgtgaaggagtatgctgcgtttgtgctgggcgctgccttttccagcaaccccaaggtccagggtgggaggccatcgaagggggagccctgcagaagctgctggtcatcctggccacggagcagccgctcactgcaaagaagaaggtcctgtttgcactgtgctccctgctgcgccacttcccctatgcccagcggcagttcctgaagctcggggggctgcaggtcctgaggacccttggtgcaggagaagggcacggaggtgctcgccgtgcgcgtggtcacactgctctacgaccttgtcaccgagaaaaatgttcgccgaggaggaggctgagctgacccagggagatgtccccagagaagctgcagcagtatcgccaggtacacctcctgccaggcctgtgggaacagggctggtgcgagatcacggcccacctcctggcgctgcccgagcatgatgcccgtgagaaggtgctgcagacactgggcgtcctcctgaccacctgccgggaccgctaccgtcaggacccccagctcggcaggacactggccagcc

SEQ ID NO: 15190 - DNA, 480 bp, Homo sapiens; identical to SEQ ID NO: 11476
  SIMILAR (133)..(291): 1001254mologous to Homo sapiens ribosomal protein L27,accession number L19527,Smith-Waterman Score=278.
  misc_feature (1)...(480): n = a,t,c or g

SEQ ID NO: 15191 - DNA, 798 bp, Homo sapiens
  SIMILAR (43)..(2433): 831254mologous to Homo sapiens putative p150,accession number U93563,Smith-Waterman Score=3353.
  misc_feature (1)...(798): n = a,t,c or g
gtagaagcttgggttgaatctttcaatctgctgccatccgcggcttgggggtcgaaggtccgggcggcgcgggtgcattccttccctaggtctctggcggctacgtatccgatcctgtcctgcgagcagggccctcggcggccttgaccaaggcgacagtgaacacagtctgaagttccggcccaagacctgggcttgctggcaggagtcagcttctgggcatctttggctttccggatttttaagtggcccttttctccttgctctctgcagaaatgggccaagttcaatgaaaccctgggaaaggtggtgccttgtcctgggctggacggcttactccgggaccgcaaagctgtccatcgtggaagaaccattgaatgatgggcacctccagatcgcccctacgagcccatgctactggtggctggaattgaccggttanccccgcaaagtgacaagcgtccatgggcaaaagagaagatagccgaggagatcaaagatgaaatcttttggtgaaagtgtataactacaatcaccgtaatgcccacaaaggtactctgtggagtatccccttgggacaaaactgtccgtcgaataaggatgtctttcagagaatccctgctctttaaacggcaaggccccgacgggaaggcccaaggttcaagtttgaaagagagagtacgagacagggcaaggaacaagttggttcttcccagaaacttgcgggttttaagaatgcctttggttttgattcattaaaaattataaagaaaaaaaaaaaaaaaaaaaaagtcgagc

SEQ ID NO: 15192 - DNA, 1326 bp, Homo sapiens
  SIMILAR (454)..(837): 821254mologous to Homo sapiens ATP-binding cassette, sub- family F (GCN20), member 2,accession number BC001661,Smith-Waterman Score=537.
atggatgccaagatctcagtcagtacgacatctcgactcgactcacatcatatcactgctacgatatggtcgaatcgacatacgacattgcgtctgcatcgagcacacctagatcagcatgacgtccgatacatcgatcgatctcgactcgctcatgacgaattaacgtctgataggcgatacagtctgttagtcagttcacatcgacgttctcgccagacacacgacacgatcaacgtcaccatctcctatcgagcagttacacagcaacaacacaacggccgcatcctctggcaaaaagcttcacacggcgtcttaacacagtcggcatcctcacagccggcccgccgttcgtcagtagcatcagctcggtcgctctgcgttactagacacacgaactgtctctatgcagaaagcaaaaaatggagacgctgtcacagaaccacaggtggcagaaatgaggccaatggcaaagacaccgcagaagtggatttgctgaccaaggagctagaggactttgaaatgaagaaagctactgctcgagctgtcactggcatcctggcctcccatccctgcagtactgacgttcacattatcaacctctcactcacctttcacggtcaagagctgcccagtgacaccaaactggaattgaactcagtccgtcattatggcctcattggcttaaatggaactgaaaattccatgctgctctctgctgttgggaaacatggagtgcccatccctgagcacatcgacatctaccatctgactcgagagatgccccctagtgacaagacacccttgcactcactcgtcacagtctcatcgccgcgacaacgtgacgacatgagcgatggccatctctgcacagcacgacgtcatacagacatacgagacgatcgctctcctgacgcacccgatactgcacgatctctcgctcgctcgaccatcactacacgacgcatattcgcactcgcgacaccgagccgtaccttgcagcaagtctgcagcgcactcgcatacacatctcatccggctgcacgcacgcagcctctcgcctcaactgctctcacacgccgttacatgttaccaagccctcagctgccttctttacgcgaccatcgccgcactaatccactccactccgcggtagccacaattccacacacgactaccggagaagcagacgtctcgctcctgtgcatcggactcagtacgcttcactacgcgctcgtctatcatgtgagcgtactgactgcattgagtgctcagtctatgtcagcaactgatgcaagtatcatcttcttcgagccgaagaggtag

SEQ ID NO: 15193 - DNA, 537 bp, Homo sapiens
  SIMILAR (3)..(536): 981254mologous to Homo sapiens zinc finger protein,accession number X78932,Smith-Waterman Score=995.
agaaaccctacaaatgcaatgaatgtggtaaagcctttaactggtcctcaactcttactaaacataagagaattcatactggagagaaaccctacaaatgtgaagaatgtggcaaagcttttaaccagtcctcaacccttactagacataagatagttcatactggagagaaaccctacaaatgtgaagaatgtggtaaagcctttaaacggtccacaactcttactaaacataagagaatttatactaaagagaaaccatacaaatgtgaagaatgtggaaaagcctttagtgtattctcaacccttactaaacataagataattcatactggagcaaaaccttacaaatgtgaagaatgtggcagtgcctttagggcattctcaacccttactgaacataagagagttcatactggagagaaaccttacaaatgcaatgaatgtggtaaagcctttaactggtcctcaactcttactaaacataagagaattcatactggagagaagccctacaaatgtgaagaatgtggcaagc

SEQ ID NO: 15194 - DNA, 457 bp, Homo sapiens
  SIMILAR (10)..(1644): 571254mologous to Homo sapiens zinc finger protein (583 AA),accession number X51760,Smith-Waterman Score=1660.
atgcccaggccagaaaaactgggaaaaacacaggttcccccacttgctgaatgtttgacaaaagattcttttttgggccaaaaacaggcatcactgggaccattgacatttagagatgtgaccatagaattctctctggaggagtggcaatgcctggacacggttcagcagaatttatatagggatgtgatgttagagaactacagaaacctggtcttcctggttattagttctcatttacacaagacttttggccagatcagagcataaaagattctttccaagaataatattgagaacatatgcaagatgtggacataagaatttacgattagaaaagattgtgaaagtgtcaatgaggaaacatcagataattcatactggaaagaaaccctacaaatgtgaagaatgtgcaaagcttttagccagtcctcaacccttagaaaacatgagataa

SEQ ID NO: 15195 - DNA, 397 bp, Homo sapiens
  SIMILAR (80)..(397): 951254mologous to Homo sapiens EGF-like module EMR2,accession number AF114491,Smith-Waterman Score=499.
tttgccgtcctcatggcccactacgatgtgcaggaggaggatcccgtgctgactgtcatcacctacatggggctgagcgtctctctgctgtgcctcctcgctggcggccctcacttttctcctgtgtaaagccatccagaacaccagcacctcactgcatctgcagctctcgctctgcctcttcctggcccacctcctcttcctcgtggcaattgatcaaaccggacacaaggtgctgtgctccatcatcgccggtaccttgcactatctctacctggccaccttgacctggatgctgctggaggccctgtacctcttcctcactgcacggaacctgacggtggtcaactactcaagcatcaacagattcatgaagaagctcatgttccctgtgggc

SEQ ID NO: 15196 - DNA, 1335 bp, Homo sapiens
  SIMILAR (355)..(1005): 971254mologous to Homo sapiens putative p150,accession number U93568,Smith-Waterman Score=1072.
atggcgctgcaaaagattgtggacaaatttgagtcacttctcaccaatcagactttatggagaacagaagggagacaagaaatctcatccacagctaccactattctccgggatgtggaatcgaaagttctagaaactgccttgaaagatccagaacaaaaagtcctgaaaatccaaaacgatagtgtgagctattgaaactcaagcgattacagacaattgctctgaagaaagaaagacattcaacttgaacgtccaaatgaactcaatggacatccgttgcagtgacatcatccagggagacacacaaggtcccagtgtcattgcctttatctcatattcttctcttggaaacatcataaatgcaactttttttgaagagatggataagaaagatcaagtgtatctgaactctcaggttgtgagtgctgctattggacccaaaaggaacgtgtctctctccaagtctgtgacgctgactttccagcacgtgaagatgacccccagtaccaaaaaggtcttctgtgtctactggaagagcacaggggcaggggcagccagtggtccagggatggctgcttcctgatacacgtgaacaagagtcacaccatgtgtaattgcagtcacctgtccagcttcgctgtcctgatggccctgaccagccaggaggaggatcccgtgctgactgtcatcacctacgtggggctgagcgtctctctgctgtgcctcctcctggcggccctcacttttctcctgtgtaaagccatccggaacaccagcacctcactgcatctgcagctctcgctctgcctcttcctggcccacctcctcttcctcgtggggattgatcgaactgaacccaaggtgctgtgctccatcatcgccggtgctttgcactatctctacctggccgccttcacctggatgctgctggagggtgtgcacctcttcctcactgcacggaacctgacagtggtcaactactcaagcatcaatagactcatgaagtggatcatgttcccagtcggctatggcgttcccgctgtgactgtggccatttctgcagcctcctggcctcacctttatggaactgctgatcggatgctggctttcaaagcaacagctcagctcttcatcctgggctgcacatggtgtctgggcttgctacaggtgggtccagctgcccaggtcatggcctacctcttcaccatcatcaacagcctccaaggcttcttcatcttcttggtctactgcctcctcagccagcaggccaaacacaaattcacgcccatggaagttcccaggcagaatcaccgatgcttacagcagaattaa

SEQ ID NO: 15197 - DNA, 397 bp, Homo sapiens
  SIMILAR (692)..(489): 291254mologous to Homo sapiens zinc finger protein,accession number AF060503,Smith-Waterman Score=69.
ctccctcctctctgttttctcctcactctcctgccccacctcgacatccacagcgaggcaatgaagaagcccctgccaaggaagagcccgcttctcagtgggacaccgggaaggtagacacccaacagtcaccgctagtgggaggcgattgtgcagaagcacgagggttgttacaggatcgggcaggtcccctaccccagtctcggactcagggtcctgtctgaggcggccaccccgaagcgtggggtttgcggagacgtagggccgacctcccgcccccgctgcgcgcgtttctggccctgccagtgtctccgccggttgaaagcgcgtgtctgcgtcgggttctgttggagtgcgttcgatgcgccgtgggtccgcgctgcttccacccaacttc

SEQ ID NO: 15198 - DNA, 278 bp, Homo sapiens
  SIMILAR (41)..(274): 331254mologous to Mycobacterium thermoresistibile RNA polymerase beta,accession number AF057489,Smith-Waterman Score=77.
atgaagtttcatgacagaggccaaatgcagcccaaacccagcccagcagaggctgtcaactcagcgccccagcgagagccggaaggttccatcctcagagctgcagaccctctcgtgtgggctgcaaaggccatgtctgcatcccgggcggaagttgggtggaagcagcgcggacccacggcacaccgaacgcactccaacagaacccgacgcagacacgcgctttcaaccggcggagacactggcagggccaaaaacgcgcgcagcgggggcgggag

SEQ ID NO: 15199 - DNA, 800 bp, Homo sapiens
  SIMILAR (78)..(701): 351254mologous to Herpesvirus papio NTR,accession number AF200364,Smith-Waterman Score=122.
atgaagtttcatgacagaggccaaatccagcccaaacccagcccagcagaggctgtcaactcagcgccccagcgagagccggaaggttccatcctcagagctgcagaccctctcgtgtgggctgcaaaggccatgtctgcatcccgggcgccctgggcccgacccctactacgcctctgcctcgacgcgaacgcggagcccgagcgcgcgtcacgccgtgtggggccgaagaggctgctacccagaggcggagtgcgggctcgcgagggtccccaccccactctcgctcccgccagcacctacggactcgcgtccccgccgcgcgccgactcggcgcaccgcccccggcacaggagcctcacgcgcctcttacctaacaggaagttgggtggaagcagcgcggacccacggcacaccgaacgcactccaacagaacccgacgcagacacgcgctttcaaccggcggagacactggcagggccaaaaacgcgcgcagcgggggcgggagggcagccctgggattcggcaaacgccagtcctccctgagatgcttccccatccttccctccgccaggccctacgtctccgcaaaccccacgcttcggggtggccgcctcagacaggaccctgagtccgagactggggtaggggacctgcccgatcctgtaacaaccctcgtgcttctgcacaatcgcctcccactagcggtgactgttgggtgtttaccttcccggtgtcccactgagaagcgggctcttccttggcaggggcttcttcattgcctcgctgtggatgtcgag

SEQ ID NO: 15200 - DNA, 824 bp, Homo sapiens
  SIMILAR (456)..(7): 921254mologous to Cloning vector pZC320 SopB,accession number U26464,Smith-Waterman Score=682.
gtctccgccggttgaaagcgcgtgtctgcgtcgggttctgttggagtgcgttcggtgtgccgtgggtccgcgctgcttccacccaacttcctgttaggacccacccgaggacgggtcaccatggctttggagcacctggtagtgtggcatgtccacagtgaagaccagagtttcgttgtccttaagactgacctggggagacgtggctgcaggcatttgaggaagacggcaccgaaagcgaagaaggaagctcctgccccttctaaagctgaagccaaagcgaaggctttaaaggccaagaaggcagtgtttgaaaggtgttccgcagccacacgcaaaaaagaagatccgcattttcaattcaactttcaaggcggcccaagacactgcggactgccggagacagcccaaaatatcctctggaagagcgctcccagggagaaacaagccttgaccccacctatgcctatccatccaagtttccccgctgacccactgatctgcctctgccgtgaagaagataggaagacaaccaacacacttgtgttccattgtgggatgtttaaaggccaacaaggcaccaggtttaaaacagggctgtgaaagaagctgtatgacattgattgtggccaaaggtcaacacccctgattccggcctgatggagagaagaatggcatatgttccgactgggctcctgatttacgatgcttttgggatgtttgccaacaaaattggggttcatcttaaacttgagtccagcttgcctaattcttgaatatatatatatatatatatctttttcacccataaaaaaaaaaaaaaa

SEQ ID NO: 15201 - DNA, 1311 bp, Homo sapiens
  SIMILAR (1323)..(955): 961254mologous to Cloning vector pZC320 SopB,accession number U26464,Smith-Waterman Score=590.
atgctgcgaatggtgggtatcgagatttccaatggtcagtggtcaactcctccttgccaagtcctccacctagagggtaatgatatctataaccctaaagaacaaggattaggtaacacctgcagatggggctggatggctgctggtactagaagaaacctgtgctgggcaccgttccccttccttaacccagtggcttccctggtactgcattcaaccatccaaatcgccctacaagaatccaaggacagagttctgggaaccctgattaatagcccgttggtcacaagcacagataaagccaactggagcttgcgattggcattggaagtgggtgacgggggcggtcttgtaggactgagccctcaacctgtgggatctggtgctatgtccaggtgtccaaattgtacaagaaaattaataggaagtggaatttcaccaacttcttcaaccctggctgaagaacaaggttccgttgtcaaaactcattcacaccaaggtggtgctcgatgctcaaaagagaagggttggcagatacttcttatcttagttgctggcctctgccagttggtagtggttgtccagaatgttggagtaagaaagattccaaggaagtacctggctgcactcagagtggccataggacatgctttggccattgaaagaaggagaattcgagtggacgttgctgatcaagcacaggatacagacagggacgatcgttcttttggccgtgatagaaatcgggattctgacaaaacagatacagactggagggctcgttctgccacagacagctttgatgactacccgcctagaaggggtgatgataggtttggagacaagtatcgagatcgttatgattcagaccagtatggccgtgggtattggtatgagtatcgggatggcccatgccgggatatggatcgatatggctggcggcagtggcagaagggcatttggcagtgggtacccagggacaatgactacagaggaggcagggaccgctatgaagaccgatacaacagatgggatgatgggtcgtgcagctccagagatgatttctctcgggatgattgtaggtataatgatagacgtccccctcaaagacccaaactgaatctaaagcctcataatactcctaagggagatgattcttctgctagtacctcccagtccagtcgagcttcttttgtctttggaggggcaaagcccgttgatagagctgctagagaaacaaaagtagaagaatggctacagaaggaacaagataagttgcagcatcagctggatgaggcaaaactagaatga

SEQ ID NO: 15202 - DNA, 328 bp, Homo sapiens; identical to SEQ ID NO: 12619
  SIMILAR (23)..(289): 961254mologous to Homo sapiens nucleophosmin,accession number M23613,Smith-Waterman Score=446.

SEQ ID NO: 15203 - DNA, 305 bp, Homo sapiens
  SIMILAR (128)..(262): 971254mologous to Homo sapiens nucleophosmin,accession number M23613,Smith-Waterman Score=224.
gcgttcttttatctccgtccgccttctctcctacctaagtgcgtgccgccacccgatggaagattcgatggacatggacatgagccccctgaggccccagaactatcttttcggttgtgaactaaaggcaactttgaaaatgtgtgtacagccaacggtttcccttgggggctttgaaataacaccaccagtggtcttaaggttgaagtgtggttcagggccagtgcatattagtggacagcacttagtagctgtggaggagatgcagagtcagaagatgaagaggaggaggatgtgaactctta

SEQ ID NO: 15204 - DNA, 273 bp, Homo sapiens; identical to SEQ ID NO: 6533
  SIMILAR (161)..(271): 971254mologous to Rattus norvegicus nucleolar protein B23.2,accession number J04943,Smith-Waterman Score=176.

SEQ ID NO: 15205 - DNA, 1344 bp, Homo sapiens
  SIMILAR (1036)..(1293): 931254mologous to Homo sapiens Membrane-bound protein PRO1310,accession number Y66645,Smith-Waterman Score=426.
agtgtggtggaattcattccgtcctgcgcggttgttctctggagccagcgttcttttatctccggtccgccttctctcctaccataagtgcgtgccgccacccgatggaagattcgatggacatggacatgagccccctgaggccccagaactatcttttcggttgtgaacctaaaggccgacaaagattatcactttaaggtggataatgatgaaaatgagcaccagttatctttaagaacggtcagtttaggggctggtgcaaaggatgagttgcacattgttgaagcagaggcaatgaattaccgaaggcagtccaattaaagtaacactcggcaactttgaaaatgtcttgtacagccaacggttttcccttggggggcttttgaaataacacccacccagtggtctttaaggttgaagtgtgggttcagggccagtgcatattaagtggacagcactttagtaagctgttggaggaagatgcagaagtcagaagatgaagaggaaggaggatgtgaaactctttaagtatatctgggaaagcggtctgccccatggaggtggtagcaaggttccacagaaaaaaagtaaaactttgctgctgatgaaagatgatgacgatgatgatgaagaggatggatgatgaagatgatggatgatggatggattttggatggatggaggaagctgaagaaaaagcgcccagtgaaagaaatcctatacgagatactcccagccaaaaatgcacaaaagtcaaatcagaatggaaaagactcaaaaccatcatcaacaccaagattcaaaaggacaagaatccttcaagaaacaggaaaaaactcctaaaacaccaaaaggacctagttctgtagaagacattaaagcaaaaatgcaagcaagtatagaaaaaggtggttctcttcccaaagtggaagccaaattcatcaattatgtgaagaattgcttccggatgactgaccaagaggctattcaagatctctggcagtggaggaagtctctttaagaaaatagtttaaacaatttggtaagagaatttaccgtcttatttcatttctgtaacagttgatatctggctgtccttttttataatgcagagtgagaactttccctaccgtgtttgataaatgttgtccaggttctattgccaagaatgtgttgtccaaaatgcctgtttagtttttaaagatggaactccaccctttgcttggttttaagtatgtatggaatgttatgataggacatagtagtagcggtggtcagacatggaaatggtggggagacaaaaatatacatgtgaaataaaactcagtattttaataaagt

SEQ ID NO: 15206 - DNA, 1107 bp, Homo sapiens
  SIMILAR (298)..(438): 611254mologous to Homo sapiens Human secreted protein, SEQ ID NO: 6395,accession number G02314,Smith-Waterman Score=133.
atgggcgccttgctggatcaggagcacagtgaacaccctgccggatccagagagatggaagtcagtggtgggtctgtgacagtggcaaacagcagtcgtggacaacgagcgaaagctcaggcattcaccacagtggcagatgcaagaaaactctgggggatgcagggggctcctgttggagactgtgtgcaccattgcactgaaggtggtgttggtttgggttggagtgctggctggcactggtctgggtgtcctttctgtgacctgcaagcagttgtgattactcaggttgtaaaaagacagagaatggaacagcttggagggcttagaaaaagacaggaagatgtggaaggtttggaacttcctagagtcttgttgaatggttttgaccaaaatgctgatagtgatatgagtaatgaagtccagactgaggtggttttgggtgaagaagaggctatcagtgtgggtagaggggcaaaatcaggtgtgggctgggtcagagagatccatgctctgactctccatatgtggggcaatctgcagccactgtgggagttgagggacagttacctcaccactgatgtaatgtaccagagtggagaaaagctgcctctactgcacagaatagtttgtgcaagaagtggggcacagcaggcatcagtaagccccacccagatcccatgcacttggcaagttaatactgatagactcgccccagtatccaaaaagaaggaaataatcttaccagataccatcccagttaccctgggttccgtggactcactggatgtgggggtgaaggatcccgggcaccctcagtcttccattgtcagtgccagcagtgaagagatttcctcctgtaatgaccttggtcaaagtgaaacaattcatgggggttcgggccttgataaaccacctgaccacaaggtggacaaaggcccaactgaagaaagagcctgcctcttatcatattctgctgggagaaagtacaaggagtaccacattctgccggaacaagggtcagaaccacctcatcatggggacatcttatcaatatccttccaggcagcaagccatattgctcagacccctcctgcccatacctag

SEQ ID NO: 15207 - DNA, 1968 bp, Homo sapiens
  SIMILAR (255)..(707): 331254mologous to Streptomyces coelicolor A3(2) putative translation initiation factor IF-2(fragment),accession number AL355913,Smith-Waterman Score=139.
atgttggcatctatgggagttgtggccaaggaaatgaaatatctgagctcaccttatccccagcatgcatttcataccaggatcaaatcactaatgaccgtgaatttccaggctcaactatggctgcctaatgaggctggccccactggggatggggactggggaggggacacacacgggtgcccaagcttcagtccacatctccctcggttcatccagaagcagccatggggcacaggaagacgtctgcttcaagagcatttcagctgcaaaagtctggttcctgtaattccctcccgggatattgaggcattccacttgcatgcggaccttatcctcaacactctgccaagtctggtcatcataataggtcagatagagtcacattctgaggaactgcgggctagagtttcaacatatgaatctggggaagatacaattcagtgcataacagtgacctggaagccaaaatatggagccacaagatggaaggatcctggatccccagatggccccttggaagagagaagactagaagacctctcaactaggaacaacagcattagactttttagaggctgcggctatcgggtgaaacagaactcctcacagagaccaaacaaggtttgtgggttaccagacactggtgttctcttacagacaaagtgtggtcttgtcagaaatagccaaagatcagcacaaacaaacacaaagcagcatgaagaactgttttctactgctggaataccagaaaatctgagcaggagacaagaagtgttgccaggacatggctttactggttgggttggttggacatggaaattgacatctggagaaggagtgactttccaccatctctcagcaacacacaagctgagtcatgccagctgccggcagggcaattttaagcccaaaggggccatgtccgtcacccgatccacagtacacccacacctagctttcctgtctgcagagataaacggcaaatgcgggaggccatgtgtctttctgggtatctgggccatcaactgtggaatggccattttatatgagcgtttatcagccttggtttgtgtatcagtgtcggagagacacctggattatacaatgcggtttctctttgacattcccccttccactttggaggctcgcattggcagccccctgtgggccctctcactgcatccccttagaagctccacagtgacttcctctgtggagctgattctccctgaatgcacagtggctgtgttagagattcaatatgtctttttgggggacacaattctcttcactacagtgggcaaagccagaagtggcacaagagacagagatggaggcagggcccagatcatgcaggttttgcaaggcaaaggccgggagctggacgctgccgcgcagcccgagggccagctgctccgggaggtgcgcgtgctcggggtccccttcatccctcgcgcccgggtggatgcgtggctggtgcacaccgtggctgtcgggagcgcggacgaggcccacgggctgctcggcgccgccgccgcctcgtccaccggaggagctggcgccagcgtggacggcggcagccaggctgtgcaggggggcggcggggatccccgagcggctcggagtggtcccttggacgccggggaagaggagaaggcacccgcggaaccgacggctcaggtggcggacgctggcggatgtgcgagcgaggagaacgaggtactaagagaaaagcacgaagctgtggatcatagttcccagcgtgaggaaaatgaagaaagggtgtcagccctgaaggagaactcacttcagcagaataatgatgatgaaaacaaaatagcagagaaacctgactgggaggcagaaaagacctctgaatctagaaatgagagacatctgaatggggcagatacttctttctttctctctggaagacttattccagttgctttcatcacagcctga

SEQ ID NO: 15208 - DNA, 2583 bp, Homo sapiens
  SIMILAR (311)..(12): 331254mologous to murine herpesvirus 68 serine threonine rich glycoprotein,accession number Y09060,Smith-Waterman Score=96.
atgaagcacctgaagcggtggtggtcggccggcggcggcctcctgcacctcaccctcctgctgagcttggcggggctccgcgtagacctagatctttacctgctgctgccgccgcccaccctgctgcaggacgagctgctgttcctgggcggcccggccagctccgcctacgcgctcagccccttctcggcctcgggagggtgggggcgcgcgggccacttgcaccccaagggccgggagctggaccctgccgcgccgcccgagggccagctgctccgggaggtgcgcgcgctcggggtccccttcgtccctcgcaccagcgtggatgcatggctggtgcacagcgtggctgccgggagcgcggacgaggcccacgggctgctcggcgccgccgccgcctcgtccaccggaggagccggcgccagcgtggacggcggcagccaggctgtgcaggggggcggcggggacccccgagcggctcggagtggccccttggacgccggggaagaggagaaggcacccgcggaaccgacggctcaggtgccggacgctggcggaatgtgcgagcgaggagaatggggtactaagagaaaagcacgaagcgtgtggatcatagttcccagcatgaggaaaatgaagaaagggtgtcagcccagaaggagaactcacttcagcagaatgatgatgatgaaaacaaaatagcagagaaacctgactgggaggcagaaaagaccactgaatctggaaatgaagagacatctgaagtgggacagatacttctttctctcttggaagacttattccagttgctttcatcacagccctgaaaattcacttggagggcatctccatttggggagatattcctcttcccaggcagtatcagtgatgggcatgaattcttcaagcacatttatcatgtaaactttcagcccaggcttataagtccaggatggtgaatcttcatgaggccatcttgctttgtcccaacaatacatttagaagagatccaacagcaaggacttcacagtcacaagaaccatttctgcagttaaattctcataccaccaatcctgagcaaacccttcctggaactaatttgacaggatttctttcaccggttgacaatcatatgaggaatctaacaagccaagacctactgtatgaccttgacataaatatatttgatgagataaacttaatgtcattggccacagaagacaactttgatccaatcgatgtttctcagctttttgatgaaccagattctgattctggcctttctttagattcaagtcacaataatacctctgtcatcaagtctaattcctctcactctgtgtgtgatgaaggtgctataggttattgcactgaccatgaatctagttcccatcatgacttagaaggtgctgtaggtggctactacccagaacccagtaagctttgtcacttggatcaaagtgattctgatttccatggagatcttacatttcaacacgtatttcataaccacacttaccacttacagccaactgcaccagaatctacttctgaaccttttccgtggcctgggaagtcacagaagataaggagtagataccttgaagacacagatagaaacttgagccgtgatgaacagcgtgctaaagctttgcatatccctttttctgtagatgaaattgtcggcatgcctgttgattctttcaatagcatgttaagtagatattatctgacagacctacaagtctcacttatccgtgacatcagacgaagagggaaaaataaagttgctgcgcagaactgtcgtaaacgcaaattggacataattttgaatttagaagatgatgtatgtaacttgcaagcaaagaaggaaactcttaagagagagcaagcacaatgtaacaaagctattaacataatgaaacagaaactgcatgacctttatcatgatatttttagtagattaagagatgaccaaggtaggccagtcaatcccaaccactatgctctccagtgtacccatgatggaagtatcttgatagtacccaaagaactggtggcctcaggccacaaaaaggaaacccaaaagggaaagagaaagtgagaagaaactgaagatggactctattatgtgaagtagtaatgttcagaaactgattatttggatcagaaaccattgaaactgcttcaagaattgtatctttaagtactgctacttgaataactcagttaacgctgttttgaagcttacatggacaaatgtttaggacttcaagatcacacttgtgggcaatctgggggagccacaacttttcatgaagtgcattgtatacaaaattcatagttatgtccaaagaataggttaacatgaaaacccagtaagactttccatcttggcagccatcctttttaagagtaagttggttacttcaaaaagagcaaacactggggatcaaattattttaagaggtatttcagttttaaatgcaaaatagccttattttcatttagtttgttagcactatagtgagcttttcaaacactattttaatctttatatttaacttataaattttgctttct

SEQ ID NO: 15209 - DNA, 394 bp, Homo sapiens
  SIMILAR (79)..(183): 1001254mologous to Homo sapiens Human secreted protein, SEQ ID NO: 5728,accession number G01647,Smith-Waterman Score=180.
aagacgacgatttcgtgtggcggctgcggcagtagggacagcatgagcagtggtgctgtcagcgcggccgtcggagacatgggagacccggggtcggagataatagaatctgtccctccagctggccctgaggcatctgagtcaacaacggatgaaaatgaagacgacattcagtttgtcagtgttctctttggtttccagcaagatgcatcaaaccttaccatagcatggctaggacccaacccggtaccagaaataaagaaaatggccctgcaggacccacagccctggacaatgtggcttcctcagatgacacaggccgacacaggccccagacgtaatgctgaagaagacaagtcagatgactgaggcgaatctgccccgacacagacac

SEQ ID NO: 15210 - DNA, 1832 bp, Homo sapiens
  SIMILAR (357)..(662): 301254mologous to Mus musculus expressed in select embryonal carcinoma cells and testicular cells; similar to Swiss-Prot Accession Number P11260,accession number U15647,Smith-Waterman Score=103.
atgcagaggaaaaccatgagtcagccagagctcatcaaagatacctgggtgacttccagctgtgatgagccaagcctgactcagaccagaccaagtgcccaactgggcaagcccagatcaccaacccacggaattagagacccatattcgggaaatgcctttctgcctggtgaaagctccagtgaggatgaagagcctttagcagaattgtcaaaggaagaattgtgcgccaaaataaaaagcctgaaagaaaaacttaacaaacacccgggaaaggaaaacagccgactttcgacagtctttgggtcatgctttcaagtgtttaccacaaggcagttcacccagtttgaagaattggttggtatggccgaggctctgcttaagggtgggggaaccatgtctacatctgcatccaccctctggagagcaacaaacaactcctcgccagattcatttgcctcaacatgcagtaattctaattctaactccagttcaccagtttccttaaagcctgaggaagagcatcagactgatgagaaacagttccagattgaaaaatggcagattgcccgttgtaacaagagcaagcctcagaagtttattaatgatttaatgcaagtactttacacaaatgaatacatggccactcacagcctgacaggggcaaaatcctctacttcaagggacaaagctgtaaaaccagctatgaatcagaatgaagtccaaggaaatcatagcaagatgcatcaaaccttaccatagcatggctaggacccaacccggtaccagaaataaagaaaatggccctgcaggacccacagccctggacaatgtggcttcctcagatgacacaggccgacacaggccccagacgacccagctggcccctggcttcgcccacccactgcagctggcgtcttttaggcgcatggttcttttcctctccggcgaggggcggtctcggggcggacccgaactacaattcccagcatcctgccggcgcggggagggaagcccgggagtgagagaaagcggctccgggggcatagcggccactagcactccaaactacccacccaaccaagattccaaagagcatgacattcgaggcgccgaacaccagaaacaagaacagccggccaaaccaccccatacagcacgatcggcttaccccccacagaagagctcataccccgcaaacgcaaaagcaacccgccactcccccgaaaccgccgcagcaaaggaagcgcgcgccccagccgcagcccagccgcaacgacaccagccgaacccctcgccggcgccccacacccgccccgccacagcagccacgcgccagcctgagcgccgcgtcccctccccgacccacaggcaccccgcggcaacaaggctgagcccacgccgtcagtcgccctcgcctcgcccgcaccatgatcgccgcggctttcctcgtcttgctgagaccctacagcatccaatgtgccctcttcctcttgttgcttctgctgggcaccatcgccaccatcgtcttcttctgctgctggcaccgcaagctccagaaagggaggcatctgatgaaatcggtcttctcgggtcgttcaagaagccgaggatgtcccaccgaattccaggagtctgcgatgtgctttcccaaccctggtctcccagattcctgtggtgaaagtcaggctgtgacaatcctgattttaaggaaatttcagaaagtgatatgggtaattgaggtaccattagattataagaaagggtcttgggagtacttcagtagaatggagactattataatgccctttgagaatatccagagtgaatag

SEQ ID NO: 15211 - DNA, 1044 bp, Homo sapiens
  SIMILAR (650)..(1864): 981254mologous to Homo sapiens t-complex polypeptide 1 (AA 1- 556),accession number X52882,Smith-Waterman Score=1968.
atgtctacagctcaaatccgaacaaataaaaaccatgttttgctgtttattttatatgattgtcgaagacaaatgaattccaagctgcgtcgtctccgggatcgccgccgccttccacccgggctcgcctctgatgcccctgccagagccagctcctggtggacccatgtggagatgggaccaccagatcccatccttggagtcaccgaaggctttaagagggacaccaatagcaaaaagatgaatctgggagttagtgcctacagggaccacaacggaaagccttacagcatccacaaggcagaggcccagattgcagccaaaaatttggacgaggactacctctccattgggcggctggctgaattttgcaaggcatctgcagaagtagccttgggcgagaatagcgaagtctcgaaaagtggccggtttgtcactgtgcagaccatttctggaactagtgccttaaggatcagagctagttttctgcaaagatttcttaagttcagccaagatgtctttctgcccaaaccaacctggggaagtcgcacacccatcttcagggatactggcatgcagctacaaggttatcgatactatgaccgcaagacttgcggttttgacttcacagacactgtggaggacatttcaaaaacaccagagcaaagtcttcttcttctgcatgcttgctcccataatcccacaggagtggaccctggtcccaagcagcagaaggaaatagcaacagtggtgaagaaaacaaaaatctctttgcactcttcgacatggcctaccaaggctttgccagtggcaatggtaacaaggatgcctgggctgtgcgccactctgccaattatacgccattgtcgctgccaatcatacaccaagaacatggtcttacacagtgagggtgtggcaggcttcaccatggtttgcaaagacgcagatgaagccaagagggtagagtcacatttgaagatcttgatgtgtcccatgtattccaaccctcccctcaatgggacccgtttgcttctaccattctga

SEQ ID NO: 15212 - DNA, 1266 bp, Homo sapiens
  SIMILAR (382)..(1227): 341254mologous to Homo sapiens similar to Kelch proteins; similar to BAA77027 (PID:g4650844),accession number AC006963,Smith- Waterman Score=405.
atgaagaagaaccatgaagaggaagtaaaaggcctacaagaccagattgccagctctgggttgactgtggaggtagatgcccccaaatctcaggaccttgccaagatcgtggcagacatccaggctcaatatgatgagctggctcggaagaaacgacaggagctggacaagtactggtctcagcagattgaggagagcaccacagtggtcaccatgcagtccactgaggttggaactgctgagatgacaatcacggagttgagacggccagggtcacccttggcctccaggcccacaggaatctcaggcctaattggtcttccaggggctcctcctccagcacctgagtcggaaagccagtcagttcacatcactctaggaatgtttgctgggggattgaaggagatggaacaggaagaggtcctgatccacggtgtgtcctacaatgctatgtgccaaatcctacatttcatatacacctccgagctggagctcagcctgagcaatgtacaagagacactggtggctgcctgccagcttcagatcccagaaattatccatttctgctgtgatttcctcatgtcctgggtggacgaagagaacattctcgatgtctaccggctggcagagctgtttgacttgagccgcctgactgagcaactggacacctatatcctcaaaaactttgtggccttctctcggactgacaagtaccgccagcttccattggagaaggtctactccctcctcagcagcaatcgcctggaggtctcctgcgagaccgaggtatatgagggggcccttctctaccattatagcctggagcaggtgcaggctgaccagatctcgctgcacgagcccccaaagctccttgagacagtgcggtttccgctgatggaagctgaggtcctgcagcggctgcatgacaagctggaccccagccctttgagggacacagtggccagcgccctcatgtaccaccggaacgagagcctacagcccagcctgcagagcccgcaaacggagctgcggtcggacttccagtgcgttgtgggcttcgggggcattcactccacgccgtccactgtcctcagcgaccaggccaagtatctaaaccccttactgggagagtggaagcacttcactgcctccctggccccccgcatgtccaaccagggcatcgcggtgctcaacaacttcgtatacttgattggaggggacaacaatgtccaaggatttcgagcagagtcccgatgctggaggtag

SEQ ID NO: 15213 - DNA, 1146 bp, Homo sapiens
  SIMILAR (1429)..(2367): 341254mologous to Homo sapiens Human immunogenic prostate tumour protein sequence SEQ ID NO:380,accession number Y82019,Smith -Waterman Score=379.
atgacgggtcggcaaagcctgagtcctgtcctctcactctcctccctggatagcatgagcttcaccactcgctccatcttctccaccaactacctgttcctgggctctgtccaggtgtccaactacggcgcccggccggccagctgcatggccagcgtctatgcaggcgccgggggctctggttcccggatatccgtgtcccgctccaccagcttccggggtggcatggggtccggggacctggccgcggggatggccgggggtctggcaggaatgggaggcatccagaataagaaggagacaatgcaaagcctgaatgaccgtctggcctcctacctggacagagtgaggagcctggagaccaagaaccggaagctggagagcaaaatccgggagcacctggagaagaagggactccaggtcagagactggagtcattacctcaagaccatcgaggacctgagggttcagatcttcgcaaatactgtggacaatgccggcatcgttttgcagattgacaatgcctgtcttgcagccgatgactttagagtcaagtcactgatgaccaatgtcacttggctgccactggagacagagatggaggctctcaaggaggagctgctcttcatgaagaagaaccacgaagaggaagtaaaaggcctacaagcccagattgccagctctgagttgaccgtggagattgagaagagcaccacagtggtcactacgcagtccaccaaggttggagatgctgagatgacgctcacggagctgagacgtacagtccagtccttaaagatggacctggactccatgagaaatctgaaggccagcttggagaacagcctgagggaggtggaggcccgctacaccctgcagatggagcagctcaacaggatcctgctgcacctggagtcagagatggcacagagccgggcagagggacagcaccagatcggggagtacgaggctctgctgaacatcaaggtcaagctggaggctgagagcgccacctaccaccgcctgcttgatgatgatgacttcaatcttggtgatgccctggacaacagcaactccatgcaaaccatccaaagaccaccacccgccgcaaagtggtgtctgagaccaatgacaccaaagttctaa

SEQ ID NO: 15214 - DNA, 454 bp, Homo sapiens
  SIMILAR (268)..(333): 811254mologous to Mus musculus keratin,accession number Y00217,Smith-Waterman Score=94.
tttccaagaagccttcttgctgcagaccagtaattaatggtcccgctgctcctctctttcattggtgccttcttcttcttcagggaatgctgattcattctggcctttcagatgcttaaccccttttatggtgggtggtgtgtacacactctgcttcctttgcttaggggatgcattctgtaattccccttgtgtgttgggccccctcttgtcatctatttctttttagatgtctttcaaaagagaatcttgaagagagaaaacattctggacagagtgaggagcctggagaccaagaaccggaagctggagagcaaaatccgggagcaccttttgtcagttgtgatgattctgacgtctcttaactcttgatcagatatcagaggtttctgaagtttcttggttcgtggctctccaaggtctcggtacattttctcgtgccgaattcttggcc

SEQ ID NO: 15215 - DNA, 1436 bp, Homo sapiens
  SIMILAR (449)..(138): 551254mologous to Homo sapiens Human secreted protein sequence SEQ ID NO:195,accession number Y87156,Smith-Waterman Score =260.
  misc_feature (1)...(1436): n = a,t,c or g
aagaagacctggaagccttaggcctcgatacgcatgtgacggggcgacccacgcgtgcggcgacgtacgcaaagcctgagtcctgtcctttctctctccccggacagcatgagcttcaccactcgctccaccttctccaccaactaccggaccctgggctctgtccaggcgcccagctacggcgcccggccggtcagcagcgcggccagcgtctatgcaggcgctgggggctctggttcccggatctccgtgtcccgctccaccagcttcaggggcggcatggggtccgggggcctggccaccgggatagccgggggtctggcaggaatgggaggcatccagaacgagaaggagaccatgcaaagcctgaacgaccgcctggcctcttacctggacagagtgaggagcctggagaccgagaaccggaggctggagagcaaaaatccggagcacttggagaagaagggaccccaggtcagagactggagccattacttcaagatcatcgaggacctgagggctcagatcttcgcaaatactgtggaacaatgccccgcnaccgttctgcaagaatcgacagtgccctgtcttgcctgctgatgactttagagtcaagtatgaagacagaagctggcccatgtgcccagtctgtggagaacaacatccatgggctttgcaaggtcattgatgacaccaatgtcactcggctgcagctggagacagagatcgaggccctcaaggaggagctgctcttcatgaagaagaaccacgaagaggaagtaaaaggcctataagcccagattgccagctctgagttgaccgtggaggtagatgcccccaaatctcaggacctcgcggagatcatggcagacatccgggcccaatatgacgagctggctcggaagaaccgagaggagctagacaagtactggtctcagcagattgaggagagcaccacagtggtcaccacacagtctgctgaggttggagctgctgagacgacgctcacagagctgagacgtacagtccagtccttggagatcgacctggactccatgagaaatctgaaggccagcttggagaacagcctgagggaggtggaggcccgctacgccctacagatggagcagctcaacgggatcctgctgcaccttgagtcagagctggcacagacccgggcagagggacagcgtcaggcccaggagtatgaggccctgctgaacatcaaggtcaagctggaggctgagatcgccacctaccgccgcctgctggaagatggcgaggactttaatcttggtgatgccttggacagcagcaactccatgcaaaccatccaaaagaccaccacccgccggatagtggatggcaaagtggtgtctgagaccaatgacaccaaagttctgaggcattaagccagcagaagcagggtacccttt

SEQ ID NO: 15216 - DNA, 1452 bp, Homo sapiens
  SIMILAR (104)..(427): 631254mologous to Homo sapiens L7a protein,accession number X52138,Smith-Waterman Score=321.
atgaagctgctggcccgtactccgcatgaacagaaggacggctgtgggacctctagaaaacagcggtgttcctccaacgacagttctagaattcctctaagacgagcacaggaaggtggaggttccaaggtggacgaactgacggtagccatgcctcctcaggtcaggttcggagccaacactgctgctttccccacacagcgaccagctctcaatggagtctttgatgagcagcccgcatttggcatcgtggtgtctggcctgcagggaggacccgggggatccagcagcagccggaccacctgtacgggagcagccagcatgtggcagaggaggtttcatgccacctcttgccatcagggaagacctgccttgagaagctgctcactgagggccctgggagatgctaatgaccataaagagtcatccagatgcagagaggcagccccaaagggtgaaaaagctaactcaggtcttctggtccagcgcatccctccgggaaagagaaagacctatttgttttggcctaaactgaagaaggcagctgaaattccagctgcctacagagaagcactcgatgaagcccttggaatttcagggggtgggagggatgttggggagagggtatacaaagggccttccatgatggcaaatccacagaaaccagtactagaggccctttcatccaacaagtatttgcatatattatgtgccaagcactgtgataggcacgaaggatacaaagatgaaattaaagttaaagaggcaagctccagagtgaacggctgcgttgaggcgatgctgagtgcacccttaccattggacaggcgaaatgagcacgtggagagtaaggggaagccttttaccatgggccttagtcccagagtcctctctgcttccaggcgcgatggtttaagggaaaggaaaggaagtttctttagaacagtggttctccatgataccaagactgacagcaacagcgacactgagaccaacagcagcacaccacctagaaccctgttagaaatgcaaattctcagtcccacctggacctatgaaatcagcagctctaggactcttggatgtggtccatctgtgtttcagcaaagggcttcttactccccttctgtgtcaggcccaaggctaggctgtcccttaatggatggtggaagaatgaggtgcccaccaggaaacccagagagctgtgtcagcgaggctaacctaattcccattagcgttcctgttgctccacatgctcaccagcatttggtgttgtcagtgttttggaaaatcaccattgtaatagggggaaaaacctgtgtggctcagaatcacagtaatgaagccaaaatgaaacaaagacctgaaatcaatcatgcatcaccaccaggagccttcgcctggagccaaagtggagaacccatcgcatcagcaatgactgtgccagcctag

SEQ ID NO: 15217 - DNA, 787 bp, Homo sapiens
  SIMILAR (646)..(473): 811254mologous to Escherichia coli O157:H7 transcriptional regulatory protein,accession number AE005499,Smith-Waterman Score= 245.
atgtgggatgtggggcaggactccagcctgctccgtggagcgggaggccccggtctgcagctgtggtttgggcggctgcagctgcacctgggagggctccgagagcacagggatgcctgggtccacagccgtggcttgggcagctgcagcggcatgcagggagctgccaccccgactcagaatgggagaggctcctgcctgtccccagctcctgccagttccatggaacatgcagccccagccgtgcctccctgctgcagctggtgtgacagcagcagccgctccagatggcctgccactgccaccactgagacaggtccccgcacagtcccttctgcacaggagagcgccgtgggtttgctgaccgcgtccctgctgaaaggcgactccgggagcacaggcttctgccctctcctgatgtccctagcagcgccgggcacgcagcagtgctcgctgggtttttgttgcacctttgagaggaaaaggagctcggtgtcccctgcagcccctggaactgcggccccggaacttgcagctgcattgatgttgatgcctaggaagaaccagattgccgtttatgaactcctttttaagcagggagtcatggtggctaaggagggtgtccacctgcctaggcacccggagctggcagacaagaatgtgcccaaccttcacatcatgaaggccatgcaggtctctcaagtcccaaggccacagggaggaacagtttgcctggagacatttctactggcaccttacccgtgagggtatccagagtatccaatga

SEQ ID NO: 15218 - DNA, 392 bp, Homo sapiens; identical to SEQ ID NO: 672
  SIMILAR (525)..(1013): 281254mologous to Crypthecodinium cohnii Dinap1-interacting protein 1,accession number AF255444,Smith-Waterman Score=110.

SEQ ID NO: 15219 - DNA, 716 bp, Homo sapiens; identical to SEQ ID NO: 673

SEQ ID NO: 15220 - DNA, 372 bp, Homo sapiens
  SIMILAR (218)..(334): 481254mologous to Volvox carteri f. nagariensis hydroxyproline-rich glycoprotein DZ-HRGP,accession number AJ242540,Smith-Waterman Score=115.
tcacaatccccagattggagataggaaccgaccagggaaaacacattcgccaaagcccacagcggcaagtgcagggccaccaggtctgcgaggtcggggtggggggagcacactccgggcgtaaaagtctgctaaacacctttccataacggaggagcaacgagtggggtgtccccgtgcccgtgcctgctcgaactggcggcggtctgggcagaaaacgcctccctctcctcctcttcctccttcttcccctcctccttctccctctcctcctcctcctcccgcgggccccggcgaagatcccgccgccactgcctctgcctccgctgccccccagggaggcaccgccggcgcccggcccggcgctgccat

SEQ ID NO: 15221 - DNA, 740 bp, Homo sapiens
  SIMILAR (1366)..(1620): 681254mologous to Escherichia coli suppressor protein,accession number L06547,Smith-Waterman Score=267.
tttttttttttttttcggcggagatgcctcgttggggctgggaaactcctgcaaaactcgagaccaggaagccagcccgcaccccaacccccaccaaagccacctactcttcttctgtgggaggccagtccacatccgctctcacccgatgagagatattcagctggatccaaagtgactgatgaagggaaggaaatcatgtcaagcgaagccttgaaaaagctgccctgagacggtgtcccgccgaaagaatgttggctcaattaagaaacatcagggagataaattcaacccagtgtgtctaaaaatgactaccaaaacggagtttgttttgtgcggttgggtaccatgtcgctgtctacggagggggaagaggagactgtcactactcttgattattctcattgcagctttagaacaagttccggaaagagatttttacttttgaaaaaaccttggaggaactctatttagatgctaatcagattgaagagcttccaaagcaactttttaactgtcagtctttacacaaactgagtttgccagacaatgatttaacaacgttaccagcatccattgcaaaccttattaatctcagggaactggatgtcagcaagaatggaatacaggagtttccagaaaatataaaaaattgtaaagttttgacaattgtggaggccagtgtaaaccctatttccaagctccctgatggattttctcagctgttaaacctaacccag

SEQ ID NO: 15222 - DNA, 337 bp, Homo sapiens
  SIMILAR (32)..(439): 881254mologous to Homo sapiens ubiquitin,accession number X63237,Smith-Waterman Score=681.
gtcgacgaggaggcgttcttgtgttgtgataaagatggagaggttaaaggagccacttattagtaatgttgatagtagaatgatggctagggtgacttcatatgagattgtttgggctaaatcatattatggccaagggtcatgatggcaggagtaatcagaggtgttcttgtgttgtgataagggtggagaggttaaaggagccacttattagtaatgttgatagtagaatgatggctagggtgacttcatatgagattgtttgggctagatcatattatggccaagggtcatgatggcaggagtaatcagaggtgttcttgtgttgtgataaggg

SEQ ID NO: 15223 - DNA, 5174 bp, Homo sapiens
  SIMILAR (154)..(501): 831254mologous to Manduca sexta ubiquitin-fusion protein (AA 1-155),accession number X53524,Smith-Waterman Score=471.
ccccaacgttgtaggcccctacgggctactacaacccttcgctgacgccataaaactcttcaccaaagagcccctaaaacccgccacatctaccatcaccctctacatcaccgccccgaccttagctctcaccatcgctcttctactatgaacccccctccccatacccaaccccctggtcaacctcaacctaggcctcctatttattctagccacctctagcctagccgtttactcaatcctctgatcaggatgagcatcaaactcaaactacgccctgatcggcgcactgcgagcagtagcccaaacaatctcatatgaagtcaccctagccatcattctactatcaacattactaataaggggctccttggtaccatgtgggaagcgctgtgaagagttgttgccttccaagatatacccaaattcccagttccagcccgtgtcattaaaactccgctggcgtgaaagatgacgtccttagcccagcagctgcaacgactcgccctccctcaaagtgatgccagcctcttatctagagatgaagttgcttctttgttatttgaccctaaggaagcggccacaatcgacagggacaccgccttcgccattggatgtactggcctggaagagttgcttggaattgatccttcctttgagcagtttgaagcaccgttgttcagtcagctagcaaaaaccttggagcgaagtgttcagaccaaagcagtaaacaaacagttggatgaaaacatttcattattccttattcacttgtcgccttacttcctgcttaagccagcacagaagtgtctggagtggttgattcacaggttccatatacatctctataatcaagatagcctcattgcttgtgttctgccataccacgagacaagaatatttgtgcgagtcatacagcttctaaaaattaataattcaaagcacagatggttctggttgttgccagttaagcaatctggagtgccgttagctaaaggaactttgattacccactgctacaaagatcttggattcatggatttcatttgcagtttggtgacaaaatctgtgaaggtttttgctgagtacccgggcagctcagctcagttgagggtgctcttggctttctatgcttctaccatagtgtcggcgctggtagctgcagaggacgtatcagacaatatcatcgccaaactatttccctatatccaaaagggattgaaatcatctttaccagattacagagctgcaacatacatgataatatgtcagatttctgtgaaagtgaccatggaaaatacctttgtgaattcattggcatcacagatcatcaaaacattgaccaagattccctctttgatcaaggatgggttaagttgcttgatagtgctcctgcagagacagaagccagagagccttgggaaaaagtatgtacaattgaattgagaaatggtgctagtcagaggccattccctcacttatgtaatgttcctgatcttattacaatacttcatgggatttctgaaacttacgatgtcagtcctcttctgcattacatgcttccccatctggtcgtctccatcattcatcatgttacaggagaagaaactgaaggaatggatggtcaaatctacaagagacacttagaagctatacttacaaaaatatcactgaagaacaacttagaccatttgttggctagccttctatttgaagagtatatttcatatagttcacaggaagaaatggattctaataaagtgtctttgcttaatgaacaatttcttccactcattaggcttttagaaagcaaataccccagaacattagatgttgtattagaggaacacttaaaggaaattgcagatctgaaaaaacaagagcttttccatcagtttgtttctctttctacaagtggaggaaagtatcaggagggtgttgatgaatctttcataaaagaagctgttttagcccgattaggtgatgataatatagatgttgttttgtcggctataagtgcttttgagattttcaaagaacacttcagttcagaagtgacgatttcaaatcttctgaatctctttcaaagagcagaactttcaaagaatggagaatggtacgaggtacttaagatagccgctgacatattaattaaagaagagatactgagtgaaaatgatcagttgtcaaatcaggtggttgtatgtttgctgccatttatggttatcaataatgatgatacggaatctgctgagatgaaaattgctatatatttatcaaaatcaggaatctgctccctgcaccctctattaagaggctgggaagaagctcttgaaaatgtaattaaaagcacaaagccaggaaaactaatcggtgtagcaaatcagaagatgattgagttgttggctgataatataaatttaggagatccttcttcaatgttaaagatggaaatcccctcagaatggcacattgaactgatgttagacagagggatcccagtggagctgtgggcacattatgtagaagagctcaacagcactcagagggtggccgtggaggactcggtttttcttgtattttccttgaaaaaatttatttatgcactgaaagctcctaaatcttttcctaaaggtgatatatggtggaatcctgaacaactgaaagaagacagcagggactatctgcacttgctcattgggctgtttgagatgatgctcaatggtgccgatgctgttcatttcagagttctgatgaaacttttcataaaggtgcatctagaagatgtttttcagttattcaagttctgttctgttttatggacctatggttctagcctttcaaatccactaaactgcagtgtgaaaacagtgctgcagactcaagctctttatgtgggctgtgcaatgctttcttctcagaagacacagtgtaaacaccaactggcatccatatcttctccagtggtgacatctttactcattaacctgggaagccccgtaaaagaagttcgtagggctgccattcagtgtctccaggccctcagtggagtggcatccccgttttatctgataatagatcatttgatttctaaagcagaggagatcacttcagatgctgcctatgttattcaggatttggctactttatttgaggaactacagagagaaaagaaactgaaatctcatcagaagttgtctgaaactttgaaaaacttacttagttgtgtgtatagttgcccatcttatatagcaaaagatttgatgaaagtacttcagggagtcaacggtgagatggtgctttctcagctattgcctatggctgaacaactgctagaaaagatccagaaggagcccacagctgtgctgaaagatgaggccatggttctgcatctcactctgggaaagtataatgaattttcagtttcccttttaaatgaggatccgaagagtctagatatatttataaaagctgtgcacacaacaaaggaactttacgcgggaatgccaaccattcagatcacagcccttgaaaagattacaaaaccattttttgcagccatatcagatgaaaaagttcagcagaagcttttaagaatgttgtttgatttattggtgaactgtaaaaactcacattgtgctcagactgtcagcagtgtttttaaagggatttccgttaatgctgaacaagtccgaatagaactggagccaccagataaagctaaacccttgggcacagttcagcaaaaaagaaggcaaaaaatgcagcagaaaaaatcacaagatctagaatctgttcaggaagttggaggttcttactggcaaagagtaactctcatcctggaattactgcagcacaaaaagaagctcagaagtcctcagatattggtgccaactctttttaacttgctatcaagatgtttagaacccttgccacaagagcagggaaatatggaatacaccaaacaattaattcttagttgtctgctcaacatctgccaaaaactatctccagatggtggcaaaatacccaaagatattttagatgaggagaagttcaacgtggagttgatagttcagtgcatccgcctttcggagatgccgcagacccatcaccatgcccttttacttttgggcactgttgctggaatatttccggataaagttttacacaatatcatgtctatttttacatttatgggagccaatgtcatgcgcctagatgatacttacagttttcaagttattaacaagacagtgaaaatggttattcccgcacttattcagtctgatagtggagattctatagaagtttcaagaaacgttgaagagattgtggtaaaaatcattagtgtatttgtggatgcgctgccacacgtcccggagcacaggcgcctgcccatccttgttcaacttgttgatacactgggtgcagagaaattcctctggattctcctcatcttgctttttgaacagtatgtcacaaaaacagtgctggcggctgcctatggcgaaaaggatgctattttagaagcagacactgaattttggttttcagtctgttgtgagtttagtgtccagcatcagatacaaagcttgatgaatatcctccagtacttactaaagctgccagaggaaaaagaagaaaccattcccaaagcagtgtcatttaataagagtgaatcacaagaagaaatgctacaggtttttaatgtagagactcacactagcaagcaactgcggcattttaaatttttgtcagtgtccttcatgtctcagctcctgtcttccaataattttctgaaaaaggtagttgagagtggtggtcctgagattttaaaaggccttgaagagaggttgctggagaccgttctcggctatatcagtgcagttgcacagtccatggaaaggaacgcagacaaactcaccgtgaagttctggcgcgcgctccttagtaaagcttacgacctgttagataaggtcaatgccttgctgcccacagagacattcattcctgtgatcagagggctggtgggcaatcccctgccatctgttcgccgcaaagcgctggaccttttgaataacaagctgcagcaaaatatatcctggaagaagacaatagttacccgtttcctaaaactggttccagaccttttggccattgtgcagcgtaag

SEQ ID NO: 15224 - DNA, 1355 bp, Homo sapiens
  SIMILAR (615)..(25): 581254mologous to Homo sapiens URF 1 (NADH dehydrogenase subunit),accession number V00662,Smith-Waterman Score=424.
ctttttttttttttttaggtttgaaggggaaatgctggagattgtaatgggtatggagacatatcatataagtaatgctagggtgagtggtaggaagttttttcataggaggtgtatgagttggtcgtagcggaatcgggggtatgctgttcgaattcataagaacagggaggttagaagtagggtcttggtgacaaaatatgttgtgtagagttccaggggagagtgccttcatatgttgttccttaggaagattgtagtggtgagggtgtttattataataatgtttgtgtattcggctatgaagaatagggccgaaagggccctgcggccgtattccgatgttgaagccctgagactaagttcggacttccccttccggcaaaggccgaaagggggttccggttggtctctgcttagtgtggagataaatcaatattatggcccaagggtcatgattggcaggagtaattcagaagtggtccttgtgttgtgaataagggtgggagaaggttaaagggagccacttattaagtaaatgttgataagtagaaatgatggcctagggtgacttcaatatgagaattgtttgggcttacttgctcgcagtgcccccgaatcaggggcttagtttgaagtttgatgctckaccctgaatchagagghattgtagtaaaacggctwaggcttagcaggtggctcagvaatyaaatmaggtaggcctmaggttgmaggttgracctagggggttgggttatggggtaggggggttcatacgtagaagagcgatggtgagaagctaaaggtcgggggccggtgatgtaagagggtgatggtagatgtggcgggttttcaggggctctttggtgaagagttttatggctgtcaggcgaagggtttgtagttagcccggtaggggcctagcaacgttggggccttttgcgtagttgtatatagcctaagaatttttccgttcgggtaagcattacggaatgccattgcgattagaattgggtaccaatgaggagtaggaggttggccatgggtatgttgttaagaagaggaatttgaacctctgactgtaaagttttaaagttttatgcgattacccggggtctgccatcttaacaaacccctgttcttgggtgggtgtgggtataatactaaagttgagatgatatcatttacgggggaaggccgctttgtgaagtaggcccttatttctcttgtcctttcgaacagggaggaatttgaagtagatagaaaccgacctggattactccggtctgaactcagatcacgtaggactttaatcgttgaacaaacgaacctttaatagcgactgcaccaatcgg

SEQ ID NO: 15225 - DNA, 3030 bp, Homo sapiens
  SIMILAR (1027)..(1596): 941254mologous to Homo sapiens DNA topoisomerase III,accession number U43431,Smith-Waterman Score=926.
tggctatggagcaggcgggcaccagacctgcggcgacagagcatccacggctccggcggcccatgccctggctgctgctactgcctctcctgctgctgttgctgctgctgctacctggcccagcggcctcccagctgcgatactctgtgccagaggagcaggcacccggcgcgctcgtgggcaacgtggctcgcgcgctggggcttgagctgcggcgcttggggccgggttgcttgcgcatcaaccatctgggtgcgcccagtccgcgctacctggagctggacctgacgagtggagcgctcttcgtcaacgagcgcattgatcgggaggcgctgtgtgagcagcggcctcgctgcctgctcagcctggaagtgctggcgcacaaccccgtggcggtgagcgccgttgaggtggaaatattggacatcaacgacaactcaccgcgtttcccgcggcccaactaccagcttcaggtaagcgaatcggtggcgcctggagcgcgctttcacatagagagtgcgcaggaccccgacgtgggcgccaactcagtacagacctacgagctcagccccagcgagcacttcgagctggaccttaagcccctgcaggagaacagtaaagtgcttgagctggtgctgcgtaagggcctagaccgggagcaggcagccttgcaccacctggttctcacagccgtggatgggggcattccagcccgctcgggtacggcacagatctctgtgcgtgtcctggacactaacgacaactctcctgcctttgaccagtccacttatcgcgtccagctacgggaggactcacccccaggcacattggtggtgaagctgaatgcctcagacccggatgagggctccaatggtgagctcaggtactccttgagcagctacacgtcggaccgggagaggcagctcttcagcatagatgccagtaccggggaagtgcgagtaattggggggctggattatgaggaagcctcctcctaccagatctatgtgcaggcgactgaccggggtccagtgcccatggcaggtcactgcaaggtgctggtggacatcgtggacgtgaatgacaatgccccagaggtggtgctcacggacctgtatagcccagtgcctgagaatgctacacccaacaccattgtggccgttctcagtgtcaatgaccaagactcaggccccaaccggaaagtgagcctgggtctggaggccacactgcctttccgactgaatggctttggaaactcctatacactggtggtgagcggcccactggaccgagagcgggtggctgtctacaacatcacggtgacagccacagatgggggaataccgcagctcacatccctgcgtacactgaaggttgagatctctgacatcaatgacaatccaccaagcttcctggaggactcctattccatctacatacaggagaaacattttgcaaggtgtgttgctctgtactgtgcaagccacagacccagatgaaaaggagaatgcagaggtgacctactcccttctggagagggagattcaagggctgccagtcacctcctatgtctccattaacagtgccagtggcagcctttatgctgtcaactcctttgactatgagaagtttcgggagttctttgtgactgtggaggctcaggacaaggggagcccaccactgagcagcactgtgactgccaacgtatatgtggtggacatgaatgaccatgcccctcacattctgtaccctacctcaaccaactcgtcagcagccttcgagatggtgcctcgaactgcccctgctggctacctggtcaccaaagtcatagctatggactcagactctgggcaaaatgcttggcttttttaccatctagcccagacttctgacctggacctctttaaggtagagctgcacacaggagaaattaggactaccaggaagatgggagatgagagtggtagcactttcaacctgaccgtggtggtccgagataatggagagccatcactatcagcctctgtggccattacagtagctgtggtggatagggtttccaaaatcctccctgacactcagaggcatgttaagagccctcggacatactctgaaattaccctttatctaataatagcattaagcacagtgtcttttatatttcttttgacaatcatcattttgagcatcatcaagtgctaccgctacactgcgtatggcactgcatgctgtggaggcttctgtggagtaagggaaaggtcccctgcagaactgtacaaacaagccaacaacaatattgatgccaggataccgcatggcctcaaagtgcagcctcacttcattgaagttcgagggaatggctccctcaccaagacctactgctacaaggcctgtctgacagcaggctcagggagtgacactttcatgttttacaatacaggggcccagacaggaccagggccttcgggagcccaagcagcagtgactgacagcaggaatctcacaggccaaagtggtcagaatgctgggaacctgattattctcaaaaatgaggctgtttctcaaaatgagccacgacagcccaaccctgactggcgttactctgcctccctgagagcaggcatgcacagctctgtgcacctagaggaggctggcattctacgggctggtccaggagggcctgatcagcagtggccaacagtatccagtgcaacaccagaaccagaggcaggagaagtgtcccctccagtcggtgcgggtgtcaacagcaacagctggacctttaaatacggaccaggcaaccccaaacaatccggtcccggtgagttgcccgacaaattcattatcccaggatctcctgcaatcatctccatccggcaggagcctactaacagccaaattgacaaaagtgacttcataaccttcggcaaaaaggaggagaccaagaaaaagaagaaaaagaagaagggtaacaagacccaggagaaaaaagagaaagggaacagcacgactgacaacagtgaccagtga

SEQ ID NO: 15226 - DNA, 1334 bp, Homo sapiens
  SIMILAR (310)..(699): 491254mologous to Homo sapiens protocadherin alpha C2,accession number AF152304,Smith-Waterman Score=224.
atgccctgtgtcaatgggaaatacaacagcacaatccaggcaggactacaaatggcccagatccttcaggatgaaggaccctatgaggttggtattgatgaagaaactgggtcccaaaaaggtgatggaattatccgaagctccaggaagcttctttttaccatggctctgtttcttgagactaatctccttaaagacccgttaagcagggagagacggtggagactggatgaactggacagtgggggtagggagaagggagtggccgtgttcctgcggtccgctgggatccggcaggtccaggtggctatggagcaggcgggcaccagacctgcgcgacagagcatccacggctccggcggcccatgccctggctgctgctacgcctctcctgctgctgttgctgctgctgctacctggccctgcggcctccagctgcgatactctgtgccagaggagcaggcacccggcgcgctcgtgggaacgtggctcgcgcgctggggcttgagctgcggcgcttggggccgggttcttgcgcatcaaccatctgggtgcgcccagtccgcgctacctggagctgacctgacgagtggagcgctcttcgtcaacgagcgcattgatcgggaggcctgtcttggaagtgctggcgccaaccccgtggcggtgagcgccgttgaggtggaaatattggacatcaacacaactcaccgcgtttcccgcggcccaactaccagcttcaggtcactgcaaggtgctggtggacatcgtggacgtgaagacaatgccccagaggtggtgctcacggacctgtatagcccagtgcctggaatgctacacccaacaccattgtggccgttctcagtgtcaatgaccaaactcaggccccaaccggaaagtgagcctgggtctggaggccacactgccttccgactgaatggctttggaaactcctatacactggtgccacgacagcccaaccctgactggcgttactctgcctccctgaagcaggcatgcacagggaggctggcattctacgggctggtccaggagggcctgatcagcagtggcaacagtatccagtgcaacaccagtgccaacgatggagtgaagaaatgatggaggaggaagtggttttagactgccaagtgttgcaggatgtggaggcatctgggaagagtttttcttgctcttatggaggcattgtggtcgacctgcccctcttgtataacccattttatccagactgtgcctggctgctgatgcatgagtcacagtcttcatggactgtgctgatagagcttacatcttccaactactccatggcaacctaa

SEQ ID NO: 15227 - DNA, 308 bp, Homo sapiens
ccaaacccaacagccacatgccatagcttcactgcattttcagctacacctttggaggccaccttctcctatcaactgtggaaagccagaagggctcccttctccattctccttccctttttcaagtctaatagtgaaatctcctgcttaccccagcagtaaatagttgccttcctaccccttacctgggggccgataatttgagatactttgttttttcaatgcgtcagttgaaggatttagtttcttaaaagcaagaaatgttggagtgttgaatttttaaatagaatctcttttcatgtttgaaa

SEQ ID NO: 15228 - DNA, 2259 bp, Homo sapiens
  SIMILAR (2671)..(3225): 861254mologous to Xenopus laevis transportin; TRN,accession number AF059614,Smith-Waterman Score=818.
tgcagggaaggacatcaccggggtgtggacagggacgggcgttgtgggggtctgtggaccagggggcggcaagggttctcggagaaagggagccgtgggtgagcctgagggggagaaggagccaccaagaaagccaggaaaagccctggcttggagggtggcggctgctgatgcaggtgggaggctggtgagcagtaagagggacttggttctggtgaaggaggcgctgagctggtacgacgcccagcagcactgccggctgcactacacagacctcgctgacctgcagccaagtggcctgtggaagctctactccctcatgaccagcaccccggcttggattggcctcttcttcgacgcaagcacttctggcctgagatggtccagcggctccaccttcacagccctggagtggggccagaagctacctgaatttggggtgggcttaactcttcgggcatctttgcgggaaatccaccatcggtacgccatgcgcaaggctccagctgttggagaacagcagccccctccttgtgctccaccgggcccctctctgtcctggctgccggtgcctccgactcctgtctcgttgctgttgggaagatcatacgtgggctggttgtggcgtgcacagcacttgcccggtaagagtgtcgggcacctcatctccacgaagccctctctcagcctgaccacctctccaaagccaggtacataccagatcagtggtcagaccttcatgcgatttgaccaagtgatgacatggtcctcggccctgctgtactgccgcagccaccacacggatctggccgacctgcagatggtgacggatgagacaggcaaggaggccttgagatccatcatgagtgagactgaagcctggattggcctctacctcaatgcaaactccggatctctgagctggtccagtgacctgggggccagcatcccctcctggctgcaggtgccgatgatggtgagaggactgtgcacagctcttggcatctatatgacctactccccaaaagtgtactcagtgaactgctcttccctgctgcccttcttctgcttctatggtgagtgaactggacaccgggcatcagcagagttgcctccactcttccacacttcccccacagaaatgacagaggaaacaactcccaggccaggcagaggtgctttgggggaaggaggactgggccacatcaaactcccttttcctggaattgggccactgaacttgcagctccagggccaggagacccaggagaggccgtacggtctctcaggtgagaggaccggccccgtgggcgcctcgcagggcccggcttcagcagcgcggctcactcagaggggcagcccggagccccgcgagcccgacctccgcacctcctactcgcgcgcttccgcctccgcgggcccagcggccctccagccccaaggggcggtaacacccggcccttcggccaacctcgcggccccggggggcaccttggttcccgcggaaggacccaggatgccgccggtcactgcccagagtgcgtcttcccaccctgcgccctcggcgtcccagccctccagccctgctgcggcctctcgggggagcctctctgtcccccaggaagtaactgcgactcttctggcctccgcttcgagccccacactcgatgccacccgcgatgccccagctactcccaggatagcagcaccccctgggtctgccacatccagccggggcctcggctcccaggctcaagggagctctctggggaccaaagaaagcatctcggactcatttggcttagggagcccagccgtgacccagaggacaactgcaccccctgactctgcagccctgagccaagacacccgcccagaggcagctgggagctggccagggccccaaacaggtgcctgtagtgtagggagtggcactgatagaagagatacagctgctgccacggaggcccaacatctgagttcagaatctaaagaaaaaacatcagcacaaaaatcaggtaactgctttggaatcttgaaagcagactttaccatctcaactctgatggacccagaagagatgaaagaccaatttctgagacaggtgagacttccttcaactgacgcattgaaaaaacaaagtatctcaaattatcggcccccaggtaaggggaaaccccaacagtaccttggtgatagtgcttggaacatggtaagtgctggcacaattgaaggcttttacaaagaatgaattaaaca

SEQ ID NO: 15229 - DNA, 2862 bp, Homo sapiens
  SIMILAR (94)..(1401): 991254mologous to Homo sapiens transportin,accession number U70322,Smith-Waterman Score=2251.
ccggcggggagcgggtccggagcaggctcccggacccaaaactgaagggggcgtctgaggcgtcagggagctccctcgcctggctctcggcggcctgatggagtaagaggggttggctgtgaatgtgtgacgttgagtgcttcagatctggtcactatggtacgagaacgaaaatgcatattatgccacatcgtgtacagctcaaaaaaggagatggacgaacacatgcggagcatgttgcatcacagggaacttgagaacctcaagggcagggacattattcatgagtgccgagtgtgcggggtcacagaagtgggtctttctgcatatgcaaagcacatttctggccagttgcacaaagataacgttgatgcccaagaaagagaagatgatggaaaaggagaggaagaggaagaagattattttgacaaggaactcattcagttaataaaacaaaggaaagaacaaagtcggtttggcatagaaatggtaccccttgttcaaaatgaacaagaagccttagatttggatggggaacctgatctgtccagtctagaaggattccagtgggaaggtgtttccatttcctcgtcccctggcttggcaagaaagcgaagcctttctgagagcagcgtgatcatggacagagctccttctgtgtatagcttcttcagtgaggaagaacgttctcaggttgaccagctgctgaatatttctttaagggaggaagaacttagtaagtcattgcagtgcatggataacaatcttctgcaagcccgtgcagcccttcagacagcttatgtggaagttcagaggctacttatgctcaagcagcagtgttttgggcaacaacctagatacttttatcagtgcctgggaatcttcaaggccccagaaacatatgaaccttctgagcacccagaccaggttccctgtagcctcacacgagaacgaaggaacagtagatctcaaacatccattgatgccgcactgctgcccactccctttttcccactttttctggagcctccatcttcccatgtgtctccatcacccaccggagcctctcttcaaataaccacgtctcctactttccaaacccatggcagtgtccctgctccagactcatcagttcagattaaacaagagcccatgtctcctgaacaagatgagaatgtgaatgctgtgccaccaagctctgcctgcaatgtgtccaaggaattactggaagctaataaaacccctttggagaaggaaccccactctccagctgaccagcctgaacaacaggcagaatccactttgacatcagctgagactaggggaagcaagaaaaagaagaaactccggaagaagaaaagtctacgggctgcccatgttcctgagaatagtgacactgaacaggatgttttgactgttaaacctgtaaggaaagtaaaagctggaaagttaattaaaggggggaaagtaacaacctccacttgggaagacagcaggactggtcgggagcaggagagtgtcagagatgagccagatagtgactcgtctctggaagtcctagaaattcctaatcctcagttagaagtagtagccattgattcttcagaatcaggagaagagaaaccagacagcccatctaaaaaggatatttggaactctacagagcaaaacccactagaaacgtctcgttctgggtgtgatgaagttagctctaccagtgaaattggcactcgctataaagatggcatccctgtaagtgtggcagaaactcagactgtgatctcctccataaaaggatcaaagaattcttcagaaatatcttcagagccaggagatgatgatgaacccacagaaggaagctttgagggacaccaagctgccgtaaatgcaattcagatatttgggaacttgctatatacctgttcagcagataaaactgttcgggtttataatctggtgagtcggaaatgtattggtgtctttgagggtcatacctccaaagttaactgcctcctggttactcagacctccgggaagaatgctgccctttacaccgggtccagtgaccataccatccgctgctataatgttaagagccgagagtgtgtggagcagttacagctggaagaccgggtcctctgcctccacagtagatggcgaatcctctatgcgggactggcaaatggcactgtggtcaccttcaacataaagaacaacaaacgacttgagatctttgaatgccatggccctcgggcagtcagctgtcttgctacagctcaggaaggtgcccgaaaactgctggtcgtggggtcttatgactgcacaattagtgtggtgaatgatctcgtgttcagtggctccagtgatcagtcagtccatgctcacaacattcacactggtgagctcgtgcggatctataaaggtcacaatcatgcagtgactgtggtgaatatcctaggaaaagtgatggtgactgcttgcctggataaatttgttcgtgtctatgaattacagtctcatgatcgattacaagtttatggaggacacaaagacatgattatgtgtatgaccatccataaaagcatgatttacactggctgttatgatggcagtattcaggccgtgaggcttaatctgatgcagaattaccgctgttggtggcatggttgctctctgatatttggcgttgtagatcatttaaaacaacacttgctgaccgaccacactaatcccaacttccagactctgaaatgtcgctggaagaactgcgatgcttttttcactgctaggaaaggatccaaacaggatgctgcaggacatattgaacgacatgctgaagatgacagcaaaattgattcatga

SEQ ID NO: 15230 - DNA, 927 bp, Homo sapiens
  SIMILAR (347)..(913): 511254mologous to Homo sapiens COP9 signalosome subunit 1 CSN1,accession number U51205,Smith-Waterman Score=339.
atgcacttctatgtttatcacagtgcaattcgcaatagcaaagacatggaatcaaccaaggtgcccatcaatgagcaagactcagtctcaaaaaagaagaagaagaagaaagaagaagaagaagaggaagaggaagaaggaagaggaagaaggaagaagaaaaagaaggagaaggaagaagaagaggaagaagaagaagaactaactttacagaaagggaagattagctcatgtgttagaatggagaacaaaaatgcatattgtgtcatatcgtgtacagctccaaaaagaggcactagtcatgagtgccgaaggtgcgggcccacagaagtgagtctttctgcatacgcaaagcacatttctggccagctgcacaaagataacgttgatgcccaggaaagagaagatgatggaaaaggagaggaagaggaagaagattattttgacaaggaactcattcaattaataaaacaaaggaaagaacaaagtcgacaagaaccttccagtagcagccaagaagtaaattctgatgacagctcatcagctacctttagtgttagtgtattttatgtgtggctcaagacaattcttcttctaacgtggcccaaggaagtcaaaagattggacacccctggtttagagctttggctggtacctaatatggcagagctttctgagccagagggaccagtagattggaaggaacgatgtgtagctctggagtcccaactcatgaaatttagagttcaagcaagcaagatacgagagcttttagcagagaagttacatcataatgaacgtttagaatatagagatcaaagaaaagattctgcaagctttcagaggaaaaaacagttcacatacaaagcatcaggaattgaaatggcttcagacctttcaaaagcaccactagaaattagaggataa

SEQ ID NO: 15231 - DNA, 757 bp, Homo sapiens
  SIMILAR (184)..(405): 831254mologous to Homo sapiens immunoglobulin lambda- chain,accession number L03633,Smith-Waterman Score=333.
gcttacgactcccgcgacgatccacgcgtacgcggagaggcatctgggttcggactggcgccgccatggggaaagtgaatgtggccaagttgcgttacatgagccgagatgacttcagggtcttgaccgcggttgaaatgggcatgaagaaccatgaaattgttcccggcagtttgattgcttctatagccagccttaaacatggtggctgtaataaagttttaagagaattagtgaaacataaactcatagcttgggagcgtaccaaaactgtccagggctatcggttgacaaatgcaggatatgattacctagctttgaaaacactttcttctaggcaagtagttgagtgtgttggaaaaccagatgggtgttggcaaaagaatcatatatttacattgttgcaaatgaagaaggacaacaatttgcattaaagcttcacagactaagaagaacctcgtttcgaaatttgaaaaacaaacgcgattatcatatacataggcacaatgtgtcgtggctttatttatctcgtctctctggcatgaaagaattttgctatatgaagcagttctgtgatgagcagggctcacagctcaggatccacatgatgggaggccagatgtgggctgtgcccatctgccagccacgggacctctttgtctggtttgttctgagagctgaggcctgtgctggatgtggagccaccagccagcagagaggagctcttggggtaacgtctacttgttatagagattag

SEQ ID NO: 15232 - DNA, 1030 bp, Homo sapiens
  SIMILAR (161)..(6): 981254mologous to Homo sapiens Human calcium binding protein hCBP,accession number Y94247,Smith-Waterman Score=247.
atgaataaaactattacgacccaggaggaggtactccccttacaggctgacgttgtccaacgtgaggaggaattgaattccctgaagcagaagctggcagcggcccttttggcggagcaggaaccgcagccagaacgactggtttcggagttgcagctgcgcgcggaaggccgctgtgttccaagatgagattctgcgctctagccggcagttagtgctgcccgagctgggcgtgcacagacacgtgctagtcgtgtgctgcggtgggctccgctgtccactggcgggggggttggcagcggccagcgtgggccgccttggccttgtggattgtgatgtggtagagatgagcaacctggcctaccaagtgctgcatggcgaggcactggctgcacaggccaaggccgcttcggccgccgcctcgctgcgcggcctcaatttggcgccacccccggcggagacagtgaccaactgcgcggatggcgggatgctccgtgtcttaaccggggtcctgggctgcctgcagcccttgaaagtgctgaaaattgctgcgagtctgggcccctcttacagtggcagcctgttgctctttgatgccctgagagggcatttctgctgtattcggctgcggagctgcaggctcgactgtgcagcttgcgggaaatggcccactgtgactcatctgctggactatgaagccttctgtggctcctcagccaccgataaatgccgctccctgcagttactgggcccagaggatcgtgtttctgtcactgactataagcgacttctggattctggggcaccccatctgttgctggacatcaggcctaagatggagctgccgcggaaggccgctgtgttccatgatgagattctgcgctctagccggcagttagtgctgcccgagctgggcgtgctcagacacctgctagtcgtgggctgcggtgggctccgctgtcccctggcgcagtacttggcagcggccatcgtgggccgccttggccttgtggcttatgatgtggtatag

SEQ ID NO: 15233 - DNA, 969 bp, Homo sapiens
  SIMILAR (541)..(681): 931254mologous to Mus musculus Ring1 interactor RYBP,accession number AF101779,Smith-Waterman Score=239.
atgaggccctactcacagactgtgttttctacacagtaccgctgggtggagcagcacctggggccccagttcgtagaacgaattatcctgacaagggacaagacggtggtccttggggacctgctcattgatgacaaggacacagttcgaggtgtgcacaaaagtatgtgtccaggagtcactgcagcgtcctggggaagagctaaagacgcgatgtccatctgtgggtgctggttacgtgaattatgggacaccagctcacgagagaatagtgcagctgttaaaacaggaagggaagcagacaagcctgaagtaactaagcagacgcagttctcaacccgcaaggacgagcaagcctgttcggggtacccttacagtgactgttggctcgccatcgagctcctccatagcgccgaaccccaggctcctagaagtcgctcggacgccaatgcttcccgctcaggcctcccgctcagagctggctgcgagacaagactccgcctgggcgtctcctgcagcgcctgcaagcccaaaccctcagtgctgcggcgctgtctcctctcagcacggccacccctctgcggtcctctgcacgcgtccttccttcctggcgtcgacagcaaatcagggaaaacagcgccgaggactgactgcactcagagtaccgcgctaacaggatcaggcggcgccggggacaccctgagaattgacgaagagttgactggaaaatccagaaaatctcacacgcaggtcttcatctgcaccagccccctgctgaagtaccaccactgtgtgggtgagaagtaccgctgggtggagcagcacctggggccccagttcgtagaacgaattatcctgacaagggacaagacggtggtcttgggggacctgctcattgatgacaaggacacagttcgaggttggacccgttatccttggcagccttccagtctggcctgcccggattag

SEQ ID NO: 15234 - DNA, 596 bp, Homo sapiens
  SIMILAR (594)..(493): 1001254mologous to Homo sapiens Human secreted protein sequence SEQ ID NO:170,accession number Y87131,Smith-Waterman Score =187.
ctctggtggtggtggcacctgatgtaggattgagagtgccagcctatgaacgcagctccagtttgatcttctccgtgtctctgaaatctggcttcctaactcccagtggcgtttcatcagtgtaaatgcctgtcctgctgaaagaacccgcctttcagatggctgaaaaggcacccaatggggcagtatgtgctccccgttccctgcgtccacatcaggactgtggtccccagcagtaggggtgccacggtctcgcagtctccatggatcagcgctgccgtggggccacgctcctcggcagtgggatacccagggcagagtgcgcctgccggctgcgggcctcggccacctggcggggggagcagaagtcctccaggaagatctgtgccaggttccggagcctggcgctggccgagagggagaagcgaagcatgcactgcaccacgggcgtggcggtcagctctgggagaaagctgcggcccggcgggctcaggtgcatgagcgtggtgatggcagacagcaccgtctcctcattggggctggataggcagttgatgatgagtgggacacctcctgcgtgcaggatgtgctccttg

SEQ ID NO: 15235 - DNA, 653 bp, Homo sapiens
  SIMILAR (313)..(32): 1001254mologous to Homo sapiens Protein sequence encoded by clone p199-7 (PL mutet.rsT4),accession number P93369,Smith-Waterman Score=542.
agacattacagaagaattcattcgagaagaacatgaagcctgtggagagggcagccttcagcaagctgggggacaggcccttgaagaagcccagggcgccttccttttgtagcacctgcttggcacagtccatgaggcccttgtatctccgtacctggccaaaggcagctctggcatgctcaaaccctccaacctgtagccgcttcttgaagaggtccagcggatatgtcagggtcttgctgatgacaccagctccactgccacaaagcaggttttggaggttctcatttttctttccttcggctggtatggcccacttgtacaggtgcttcaaggagctgtagcaagagaactgcagcccggcgtaggggaagatggcgatcaaggtgggagccaagcctttgtagaaaacctgggggccttcgctcctatacatggtccccacggcgtggcgcagcgtattatagaccttgggctcaccctgagctgcaaagcgggtgcgcagaacatccacggggtgcacagtgagggtggccatacaggcagccaggccaccacatacaaagtgcactgagaattcccgggcgtcgtacacgctgcctctgtggaccagctccgtcagcatttcaaagaattccaccgcactggactag

SEQ ID NO: 15236 - DNA, 1936 bp, Homo sapiens
  SIMILAR (112)..(714): 991254mologous to Mus musculus TLS-associated protein TASR- 2,accession number AF060490,Smith-Waterman Score=1050.
atggtcggtagtcgagtcatcaacagtatcgactcgatcgagtcaagtatatcagattgcacgtcacgtcgcatctcattacatcgatcacgcatcatgacgcgtagtgcatgtcgagcagttagtcgcattcacgccgtcgatagctcgtcatcacgcacggtgcacgataggtatactacgatcacacacatagctactgtgcacgcgtcacgtgtcgtcatatcttcgcgcagtcacgcagtacatcacgctatcatcaagtcaggtcaacgagacatcgttcgagccctacgcgttatagcatacgcagtactcacgtcgagctatgattacgacatagcttcgccagagatacacaagcagtcagagtctcttccgacatgtactcctcaaccggctgcagcagaagtaccaagcatcggaagcatctgcgagaacgctcccgtgcaaggctcgctctgctatgtcacgtatatctgcaacatatatgactacctgacgggaggcccagcagccaccctgggaggcagacatggcctgtttcgtgaggcccaggtgaacaacatgcccatgatggccctgatgaaccctgtctatgactgcctcttaccggctggcccagccagacagtttgagcaaggaggaggagatggctgaaaaggcaccaatggggcagtatgtgctccccgttccctgcgtccacatcaggactgtggtctccagcagtaggggtgccacggtctcgcagtctccatggatcagcgctgcctggggccacgctcctcggccagtgggaataccccagaggcaagatgatgccgtgtcggtctgcggggccttcggccacctggcggggggagcagaagtcctccaggaagatctgtgccaggttccggagcctggcgctggccgagagggagaagcgaagcatgcactgcaccacgggcgtggcggtcagctctgggagaaagctgctggcggcgggctcaggagcgaaggcccccaggttttctacaaaggcttggctcccaccttgatcgccatcttcccctacgccgggctgcagttctcttgctacagctccttgaagcacctgtacaagtgggccataccagccgaaggaaagaaaaatgcgcacatgcgactgatccaccccctgacccctaatgacatcagctccctggcccagctgctgctgctggagatcattgagttccgggcggccggctggaagacaacgccagctgcccacaagtattactacagcgaaccaaccggcaccttcgcggcgaaaaaagagcacctcacggaaaaagcaacgaaatctgcctgcggtttctcccgctatggtcgctatcgtgccgccgttcttgtgacctttatcggtggtctgtacttcattacgcatcacaagaaagaagagtccgagacgctgcaaagccagaaagtgacccgaaaacggactaccaccaaaaccagaagacctggcgctacattaaagagctggaaagtcgccagccgggagtggctgatatgcgccagcagccaacgcagctggttgaagttccgtggaatgaacagacgccggaacagcgtcagcaaacgctacagcgccaacatgggcgggaaacacgctgctcagtgtgacctgagcggtccctgggtaacccctggagaggttttgcctctcaggcttgccgcgtgtttaaacttcctcatgggcgcctggggaggagttccagggtgggtgtgcacaaaagtatgtgtccaggagtcactgcagcgtcctggggaagagctaaagacgcgatgtccatctgtgggtgctggttacgtgaattatgggacaccagctcacgagagaatagtgcagctgttaaaacaggaaggtctccattttgtcagcaatggagctcatctggaacctgtgtga

SEQ ID NO: 15237 - DNA, 417 bp, Homo sapiens; identical to SEQ ID NO: 1912
  SIMILAR (28)..(417): 991254mologous to Homo sapiens ubiquitin,accession number X63237,Smith-Waterman Score=686.

SEQ ID NO: 15238 - DNA, 440 bp, Homo sapiens; identical to SEQ ID NO: 13078
  SIMILAR (429)..(740): 1001254mologous to Homo sapiens erbb2-interacting protein ERBIN,accession number AF263744,Smith-Waterman Score=526.

SEQ ID NO: 15239 - DNA, 574 bp, Homo sapiens
  SIMILAR (271)..(119): 861254mologous to Homo sapiens URF 1 (NADH dehydrogenase subunit),accession number V00662,Smith-Waterman Score=199.
atgcagacagtgcttaacttgcgggcctggcacggcctggacgctgcgcccctgacccgcgaccagggcggcccaggctgccggttcgccgaccacagtttgagcagcaagggcttccctttcactgccatctgcggtgaagctgccaccaaactgcagattttcgtgaaaaccctaagggggaagaccatcacccttgaggttgaaccctcagatgcgatagaaaatgtaaaggccaagatccaggataaggaaggaattcctcctgatcagcaaagactgatctttgctggcaagcaactggaagatggacgtactttgtctgactgcaacattcaaaaggagcctactcttcatcttttgctgagactttgtggtgttgctaagaaaaggaagaagtcttaccccactcccaagaagaataagcacaagagaaagaaggtgaagctggatgtcctgaaatgttataaggtggatgagaatgacaaaattagtgcccttctgacgaatgtggagctggagtgtttctgccatacagaatgtgcctccttcctcttcgccttctgccatgatt

SEQ ID NO: 15240 - DNA, 623 bp, Homo sapiens
  SIMILAR (86)..(562): 471254mologous to Homo sapiens ubiquitin,accession number X63237,Smith-Waterman Score=219.
gcggccgcctactactactaaattcgcggccgcgtcgacccgccatctgcggtggagccgccacctaaaatgcagattttcgtgaaaacccttacgggggaagacccatcaccctcgaggttgaacccctcggatacggatagaaaaatgtaaaggcccaagcatccagggataagggaaggaatttcctcctgatcagcagagacttgatctttgctggcaagcagcatggaagatggacgtactttgtcttgactacaatattcaaaaaggagtctactcttccatcttcgtgttgagacttcgtggtggtgctaagaaaaggaagaagaagtcttacaccacttcccaagaagaattaagcacaagagaaagaaaggttaaagcttggctgtccctgaaatattataagggtggatgaggaatggcaaaattagtccgccttcgtcgagagtgcccttctggatgaatgtgggtgctggggtgtttatgggcaagtcacttttgacagacattattgtggccaaatgttgtctgactttactgtttcaacaaaccagaatgacaagtaactgtatgagttaataaaaggacatgaactaacaaaaaaaaaaaaaaaaaaa

SEQ ID NO: 15241 - DNA, 990 bp, Homo sapiens
  SIMILAR (475)..(954): 851254mologous to Homo sapiens DNA-binding protein TAXREB107,accession number AF261087,Smith-Waterman Score=645.
ttttggacgctcgaaggcactgggaaggaactcccgggtttacgcacacgtccccggacgcgtgggcggacgcgtggggcaagatggcgggtgaaaaagttgagaagccagatactaaagagaagaaacccgaagccaagaagagttgatgctggtggcaaggtgaaaaagggtaacctcaaagctaaaaagcccaagaaggggaagcccccattgcagccgcaaccctgtccttctcagaggaattggcaggtattcccgatctgccatgtattccagaaaggccatgtacaaaaaggaagtactcagccgctaaatccaaggttgaaaagaaaaagaaggagaaggttctcgcaactgttacaaaaccagttggtggtgacaagaacggcggtacccgggtggttaaacttcgcaaaatgcctagatattatcctactgaagatgtgcctcgaaagctgttgagccacggcaaaaaaacccttcagtcagcacgtgagaaaactgcgagccagcattacccccgggaccattctgatcatcctcactggacgccacaggggcaagagggtggttttcctgaagcagctggctagtggcttattacttgtgactggacctctggtcctcaatcgaggttcctctacgaagaacacaccagaaatttgtcatttgccactttcaccaaaatcgatatcagcaattgtaaaaatcccaaaacatcttactgatgcttacttcaagaagaagaagctgcggaagcccagacaccaggaaggtgagatcttcgacacagaaaaagagaaatatgagattacggagcagcgcaagattgatcagaaagctgtggactcacaaattttaccaaaaatcaaagctattcctcagctccagggcaacctgcgatctgtgtttgctctgacgaatggaatttatcctcaccaattggtgttctgaatgtcttaagaacctaattaaataactgactac

SEQ ID NO: 15242 - DNA, 1008 bp, Homo sapiens
  SIMILAR (764)..(970): 951254mologous to Homo sapiens ribosomal protein L6,accession number X69391,Smith-Waterman Score=343.
  misc_feature (1)...(1008): n = a,t,c or g
ttttttttttttttttgcaattttataactttatttgatctgacgatcagcgattagttctcatccacattgactgtctgtagatctgtaaaggaagtaacagtcaatttccatacccacatcacatttcatatttcaactctaaaaaccttttcgtagacgggtctggacattctattttcccacaacctttttacatccccagatatggatcagttttgcattctttagcatcttcccacaccaacaatttaaaaagggtacaatgacgtgtgtcacccctagcttaacagatgaattcacattttaagaggtaaggacatttttctaatgaatttaaatggctttatgggatggagaacttacttttgaaagtggtaaacaggtacataggtaaaccaaagtatatagctttatttggtgaatcttcatccctcattacggttttctggacagccgcacaccggattccggtatgggcacattccttcgaatacagataactttagcaccttattcctttggcccagacagctttgttgagcctggtgtcaatgcgcacatctggagttcccatctccttcatggcaaatttccgaatctctttgagtgcccgaggtgcacgcttcttggaagcccactccatgggatgcgctgtgtgaatgttgatggtgtattctcggagttaccccttcgttgatgagcagaacggccctttttctttctcgccacacattctttgcgggagccattctgcagcgtccaagttggaaagaaaaagaaggagaaggttctcgcaactgttacaaaaccagttggtggtgacaagaacggcggtacccgggtggttaaacttcgcaaaatgcctagatattatcctactgaagatgtgcctcgaaagctgttgagccacggcaaaaaacccttcagtcagcacgtgagaaaactgcganccagcattacccccggggaccattctgatcatcctcactgggacgccacaggggc

SEQ ID NO: 15243 - DNA, 711 bp, Homo sapiens
  SIMILAR (346)..(708): 921254mologous to Homo sapiens karyopherin beta2,accession number U72069,Smith-Waterman Score=595.
atgggcctggaccttccggatgggggccacctgacccatgggttcatgacagacaagaagaaaatctctgccacgtccatcttctttgaatctatgccctacaagggcctcctggtgggcctggttaccgcagaacggagccatgggaccacgcccccgaccctcaacccatttgcaccccacgtttcgccgaccactaaatccgtaacctctatggacgctcccacttacacctggactgggaccaccgtgagctggcccatgaacgaatggcacaagcgaactgctccgctcgtatgccgtctgaatttggctaacacccgtgctgatcacagacccgtcgccttagttgagtatatgctacagaggactcaagatcaagatgaaaatgtggctttagaagcctgtgaattttggctaactttagctgaacagcaagtatgcaaagatgtattcgtaaggcatcttcccaggttgattcctgtgttagtgaatggcatgaagtactcagatatagatattatcctacctaagggtgatgttgaagaagacgaaatgattcctgatagtgaacaggatatatggccacgttttcaccgatcaaggacagtggctcagcagcatgatgaagatggaattgaagaggaagatgatgatgataatgaaattgatgatgatgatacaatttctgactggaatctaaggaaatga

SEQ ID NO: 15244 - DNA, 2097 bp, Homo sapiens
  SIMILAR (4809)..(5174): 1001254mologous to Homo sapiens dJ670F13.3 (novel protein (contains the translation of cDNA Em:AK001221)),accession number AL136105,Smith-Waterman Score=603.
atgaggaatgaaatctctgacctaacagaagagcttcatcagaaggagatcactatagcaactgtcacaaagaaagctgcccttctggaaaaacagttaaaaatggaattagaaataaaagaaaaaatgttagcaaaacaaaagccttgggcctgcctggtgaacgccatgcctgccattcaggtggtctttaacctgggtagatttagaaaatgccaagatcctcacaaagctcaggaatgggtatacccaggttattctggaagtgactgtgaagtttttccagaaattatgaccagcaagaatcgtgaagaagctatgcctgaatggaagctatggaagaaggtggttctgagtggtgcaacagatgccccctcatgggatggacctactttcacggacctcaacgtctttgcagggaacatgggcctgagtgactgcactctgtccctagggaaaatatggaaaatcccaggccacttcctgcacacctcaggacctgtttccttccacactaaaggcttgctcaataccccaacgaaggagagatgggtgggcggcttcgggtccgagggccgcggcgtcccagagcccggggggtgcttcggcgtcctcgctgtcccccgccgtaccccaccctctgcagccgcaatgacgggaggggagcgcttgggtcgcgcctgggctggggatcgggcggcggccagccgcagcgccccagttccaggcacattcggtatgatggggtggcggcccgtggcctttggcaagaatgcgaaggcttatcggggatttggaggtattgtcacatccctcacaccaagttgtgataaggtgactctcttgtttgtgagaatacttccaggctcagggcagtctagagaccaaagcagcccggaaaaactcacagacacaaagtccacatcaaataaagcatatggttttcctgaatgccttcgcaggcctgagagcactcatatattcttctatgaccaccagcttggcagtgagcagcctagagggactaagggaactcctcttaagtgggtgtcccagaaaactttggaacgagagactcgccagtgccaggctctggtgatctggactgactgtgatagagaaggcgaaaacatcgggtttgagattatccacgtgtgtaaggctgtaaagcccaatctgcaggtgttgcgagcccgattctctgagatcacaccccatgccgtcaggacagcttgtgaaaacctgaccgagcctgatcagagggtgagcgatgctgtggatgtgaggcaggagctggacctgaggattggagctgcctttactaggttccagaccctgcggcttcagaggatttttcctgaggtgctggcagagcagctcatcagttacggcagctgccagttccccacactgggctttgtggtggagcggttcaaagccattcaggcttttgtaccagaaatcttccacagaattaaagtaactcatgaccacaaagatggtatcgtagaattcaactggaaaaggcatcgactctttaaccacacggcttgcctagttctctatcagttgtgtgtggagtcaggtccctcagctgcaggtctgttggattttgctggaggtccactccagaccctgtttgcctttgtatcaccagtggaggctgcagaacagcaagtattgcagaacagcaaaaattgctgcctgatccttcgtatagaagcttcatcccagaggggcagccgcctatatgagcagcccaaagctcatgggcagcaaagggccccacttccaatgactgccacctcccagggaggggccaagctcaaaggctgttttgtcctcagcgaggcctgccaggatgaccaggatcccatggcaactgtggtagaggtcagatctaagcccaagagcaagtggcggcctcaagccttggacactgtggtatgttccagacaggctgtttcaggcactcggggaacacttactgttttgaggctgtggttctaccgcctagactgtggcttggtggaagaaaatatcacccatcaccaggccacacaagaaaacactggagaaagacacggtcctgcttag

SEQ ID NO: 15245 - DNA, 1008 bp, Homo sapiens
  SIMILAR (30)..(95): 951254mologous to Homo sapiens envoplakin,accession number U53786,Smith-Waterman Score=116.
gcgtctctagtccatgcggtggaattcggcagaacttcctgaacctgtgcatctgccaggagacccagctccagcacgtggaggactacagccggattctgtgtccatcttcctctcctcattgactctgcatgaaggggatttctggtggagtaagggtagcagctcttgccgcacgtgcagagagagaggaacttccagtgcccgctatggagccacagcccacagcatggggaagtccccatccagaggcagtgctgcagctagaggtagctccagagtcctccgggccctgcaccgatacagccaaagaccagcaaagcgacaagctgccagacctcatgccacctgctgtagccactgggctcagccctggagctgagagcatcgctggagatagacgtggcagagaagaggttgcgagcatggccccagccagcagctcccacgctgcccctagtcctgggcatggagcgagccttggtgtcagagaccagggtgtgcagtctgagctcctctaccttactaaagagaggcctcttttatttaccagagccacagccctgctgcctcaggaccttttcattctgccggtgctggggctgtctatctgcaagctggaggtgttgagagcaggaaaaggaggctgtgaggaagggttcgggcagctcctcctgctctcagaggkggscctcctcctccaggcatggaggtctgtccactactgggcttctgggctatttgcccctgatttgctccctgagaaaactgatccactattctcatactggtgcaacttctttcaagacctcaaaactggacaacatgaacttgtcttgtttcttatctcttcttgctatggctgtcattgggacagtccgagatgcggcaagagctgaaaaaggagagctgctcagagctgaaaaaacctgctcagtgacccttctctttcgtcctcatggtggcttcgtagagtgggtgctgttcccaaatgtacccattcgacag

SEQ ID NO: 15246 - DNA, 2006 bp, Homo sapiens
  SIMILAR (904)..(1599): 1001254mologous to Homo sapiens signal recognition particle 68,accession number AF195951,Smith-Waterman Score=1169.
atgggctgcaggtccccggacctagctagtaaggacagctattatcttaaaggtggcagagaggcccagagcccttgggcctaccagttcctgagtaagactggctgggctgcagacttctggaatgcagggatggctcatgcacgagatggctgcaggggctggggagtgggctgcaccagcatcagtcctacagctgaactggggctggtgctgccaggtgagctgccagctgcccacatcagcgtggcgctccaggcgcaaggagtgagtaagctgccgcgcaaagtcatggctggcagagggttgagcagccccagggatcgtttcatctctaacctctcaatccaccaaggagcaagccagggccagagggagggtcctccctgcatcgccatcctggcagaacttgtgccagcctttttggctcttctgtttgagcaggcggttggacccgtgcccctcgcctgctgccagcacagactgcccactgtggggctcctggctgctggctggggttcaagtttgttgggggaagcaccttggctgggccctgagctctgggagacaccacatcagctggctgggcctctggcagaccccagctccaagtctggtcctgaggagctgcaggcccagattccttcaggggtgctagccggagccctcccggagcgctcggggttcgacccccgagcacggcgggaggagggcgcccccctgcggcacagccacgtccacgaagcccctcccggggttctagaaagcggaggcctccgctgtgatttggacagaaatcagctgccacgtgcaacattctcccatgggaacatgtgtccgcagtacctatctcagagcccaaatccttcctgccccacagccttctcctggaacctgccttgggcttacacagcttacctctcaggaatgctacgttttgaacatcaagaatggaaagctgccattgaggcttttaacaaatgcaaaactatctatgagaagctagccagtgctttcacagaggagcaggctgtgctgtataaccaacgtgtggaagagatttcacccaacatccgctattgtgcatataatattggggaccagtcagccatcaatgaactcatgcagatgagattgaggtctgggggcactgaaggtctcttggctgaaaaattggaggctttgatcactcagactcgagccaaacaggcagctaccatgagtgaagtggagtggagagggagaacggttccagtgaagattgacaaagtgcgcattttcttattaggactggctgataacgaagcagctattgtccaggctgaaagcgaagaaactaaggagcgcctgtttgaatcaatgctcagcgagtgtcgggacgccatccaggtggttcgggaggagctcaagccagatcagaaacagagagattatatccttgaaggagagccagggaaggtgtctaatcttcaatacttgcatagctacctgacttacatcaagctatcaacggcaatcaagcgtaatgagaacatggccaaaggtctgcagagggctctgctgcagcagcagccagaggatgacagcaagcgctcacccccggccccaggaccttgatccgactctatgacatcatcttacagaatctggtggaattgctccagcttcctggtttagaggaagacaaagccttccagaaagagataggcctcaagactctggtgttcaaagcttacaggtgttttttcattgctcagtcctatgtgctggtgaagaagtggagcgaagcccttgtcctgtatgacagagtcctgaaatatgcaaatgaagtaaattctgatgctggcgccttcaagaacaagcctaaaggacctgcctgatgtgcaagagctcatcactcaagtgcggtcagagaagtgctccctgcagggcccgcagccatccttgatgcaaacgacgctcatcaaacagagacctcctcctcccaagtcaaggacaataagcct

SEQ ID NO: 15247 - DNA, 3535 bp, Homo sapiens
  SIMILAR (1432)..(3027): 981254mologous to Homo sapiens protocadherin alpha C2,accession number AF152304,Smith-Waterman Score=2728.
atggagctggtgaattgcgtgctgatgagcaccctaggaaacacctgctgccccatggccattgccatgtttagatcttcttcctctctccctagacctgggcacagcctaactgggtcccctttgagagtcaatctcatccacattaaatttccactgaatgatttccaccagaatgtggtcaagatcaagaacaaggatcccccgctgggtgcggccatcgggaaggaatcctgccccatcgctgacaatgagctgcattctttggagaggcggcccctgtccccaaagctggtgcaagccctgggtgtagcaggcctctccagaccagggccaccacatactggctgtgccatttggctccttctgatcactgatcacaaactccttagtgaaatcctgtatgacctccttcaccagggtcttgacattctcgccgatccacctgatgagggtggcatccctcgtggcaagaatctggtggaattgctccagcttcctggtttagaggaagacaaagccttccagaaagagataggcctcaagattctggtgttcaaagcttacagcacactctcctcagatgggcctcctctgttctctgctttgcgctccctgcaaggagtccaatcctcgaaggtgggagagtccagagaagaaaagagccaaacggaggaagaggaccctgggaacccttgggtgccgcagagcttgggagcctccgtttcctcatctggaaagtggggctgtctgagaactaaacccgagaaggcacaggaagggcttcccgtggcttctgcaaagagctccacgaacactcgctctccttcatccgagcagcaatcctcgctgggcctcaggccatggacggtgctggtctgtagcccaggagttggggaatcctgctctacagagtttccaacctcagagatgaagcatcccctctctcttgccgcacgtgcagagagagaggaacttccagtgcccgctatggagccacagcccacagcatggggaagtccccatccagaggcagtgctgcagctagaggtagctccagagtcctccgggccctgcaccgatacagccaaagaccagcaaagcgacaagctgccagacctcatgccacctgccgtagccactgggctcagccctggagctgagagcatcgctggagatagacgtggcagagaagaggttgcgagcatggccccagccagcagctcccacgctgcccctagtcctgggcatggagcgagccttggtgtcagagaccagggtgtgcagtctgagctcctctaccttactaaagagagacctcttttatttaccagagccacagccctgctgcctcaggaccttttcattctgccggtgctggggctgtctatctgcaagctggaggtgttgagagcaggaaaaggaggctgtgaggaagggttcgggcagctcctcctgctctcagaggtggcctcctcctccaggcatggagttgttaataagcccctcacctgcactctatccccactgagcgaccggctcttcactaaacaggctgtgcgtgctccttcccctgtactgttccctggcctagaatactgttcccacgacatcagggacaggagcactggcctgtgccatctgtatccctcggacccagcacacaggagtgctctgggcctgggctcctgcagcatcagcctcctaacttgtcttttccaccccaatgccttctccatgaggcagtcagggagggtcttcagtcccttgggcgaggatgctgtggcccacactcgctttgacaccctgtgttcccagaggccacatctgtactggccaaactcacggaaatacagcaccaaagatatcgtcatggaagtgcttctggctcttttagatgccccctcatgggatggacctactttcacggacctcaacgtctttgcagggaacatgggcctgagtgactgcactctgtccctagggaaaatatggaaaatcccaggccacttcctgcacacctcaggacctgtttccttccacactaaaggcttgctcaataccccaacgaaggagagatggagaaaactgatccactattctcatactggtgcaacttctttcaagacctcaaaactggacaacatgaacttgtcttgtttcttatctcttcttgctacggctgtcattgggaaagtccgagatgcggcaagagctgaaaaaggagagctgctcagagctgaaaaaacctgctcagtgacccttctctttcgtcctcatggtggcttcgtagagtgggtgctgttcccgaatgtacccattcgacagggacaccgagctgggctgccagaggacaaggggcctgaacctgttggaatctacagcagcgttgatcgctttgggattctgcagttgattcctgtgttagtgaatggcatgaagtactcagatatagatattatcctacctaagggtgatgttgaagaagacgaaatgattcctgatagtgaacaggatatatggccacgttttcaccgatcaaggacagtggctcagcagcatgatgaagatggaattgaagaggaagatgatgatgataatgaaattgatggtgatgatacaatttctgactggaatctaaggaaatgttctgttgctgccctagatgttcttgcaaactgcctctctgataaaaaggctcttgtccgttccataacatgctggactcttagccgctatgcacactgggtagtcagccagccaccagacacgtacctgaagtcattaatgacagagttgctaaaacgcatcctggatagcaacaagagagtaccagaagctgcctgcagtgtctttgctaccctagaagaggaggcttgtacagaacttgttgcttaccttgcttatatacttgataccctggtctttgcatttagtaaataccagcataagaacctgctcattctttacaatgccagagggacattagcagattcagtaggacatcatttaaacaaaccagaatatattcaaatgctaatgcctccactgatccagaaacggaacatgttaaaggatgaagataaagatcttttccctttacctgagtgtccattttcagttgccacggtgctgcagtctggcttccttccatactgtgaacctatgtatcagcattgggtaaacctagtacagaagactcttgcacaaagccatactaagcaatgctcaaccagatcaatatgaagctccagataaagattttatgatagtggctcttgatttactgagtggcctggctgaaggacttggaggcaatattgaacaactggtagcccgaagtaacatcctaacactaacatatcagtgcatgcaggataaaatgccggaagttcgacagagttcttttgccctgttaagtgacctcacaaaagcttgctttcagcatgttaagccttgtgtagctgatttcatgccaatattgggaaccaacctaactccagaattcatttcagtctgcaacaatgacacatga

SEQ ID NO: 15248 - DNA, 3078 bp, Homo sapiens
  SIMILAR (1376)..(2074): 251254mologous to Leishmania major proteophosphoglycan,accession number AJ243460,Smith-Waterman Score= 184.
agcatttcaggccccggacaggaggcagtgccgcttcggccgaaggccgagccgcccgagggctctgggatggtgtgggaccggcaaaccaagatggagtatgagtggaaacctgacgagcaagggcttcagcaaatcctgcagctgttgaaggagtcccagtccccagacaccaccatccagagaaccgtgcaacaaaaactggaacaacttaatcagtatccagactttaacaactacttgatttttgttcttacaaaattaaaatctgaagatgaacccacaagatcattgagtggtcttatcttgaagaataatgtgaaagcacactttcagaacttcccaaatggtgtaacagactttattaaaagtgaatgtttaaataatattggtgactcctctcctctgattagagccactgttggtattttgatcacaactatagcctccaagggagaattgcagaattggcctgacctcttaccaaaactctgtagcctgttggattctgaagattataatacctgtgagggagcatttggtgcccttcagaagatttgtgaagattctgctgagattttagacagtgatgttttagatcgtcctctcaacatcatgattcccaaatttttacagttcttcaagcatagtagtccaaaaataaggtctcacgctgttgcatgtgtcaatcagtttatcatcagtaggactcaagctctaatgttgcacattgattcttttactgagaatctctttgcattagctggtgatgaagaaccagaggtacggaaaaatgtgtgccgagcacttgtgatgttgctcgaagttcgaatggatcgcctgcttcctcacatgcataatatagttgagtacatgctacagaggactcaagatcaagatgaaaatgtggctttagaagcctgtgaattttggctaactttagctgaacagccaatatgcaaagatgtactcgtaaggcatcttcctaagttgattcctgtgttagtgaatggcatgaagtactcagacatagatattatcctacttaagggtgatgttgaagaagacgaaacgattcctgatagtgaacaggatatacggccacgttttcaccgatcgaggacggtggctcagcagcatgatgaagatggaattgaagaggaagacgatgatgatgatgaaattgatgatgatgatacaatttcagactggaatctaagaaaatgttctgctgctgccctggatgttcttgcaaatgtgtatcgtgatgaactgctgccacatattttgccccttttgaaagaattactttttcatcatgaatgggttgttaaagaatcaggcattttggttttaggagcaattgctgaaggttgcatgcagggcatgacttccatacttgcctgagcttattcctcaccttattcagtgcctctctgataaaaaggctcttgtgcgttccataacatgctggactcttagccgctatgcacactgggtggtcagccagccgccagacacgtaccctgaagccattaattgacagaatttgctaaagcgcatcctgggacagcaacaagagagtacaagaagctgcctgcagtgcctttgcctaccctagaagaggaggcttgtacagaacttgttccttaccttgcttatatacttgatacccctggtctttgcatttagtaaataccagcataagaacctgctcattctttacgatgccattaggaacatttagcagattcagtaggacatcatttaaaacaaacccaggaatatattcagatgctaatgcctccactgatccagaaatggaacatgttaaaggatgaagataaagatctcttccctttacttgagtgcctatcttcagttgccacagcactgcagtctggattccttccgtactgtgaacctgtgtatcagcgttgtgtaaacctaagtacagaagactcttgcacaagccatgctaaacaatgctcaaccagatcaatatgaagctccagataaagattttatgaatagtggctcctgaatttactgagtggcctggctgaaggaccttggaggcaacattgaacagctggtagcccgaagtaacatcctgacactaatgtatcagtgcatgcaggataaaatgccagaagttcgacagagttcttttgccctgttaggtgacctcacaaaagcttgctttcagcatgttaagccttgtatagctgatttcatgccaatattgggaaccaacctaaatccagaattcatttcagtctgcaacaattgccacatggggcaattgggaggaaatctccattcaaatggggtataggaggatgcagccttattattcctatgggtgttggcaccagctttgtagggaaattcatttaacaggaccccaacacaccaaaggacgttgttagagaatacagcaataacaattggtcgtcttggttacgtttgtcctcaagaggtggcccccatgctacagcagtttataagaccctggtgcacctctctgagaaacataagagacaatgaggaaaaggattcagcattccgtggaatttgtaccatgatcagtgtgaatcccagtggcgtaatccaagattttatatttttttgtgatgccgttgcatcatggattaacccaaaagatgatctcagagacatgttctgtaagatccttcatggatttaaaaatcaagttggcgatgaaaattggaggcgtttctctgaccagtttcctcttcccttaaaagagcgtcttgcagctttttatggtgtttaatctaatacacttaagctgcagtcccaaaattaggggtccttcagtcttggagactataagggagcctctgcacccagggaaaatgttaccctttacaggggggaagggtaaaccagtagggaatacagtacaatcccaaccctactgggaggggcgggagggaggtgttgccgtcactgtattaagtcgatgttgggaaacgttttaacatctggagcctttgtgggtggaaatatgtctccagttacaactccgcagtggatgtgaagaagcaaaaa

SEQ ID NO: 15249 - DNA, 453 bp, Homo sapiens
  SIMILAR (325)..(432): 941254mologous to Homo sapiens Similar to phosphatidylserine synthase 2,accession number BC001210,Smith-Waterman Score=172.
atgatagacctggtcctggtcgccacaggcaccgtcttgggcaaggccctcatcgcaggccagggccgtgagccttctagtggctcgagggcagctgtgccagggctccaggcgacgctcgggtgtcggcagcagagtggacgcaggagcagctcggaccgcgctcagaacactcgggacgaggccgcggctccgcaggccttgcgggctggggtcccacgaaacaaaggcggcagccagtggccaggacgggcagcgtggttcacggggccgtggctccctcgggggtcgcgagctcggcgcaaacgagcccctctaccaaggcgagcccacaccttaaccgtgctcttcatcctcacctgtacgcttggctatgtgacgctgctggaggaaacacctcaggacacggcctacaacaccaagagtgaaattgccgtggtgcacctgtcctga

SEQ ID NO: 15250 - DNA, 559 bp, Homo sapiens
  SIMILAR (880)..(2631): 701254mologous to Homo sapiens zinc finger protein 106,accession number AF205632,Smith-Waterman Score=1959.
  misc_feature (1)...(559): n = a,t,c or g
gggaccgcgcgctctgagtacagcttcccgggagcggccaggtcctccagggcaccgagaaagccggccagaacggcgcgccactatcccggccgcagcgatgtctgacggcgccccggaactgacggtctggtacgcagggggctcggggcaacggggctttaaacgtcatcgcgggcgcgacgctgagggacagtctggggtttggctgtccggacggtgcagcggcgaggccgccgcganagatgccagtggcggtgatggcggaaagcgctttagtttcaaaaagttgctggatcagtgcgagaaccaggagctcgaggcccctggaggaattgctacacccccagtgtatggtcagcttctagctttatatttgctccataatgacaaagaatctggcagagagatttccctgggatctatacaaccatcaacgctcaccagtggtctgagacggtccagccaattatggaagcacttagagatgcaacaaggagacgcgcctttgccctggtctctcaagcgtatacttcaatcatcgccgatgattttgcag

SEQ ID NO: 15251 - DNA, 1157 bp, Homo sapiens
  SIMILAR (223)..(294): 411254mologous to Escherichia coli O157:H7 Z1935 gene product,accession number AE005334,Smith-Waterman Score=60.
agcggccgcgcgctctgagtacagcttcccgcggagccggccaggtcctccagggcaccgagaaagccggccagaacggcggcgccctatcccggccgcagcgatgtctgacggcgccccggaactgacggtctggtacgcaggggcgctcggcggcaacggcggctttaaacgtcatcgcgggcgcgacgcctgagggacagtcttggggtttggctgtccggacggtgcagcggcgaggccggcccgcgaagatgccagtggcggtgatggcggaaagcgccgtctagtttcaaaaagttgctggatcagtgcgagaaccaggagctcgaggcccctggaggaattgctcacccccaaggtgtatggtcagcttctagctttatatttgttccataatgacatgaataatgcaagatatctttgaaaaagaataccacctgctataaaatctgcaaattctgaacttggggggaatttggtcagtaggacaaagaatctggcagagagattttccctggggttctatacaaccatcaacggtcaccagtggtctgagaccggtccagccaattatgggaagcacttagagatgcaaccagggagaccgcgcctttgccctgggtctctcaagcgtatacttccaatcatcgcccgatgattttgccagcctttgttgggacttcctgtaggaagaggctgtgaaaggcatattaggaacaaggatgggcaagcttgattccaccacaaggaatggttcttgcccaggaaagccagtttgcagggggccctgggatgttttcccttttaacaagtttatttccctttattcagagccttgctccagtttcccccaatacccaatgaacagcagttagccagactgacggattatgtggctttccttgaaaactgatttatcactctgagttcaagattcatcttcagaatcctgtatactggacaaacgtaggaaatgttaaagtttgttattttccaatttattgggatgggctttaagcacctcaggcattcctttactatggtggataaaaatacatattaggattttaagatatactattattacattttgttcccttaaacgtttatggctgaataggttgttggaaacagttctccattttgtaggtatt

SEQ ID NO: 15252 - DNA, 529 bp, Homo sapiens
  SIMILAR (289)..(534): 841254mologous to Mus musculus zinc finger protein 106,accession number AF060246,Smith-Waterman Score=342.
atggccaccctgaccatcagcagggctcagactgaggacgaggctgactattactgtcacaggataaagctggtgaaagagggcctggatgaaaggacacacaaagcgtatctttcatctagtggtaaaggatgtgagttccatatggtgaagcctgggtcaccccttggcccagacatcctaggctcttgggcccagtctgccctgattcagcctccctccgtgtccgggtctcctggacagtcagtcaccatctcctgcactggaaccagcagtgatgttgggagttatgactatgtctcctggtaccaacagcacccaggcacagtccccaaacccatgatctacaatgtcaatactcagccctcaagggtccctgatcgtttctctggctccaagtctgggcaatacggcctccatgaccatctctggactccaggctgaggacgaggctgattattactgctgctcatatgcaggcagctaccctgtggtattcggcggagggaccaagctgaccgtcctaggt

SEQ ID NO: 15253 - DNA, 737 bp, Homo sapiens
  SIMILAR (66)..(395): 901254mologous to Homo sapiens unnamed protein product,accession number AK002021,Smith-Waterman Score=498.
acacagatttctttcattgcttgcagtgatttagacacttcttctgaagccttgtctgtctttttgtcttgcttttccaaaatggccgaattgtctttcaggattttcacaatttctgctggatttttgtgtgatttactaaacaaaggcatttttttcatgtgtagaaatctcttcttccaatatggaatgcttagaagttgtatatcatttgcaaatttgtttgaaccttcttagctttcaccaaagtcactgatcaccacagcttgcttctctcctttagtgcattgctcttgcatgaagaatgaacaaaccactgatttggggttcgcatctttacgttctgaacagcaacttagaacactttgctcctgatattctttcttctcaatatttgatggatatccggaggaaacagctgcgccaccactccagtgatgccggcctctcgactacgagtaactccattggctcagctacagtgcgcgagacaagccgagagcgctagcagtcaatcgggaggcggcgcgctcgggcgccactgcggtgccagcggtaagtgcgccgagtctctgaggcgtgaaccagtggggagtgcgaccaatcaatgggctcctggctgggtggtgggacggccggcgtccgactcctcccatgtagtgatcggtttaggtaggtcggcctggtccccggcggaggttacgccttccctcatccccggtagaggcaggacgaaa

SEQ ID NO: 15254 - DNA, 4323 bp, Homo sapiens
  SIMILAR (168)..(46): 391254mologous to Homo sapiens Human HUPF-I mutant protein fragment 2,accession number Y21350,Smith-Waterman Score=67.
atgggccagtgcaagcaaagcagccagcattgtccactggccgaggcaggagcaccgctgcgccatcgggtctggtgctctcccgagaacgggggggagaaattcctgagaactgagctacactcaggaaatgcccacctgctgcgagcccagcaccgcccccgcatcttcacagacattggctcccatgggcctaacagcagccctatgcgggacggtgtgcctctcgtgatagaggaggaaactgaggcaagaggcggacaagttgctaccataagggtgctggacgatcctggagtcctgagctacgtgggctggccggtttcccgacgtcgggtggaggaggagtatgacatagaatcagatccaccagtgaagggaaccctccggcccagcagagtaagacagtggaaaacagcaaagagaaattcaagagagcaacgctttgcaggagctgaaataacacagcccagggcccacaatgctagagagaccttcgggggggggggggcatcaccttattggctgaaggaaaaggtgtaccagggtctcaccctcaaatccagtggactgagatccgatctcaggctcagggtgagagaacttcagagaagagacaccagctccgactcctcagatgtgaccttcctggaggcacctggtgccagccccccttccactggaatattagagactcgccggcttggcatggtagcttacgcctcccgggccgctccccagtcctctttcaaggtgctctttcacctctacgtccgcagtcacagactctccatccctgcaggggcgctgggctggatcctgaagtcagtccttcaaagtgttcgggttggccacaccagccctggggggatctataaagagggacacccctacggcattgtgcagagatgcattctcaacagaggggattggctggcaaaggcagagtgcaccaaagaactggaaactggtaacaaggaaaaggaaattcaaactgaacagaaacaaggtttaagaataaagcgcaactgtgatacgagggacactgcccttgggcagctcggaggaatcgtcgaggacccacaggcctcacctaatttgcaagagggcacctcgttccccagggtccagggctgtacggcactcagaaggtggctcaccagagtcttcctcctcctgcccccctccagttccaacgatgaacctcagagggattcccctgtcagaggaccagggtttcttatccctggcaccctcagtgttgacagacacttacgctatttcggtatcctgcctactgtgagtaacgctgcggtggtcaaggaagtgcccactgtgagcaatgctgcggtggtcacggaagcgcccactgggagtaacgctgcggtggtcacggaagcgcccactgggagtaatgctgcaagggtcatggaagtacctactgggagtaacgctgcggtggtcacggaggtgcccactgggagtaacgctgcggtggtcacggaagcgcctactgggagtaacgctgcggtggtcaaggaagcacctactgggagtaacgctgcaagggtcatggaagtgcctactgggagtaacgctgcggtggtcaaggaagcacctactgggagtaacgctgcaagggtcatggaagtgcctactgggagtaacgctgcggtggtcaaggaagtgcctactgggagtaacgctgcggtggtcaaggaagtgcctactgggagtaacgctgcggtggtcaaggaagcgcccacggggagtaacgctgcaagggtcatggaagtgcctactgggagtaacgctgcggtggtcacggaagcacctactgggagtaacgctgcaagggtcatggaagtgcctactgggagtaacgctgcggtggtcaaggaagtgcctactgggagtaacgctgcggtggtcaaggaagtgcctactgggagtaacgctgcggtggtcaaggaagcgcccacggggagtaacgctgcaagggtcatggaagtacctactgggagtaacgctgcggtggtcacggaggtgcccactgggagtaacgctgcggtggtcaaggaagcgcccacggggagtaacgctgcggtggtcaaggaagtgcccactgggagtaacgctgcggcggtcacggaagtgcccactgggagtaatgctgcggtggtcacggaagcgcctactgggagtaacgctgcaagggtcatggaagtgcctactgggagtaacgctgcggtggtcaaggaagtgcctactgggagtaatgctgcggtggtcaaggaagtgcctactgggagtaatgctgcggtggtcaaggaagtgcctactgggagtaacgctgcggtggtcaaggaagtgcctactgggagtaatgctgcaagggtcacggaagtgcccactgggagtaacgctgcggtggtcacggaagcgcctactgggagtaacgctgcggtggtcaaggaagcgcccacggggagtaacgctgcggcggtcaaggaagcgcccactgggagtaacgctgcggtggtcacggaagtgcctactgggagtaacgctgcaagggtcatggaagtgcctactgggagtaatgctgcggtggtcaaggaagcgcccacggggagtaatgctgcagtggtcaaggaagtgcccactgggagtaacgctgcggtggtcaaggaagtgcctactgggagtaatgctgcaagggtcatggaagtgcccactgggagtaatgctgcggtggtcacggaagcgcctactgggagtaacgctgcaagggtcatggaagtgcctactgggagtaacgctgcggtggtcaaggaagtgcctactgggagtaatgctgcggtggtcaaggaagtgcctactgggagtaatgctgcggtggtcaaggaagtgcctactgggagtaacgctgcagtggtcatggaagtgcctactgggagtaatgctgcggtggtcaaggaagtgcccactgggagtaacgctgcggtggtcaaggaagtgcccactgggagtaacgctgcggtggtcaaggaagtgcctactgggagtaacgctgcggtggtcacggaagtgcccactgggagtaacgctgcaagggtcacggaagtgcccactgggagtaatgctgcggtggtcacagaagtgcctactgggagtaacgctgcggtggtcacggaagtacctactgggagtaacgctgcagtggtcacggaagtgcaggctgtaagaggtggtgatttcatcttctttgggtctatcgcccacttgcagaaaagcatgtttcttcagcctgtggcacatgatcctgatttccgggccaatttaggggctcaggagggaatagaaagaggtacttgcacaagactaggaactaggccagtatctcacagggcctggaattgtattaatgaaaaccttgttaacagctgtaaaaccaatggggtcagagccaaagcgttggagaaagcacccaatgtagagcagcacacaggactaaaccccacagaagtaataaccgagccggccattcttagcgcggaggctgggagccgtacgggttcggtgcaggcgataaaaggtgggggttcagcaattattgaacgcctgctgcaacagcagcaacaacaacaacagcagtttactactcgttggcgtgcttcttccacttgccccatcaaaaataatgacaaactcactcgtgaggagcaggcgttcgacgtttcctctcatttcacatcaattcaggaggcggtggatgcgctcaactccaaaacaattcactggccagctgatttttgtgtagtgtgtgataccatattattcagtgacgcggtgggacaaggcgacaaacgtacagcgttccgtcggtacgcaaaggagtacaagaacagctcaacgttgctagcgcagatgattgtagcttcgggtgctgcaaacaatccaactaccaacgccacggcagagaagagcgcgtggttgaagcgcgctctggcaacacaaaaccacaagtcggcggaccgcgaggagaaggccggcagcgtgtctaccgggcctgcggtaaagcgcgaggaggagcaccgtgttcgagtttgggatgcggcatggtgtacggttgtgtatcaggtaactccgcgtgagatgaagtttaatgtcactcacctggttggtcttggaaaggacaaccttgcggaggccattcaattcctgaacgcacgcgctctgccaaagggagggaaggcggcgaacggtcgagagaatcctctgcagaattacccgtacgactacgcccttctcttctcttga

SEQ ID NO: 15255 - DNA, 969 bp, Homo sapiens
  SIMILAR (829)..(443): 631254mologous to Homo sapiens Human secreted protein sequence SEQ ID NO:195,accession number Y87156,Smith-Waterman Score =364.
atgaatgtgaatttggcagaagaatcaaagggcaaagaaacagtaggtgatgaaattaaaggaggcggaattcagatggtaatgcttgccagccagccactcacctcctactgtgctgcccggttcataacaggccatggacagaaattaaaatctgagttaaaaaaaaccctgcaagtcattatgctaaatattcagaaagtgagaatacccactagggatggctataatgaaaaagacatactaagcactggcaaaaatgtagagaaactggaactctcaaacattgctggatatccatcaaatattgagaagaaagaatatcaggagcaaagtgttctaagttgctgttcagaacgtaaagatgcgaaccccaaatcagtggtttgttcattcttcatgcaagagcaatgcactaaaggagagaagcggtttcttatccctggcaccctcagtgttgacagacacttacgctatttcggtatcctgcctactgtgagtaacgctgcggtggtcaaggaagtgcccactgtgagcaatgctgcggtggtcacggaagcgcccactgggagtaacgctgcggtggtcacggaagcgcccactgggagtaatgctgcaagggtcatggaagtacctactgggagtaacgctgcggtggtcacggaggtgcccactgggagtaacgctgcggtggtcacggaagcgcctactgggagtaacgctgcggtggtcaaggaagcacctactgggagtaacgctgcaagggtcatggaagtgcctactgggagtaacgctgcggtggtcaaggaagcacctactgggagtaacgctgcaagggtcatggaagtgcctactgggagtaacgctgcggtggtcaaggaagtgcctactgggagtaacgctgcggtggtcaaggaagtgcctactggagtaacgctgcggtggtcaaggaagcgcccacgggagtaa

SEQ ID NO: 15256 - DNA, 705 bp, Homo sapiens
  SIMILAR (595)..(1476): 671254mologous to Homo sapiens p40,accession number U93570,Smith-Waterman Score=909.
atggagttggtgctggtcttcctctgcagcctgctggcccccatggtcctggccagtgattaccagaccctgaggattgggggactggtgttcgctgtggtcctcttctcggttgggatcctccttatcctaagtcgcaggtgcaagtgcagtttcaatcagaagccccgggccccaggagatgaggaagcccaggtggagaacctcatcaccgccaatgacaagacatcccccttcctccgggaggtgcaggtcaatctcatcgacttcaagaaatgcaatgactacttggtctatgacagttaccttaccccaaggatgatgtgtgctggggaccttcgtgggggcagagactcctgccagaacaaccgctggtacctggcaggtgtcaccagctggggcacaggctgtggccagagaaacaaacctggtgtgtacaccaaagtgacagaagttcttccctggatttacagcaagatggagactagcccagtgtgggcagatgccagcggcccaggtggcgccattgctgtcctgggatggatcgtgggttttggtggatgcagcttcccagggcctggaccgtcttcggtgaaaagctgctcccgttggctttatgagcatcaagtcctcacccagaccccctgctggtgccgtggatgtcaccagtcggactgtgctgtggctaaccaggctgacaactga

SEQ ID NO: 15257 - DNA, 2064 bp, Homo sapiens
  SIMILAR (949)..(1185): 561254mologous to Homo sapiens PRO2221,accession number AF116695,Smith-Waterman Score=207.
  misc_feature (1)...(2064): n = a,t,c or g
ggcacgaggcgggactcggcgggtcctcctgggagtctcggaggggaccggctgtgcagagaacttcagccaaagcatctgagacgggaagcagaaaaaggagggacagtttggagaagaaaaacgcagctgtgtgtttgggccttgacgtggctgtggatgcagtcgttctgacccctggtggccgagaggtgaagtgcagtggcggctgcttgctcaaggccggaggaagacgccatggagttggtgctggtctttctctgcagcctgctggcccccatggtcctggccagtgcagctgaaaaggagaaggaaatggacccttttcattatgattaccagaccctgaggattgggggactggtgttcgctgtggtcctcttctcggttgggatcctccttatcctaagtcgcagggtgcaagtgcagtttcaatcagaaagccctcgggccccaggagatgaggaagcccaggtgggagaacctcatcaccgccaatgcaacagaagccccagaaagcagagaactgaagttgcagccattcaggtgggaagccctttggaaccgtgagggcggctgctttgaaacctttgggatgcaaaatgtccgatgcttaagaaaaaccggccacttcagcaacagccctttccccaggtataagccaagaaacttgtgtgtcccccaccctatcccctctaacaccattcctccacctgatgatgcaactaacacttgcctccccacatgcagcctgcggtcctgcccacctcccgtgatgtgtgtgtgtgtgtgtgtgtgtgtgactgtgtgtgtttgctaactgtggtctttgtgggctacttgtttgtgggatggtattgtgttttgttaagtgaactgtgggactcgcttttcccagggcagggggctgagccacatgggccatcttgcttccttccctgccccccgtgggccctccatcaccttctgctcctagggaaggctgctttgttggcccgagaaccagccccctcccctgatttagggatgcgtaggggtaagagcacgggcaagtggtcttcaagtcgtcttgggacctgggaaggtttgcaagcactttgtcaatcattcttcaatggactcctttcaatcctttaacaaaaaacttggtttccttaatcccaactgattccaatctgaaaggtctcttaagcaaatggaagaatacaaagcaaggaagctgggtgaagcccagcgttgaaggtaaggaagggcaatgcctttccgtggttaatttcttcccaggggcttccacgaggagtccccatcttgccccgccccttcacagagcgcccggggattncagggcccagggctttctactctgcccctggggaactgtgtcccctgcatatcttcttcagcaataaactccaatgggctctggggacccctaaccccttccaaaccttcccctgctttttgaggactttcaatctacaagcccagcttcatccagaatgcagactgacagtcccctgcaaattgggtcctcctggccaggccaaatagttgaaaggaactccctgttcccgttggggcccagcacacccgggaatggaatggaagggaagaagcagaggccctttgccttcctcctgccctacgtcccccttaagatgggccagcagaggcaactccccgcatccctttgctcctgccctgttgggtggtcaaaaccggtaagcaaggtgggttggagactcagcaggctcccgtccaagcccttgggaacaagtgagaggttgaaggtcataaccgagagtgggaactcaaacccagatcccgcccctcctgtcctcctgtgttccccgcggaaaccaaccaaacccgtgcgctgtgagcccattgctgttctttggatcgtggtttaacctccaccaccaccaagaaaaaaggccctcaaatatcctttgtttcctagtgactgatccgcagtcagtcgcttatcgcgagtcttaactatccattattgggggggtctgtttatatgtgacattttttcgggtgcttgctttccgtcct

SEQ ID NO: 15258 - DNA, 2364 bp, Homo sapiens
  SIMILAR (1)..(696): 661254mologous to Homo sapiens p40,accession number U93570,Smith-Waterman Score=773.
atgtctggtttgtctggcccaccagcccggcatggcccttgtccatcggcgttgctgcttttgttcctgctgggccccagcttggtcctcgccatctccttccatctgtccattaattctcacaactgcttccatgaggagatccacaaggacctactagtgactggcacatacgagatctctgaccagtctgggggcactggtggcctgtgcagccacctcaagatcacagattctgctggccatattttctactccaaaaagaatacaaccaaggggaaatttgcctttaccactgaagattatgacatgtttgaagtgtgttttgagagcaaggaaacagggcagatacctgaccaacttgtgatcctagacatgaagcatggagtggaggtgaaaaattacagagagattgcaaaagttgagaagctcaaaccattagaggtgaagctgcgacacctagaagacctttcagaatctattgttaatgattttgcctacatgaagaagagagaagaggagatggtgataccaccagcagaacatcgctgggatgggcctggcctaaggcatcctaccagcagcaccatcaaggcatgctgtgattcttggattgaaaaagaggaaatgattccaaagcaggacatttctgaagaattggaatcccggagagcaaagtcagaagatcatagtttccaattaggagaaagagcctatcagacagatgtgttagtgaaagtgcccagacagagctcagtttttagtgagaatcagaggatgaataatccagagagatggtttgagagtactgggtgtggaaaaacttacaatcagaacagagcttttaaccagcaccagagatttcatagtggagagaagacctatgagcacaatgaatgtggaaaagctttcagttggccctctatcctcagtaaacatcagagaatccacactggtaagaaactctacacatgtgaggattgtggcaaatctttcagtgttcactcatactttattcagcattgtaaaattcacactagagaaaaaccctatgagtgtattaaatgtgggaaagcttttagtacacattcatcttatgttcaacatctaaaaattcatacaggagagaaacatcatgagtgtaatcagtgtgggaaagcctttagtcatagctctaatctaattcatcatcagagaattcatagtggagagaaaccttacaagtgcaaagaatgtgggaaagccttcaacagacaatcaaaccttattcagcatcagagaattcattctggagagaaaccttatgactgtaaggagtgtggcaaagccttcagtacacaattatttctcattcagcatcagagaattcatacaggagaaaagccctatgaatgtaatgaatgtgcaaaatcctttagcctgaaccgaactcttactgtccatcagagaattcacactggagagaaaccttataggtgtaatgaatgtgggaaatcctttagtcaatgctcacaagttattcaacataagagaattcacactggagagaaaccttatatctgcaatgagtgtggaaaatcatttggtgctcgtctatcccttatccagcatcagagaattcacactggagagaaaccttatggttgtagagagaaaccctatgaatgtagtgagtgtggaaaagctttcagccagagttttaatcttattcaccatcaaagaacacacaatggtgagaagtcctatgaatgtaatgaatgtgataaagccttcagtttgctttcttcccttgttcaacatcagagaatacataatggagacaaaccctatgagtgtcacaaatgtgggaaggcctttagccaggggtcacaccttattcagcatcagaggagtcacattggtgagaaaccctatgagtgtaatgagtgtgggaaaacctttgggcagatatccaccctaattaagcatgagagaacacacaatggagagaagccctatgagtgcagtgactgtgggaaggccttcagccagagtgcacaccttatccaccatcaaagaattcacactggagagaatccctatgagtgcagtgaatgtgggaaggccttcaatgtttgttcctctctcattcagcatcacagaattcatactggtgagaaaccttatgaatgtagtgactgtggcaaggcgttcagtcagcattcacaatttatccaacatcagagaattcacactggagagaaaccctacatgtgcaatgagtgtgagaaatccttcagtgcatgcttatcccttatccaacacaagagaattcacactggagagaaaccctatgtatgtgccaaatgtggaaaatccttctga

SEQ ID NO: 15259 - DNA, 752 bp, Homo sapiens
  SIMILAR (74)..(163): 561254mologous to Homo sapiens Polypeptide fragment encoded by gene 52,accession number W88802,Smith-Waterman Score=81.
ttgaggccttcggtggtgaacgagtctccagcaccatgtctggtttgtctggcccaccagcccggcgcggcccttttccgttagcgttgctgcttttgttcctgctcggccccagattggtccttgccatctccttccatctgcccattaactctcgcaagtgcctccgtgaggagattcaacaaggacctgctagtgactggcgcgtacgagatctccgaccagtctgggggcgctggcggcctgcgcagccacctcaagatcacagattctgctggccatattctctactccaaagaggatgcaaccaaggggaaatttgcctcttaccactgaagattatgacatgttttgaagtgtggtttgagagcaagggaacagggcggatacctgaccaactcgtgatcctagacatgaagcatggagtggaggcgaaaaattacgaagagattgcaaaagttgagaagctcaaaccattagaggtagagctgcgacgcctagaagacctttcagaatctattgttaatgattttgcctacatgaagaagagagaagaggagatgcgtgataccaacgagtcaacaaacactcgggtcctatacttcagcatcttttcaatgttctgtctcattggactagctacctggcaggtcttctaccctgcgacgcttcttcaaggccaagaaattgattgagtaatgaatgaggcatattctcctcccaccttgtacctcagcccagcagaacatcgg

SEQ ID NO: 15260 - DNA, 426 bp, Homo sapiens
  SIMILAR (143)..(424): 931254mologous to Homo sapiens glutathione S-transferase A3,accession number L13275,Smith-Waterman Score=437.
  misc_feature (1)...(426): n = a,t,c or g
agaagctgagcggagaccggctagactttactcaaagaaaccaagagactgttaccatggcagggaagcccaagcttcactacttcaatggacggggcagaatggagcccatccggtggctcttggctgcagctggagtggagatgggagtttgatgttccagcaagtaccaatggttgagattgatgggatgaagttggtacagaccagagccattctcaactacattgccagcaaatacaacctctacgggaaagacataaaggagagagccctaattgatatgtatacagaaggtatggcagatttgaatgaaatgatccttcttctgcccttatgtcgacctgaggaaaaagatgccaagattgccttgatcaaagagaaaacaaaaagncgctatttccctgccttcgaanaagagttacn

SEQ ID NO: 15261 - DNA, 354 bp, Homo sapiens
  SIMILAR (1)..(228): 631254mologous to Homo sapiens gluthione S-transferase subunit 1 (GST,EC 2.5.1.18),accession number M25627,Smith-Waterman Score=219.
gtcttaaagagccacggacaagactaccttgttggcaacaagctgagccgggctgacattcacctggtggaacttctctactacgtggaagagcttgactctagccttatttccagcttccctctgctgaagatttccatgaacccagacagagaccacttcatttacgattgggtagaaccattcttagacgaagaaggttatccagaccctgagaaatgtggtcgtattcgttggattgttcagaggagcccagcaatactataccctgttggaaaaaatgaaaactccttgcagtttaccaagtcctcttgcaaacagagccgctacctggagatatgccagtggaagtaa

SEQ ID NO: 15262 - DNA, 870 bp, Homo sapiens
  SIMILAR (835)..(1194): 501254mologous to Homo sapiens p40,accession number U93567,Smith-Waterman Score=296.
atgaaactgtgggtaacgcacagccagtttattgttgagcatattaatgccatgaccacgctggcgcgggaacaccgggcattgccacctgaactggcacaagagtatttacagtcttgtgaaatcgccattcagcgttgtcagcagcgactggagtatgacgaaccgggtagttctggcgatgccaatatcatggatgcgccggagatgcagccgcacgaaggcgcggcaggtacgctggagcagcatttacagcgggttattggtcatctgaacaccatgcacaccatttcgtcgatggcatttacaaaagaggctgaaatgttacaggtcaggagcctacaaaggtaccataacattagtgctcagaaccttttgccgcgcatatttgatgaataccaccaacacggttcaatctttggtattcccgagcaacagttttactcacctgtaagaggtaaaactgttagcgtcttcggtgaaacctgtgccactcccgtcggccctgccggtggcccgcacacgcagctcgcgcaaaatattgtcacttcctggctgactggcggacgcttcatcgaactaaaaaccgtccaaattcttgaccgcctggagctggaaaagccctgtatcgatgccgaagacgagtgctttaacacccaatggtctaccgagtttaccctgcttaaagcctgggatgaatacctcaaagcctggtttgccctgcaccttctcgaagcgatgttccagccttctgattccgggggatcctctagagtagagttgcatcagggtagctcgattgcgttgggggcgatcctaacagtgtaccgaggtgggctccggtgctatttacgcgacacgtgcgcctag

SEQ ID NO: 15263 - DNA, 1323 bp, Homo sapiens
  SIMILAR (451)..(678): 631254mologous to Homo sapiens PRO2221,accession number AF116695,Smith-Waterman Score=233.
atgttcccggaatttggtggcgattcctcggcgcagaccgacaactttatgaccaaacgcgccagcggtctggcgacgtatcggaacaccgacttcttcggcgttatcgatggcctgaacttaaccctgcaatatcaagggaaaaacgaaaaccgcgacgttaaaaagcaaaacggcgatggcttcggcacgtcattgacatatgactttggcggcagcgatttcgccattagtggggcctataccaactcagatcgcaccaacgagcagaacctgcaaagccgtggcacaggcaagcgtgcagaagcatgggcaacaggtctgaaatacgatgccaataatatttatctggcaactttctattctgaaacacgcaaaatgacgccaataactggcggctttgccaataagacacagaactttgaagcggtcgctcaataccagtttgactttggtctgcgtccatcgctgggttatgtcttatcgaaagggaaagatattgaaggtatcggtgatgaagatctggtcaattatatcgacgtcggtgctacgtattatttcaacaaaatatttcatcaagggctaaaaaaaggtcgaaaaggccagtacctgtccaatgctgatctgcctagagaatcttcggatcagctcgcgcaaaatattgtcacttcctggctgactggcggacgcttcatcgaactaaaaaccgtccaaattcttgaccgcctggagctggaaaagccctgtatcgatgccgaagacgagtgctttaacaccgaatggtctaccgagtttaccctgcttaaagcctgggatgtatacctcaaagcctggtttgcctgcaccttctcgaagcttttactggtatactgcgtgtcttgcgctttgttgcggtgccaaaacctgcccgtgcgaagtgatttgtttttaaatcatatggttagagatatgaaacatactgtagaagtaatgatccccgaagcggagattaaagcgcgtatcgccgaactgggtcgtcagattactgagcgttacaaagacagcggcagcgatatggtgctggtgggtctgctgcgtggctcatttatgtttatggcggacctgtgccgtgaagttcaggtatctcatgaagtcgactttatgaccgcctccagctacggtagcggcatgtccaccacccgtgatgtgaaaatcctcaaagatgaccgcaggcagcgagttccagggggacttaagctttggcgcttctgccctggccctctgttggccactccgcgggtgctgtgcctgggcgcctccgtgctctcggccaactgcctttga

SEQ ID NO: 15264 - DNA, 3672 bp, Homo sapiens
  SIMILAR (841)..(2172): 771254mologous to Homo sapiens putative p150,accession number U93563,Smith-Waterman Score=1631.
atggccgccgtgtgcggtaccagcggcattgcttctcttttttctcaggcggcattcgcggcagattctgatattgccgacgggcaaacccagcgttttgacttctccattctacagtcaatggcgcacgacttagcgcaaacagcgtggcgtgatgtgcacaacacaacatataactacaagcgattgatgagccagcgggatgccctgaatcagagcctggcagaagtccaggggcagattaacgtttcgttcgagtttttcccgccgcgtaccagtgaaatggagcagaccctgtggaactccatcgatcgccttagcagcctgaaaccgaagtttgtatcggtgacctatggcgcgaactccggcgagcgcgaccgtacgcacagcattattaaaggcattaaagatcgcactggtctggaagcggcaccgcatcttacttgcattgatgcgacgcccgacgagctgcgcaccattgcacgcgactactggaataacggtattcgtcatatcggggcgctgcgtggcgatctgccgccgggaagtgagatgcgctctaagattgcgcaggatatcgatcaatccgtcgatcttctctcgctttcggaagagatgcccgcaaatgaagatctcctgaatgaagattcagcggcaccggttatccgcttgatcaatgcgattttgagtgaggccatcaaagaaaccgcctctgatatccacattgaaacctatgaaaaaacaatgtcgatccgttttcgcatcgacggcgttttgcggacaattttacagccaaacaaaaaactggcggcactgcttatctcccgaattaaggtcatggctcgtcttgatatcgccgaaaaacgtattccacaggatggaagaattagtttgcgtatcgggcgacgtaacatagatgtccgcgtatccacactgccgtccatctatggtgaacgcgccgtactccgcctgctggataaaaacagcctccagctttcattgaacaacctggggatgacggcagcggataagcaggatttagaaaatctcattcagcttccgcacggtattatcctggtgacagggccgacaggctccggtaaaagcaccacgctctacgccatcctttccgcgctgaatactcccggccgcaatattctgacggtagaagatcccgtggaatatgagctggaacgcattgggcaaacgcagccttctgattccggtaaatcgttcatctttaatatgagcgtcggttacaacctcgaaggtattaagcaaccgccgatgcaacagttcatcgacaatatgatggacgcatctgaccatccgaaattcgctcaatatcgcgatacgctgaataaattactccaggatgacgcatttttagctcgccacggattgcaggaaaaacgcgaaagcttgcaagccttacccgctcgcatccccaccagtatggtgcatggcgtcaccctctccaccatgcacggctgtcctccgcatgaaatcgaagccatttgccgctacatgctggaagaaaaagggctcaacacctttgtgaaacttaacccgaccttactggggtacgcgcgtgttcgtgagatcctcgatgtctgcggtttcggttacataggcttaaaagaagagtcatttgatcacgacctcaagctgacgcaagcactggaaatgctggaacgcctgatggcactggcaaaagaaaaatcactcggctttggcgtaaaactgactaacactctcggcaccatcaacaataaaggcgcactgcctggtgactctacgagtggcgttctgcggacttacgagcggctcttgaccgcctggatgctgacatgcccatgcgctgatgagcatcaacgcggtgaaagcgtgaaattggcgacggctttgacgtggtggctgcgcggcagccagaaccgcgatgaaatcaccaaagacggtttccagagcaaccatgcgggcggcattctcggcggtatcagcagcgggcagcaaatcattgcccatatggcgctgaaaccgacctccagcattgacgtgccgggtcgtaccattaaccgctttggcgaagaagttgagatgatcaccaaaggccgtcacgatccctgtgtcgggatccgcgcagtgccgatcgcagaagcgatgctggcgatcgttttaatggatcacctgttacggcaacgggcgcaaaatgccgatgtgaagactgatattccacgctgcgcacaatcgataggcagtttttctaatggctgtattgtcggcgctgacacgctgccgatacagtccgaacattatcaggtcatgcgtaccgatcagcgtcgctatttcggtcacccggatctggtgatgtttatccagcgtctgagtagccaggtgagcaatctgggcatgggtacggtgctgattggcgatatggggatgcccgctggtgggcgtttcaacggcggtcatgccagccaccagaccggactggatgtcgatatctttctgcaactgccgaaaactcgctggacctccgcgcagctcttgcgcccgcaagcactggacttagtttcccgcgacggtaaacacgttgtctccacgctgtggaagccagaaattttcagcttgatcaaactcgccgcccaggacaaagacgtcacgcgcatttttgttaatccggcgattaaacaacaactttgccttgatgcgggcacgatcgcgactggttgcgcaaagtgcgaccctggtgtcagcatcggcgcatatgcatatttgctgacgttgcgcgcccagtgtctggcacatgacttgcctgacccgttagagccgctggaaatcgacggcacgctactgccgcgctatgtgttcattcacggcgggccgcgtgtgttcacctattacacgccgaaagaagagtctattaagctgttccacgactatctcgatttgcaccgtagcaacccaaatctggatgtgcagatggtgccagtgtcggtgatgtttggtcgcgcgccggggcgtgaaaaaggcgaagtgaacccgccgctgcgtatgcttaacggcgtacagaaatttttcgctgtactgtggctcggtcgcgacagttttgtgcgtttctcgccgtcagtttcgctgcgccgtatggcggatgaacacggcacggataaaactatcgctcagaaactggcgcgcgtggcgcgtatgcactttgcccgtcaacgtctggctgccgtaggcccacgtttgcctgctcgtcaggatctgtttaataagctgctcgcctcccgcgccattgccaaagcggtagaagatgaagcgcgcagcaaaaaaatctcccatgaaaaagcgcagcagaacgcgattgcactgatggaagagattgcggcgaatttctcttacgagatgattcgcctgactgaccgtattctgggcttcacctggaaccgactttaccagggcatcaacgtccataacgctgagcgcgttcgccagctggcccacgacggtcatgagctggtatatgtgccttgccaccgcagtcacatggactacctgctgctttcttacgtgctgtatcaccaggggctggtgccgccgcatatcgccgccgggatcaacctgaatttctggcctgccgggccgattttccgccgtctgggggttatttag

SEQ ID NO: 15265 - DNA, 1040 bp, Homo sapiens; identical to SEQ ID NO: 7563
  SIMILAR (1)..(888): 1001254mologous to Cloning vector pZC320 SopA,accession number U26464,Smith-Waterman Score=1548.

SEQ ID NO: 15266 - DNA, 1087 bp, Homo sapiens
  SIMILAR (1010)..(1597): 771254mologous to Homo sapiens putative p150,accession number U93564,Smith-Waterman Score=774.
  misc_feature (1)...(1087): n = a,t,c or g
gaactattgagaggaacaaagagcttataaatacattaggacctggaattcagttgtcgagccaggacggtgacagcgtttaacaaagcttagagaaacctccaggagactgctatcatggcagagaagcccaagctccactacttcaatgcacggggcagaatggagtccacccaggtggctcctggctgcagctggagtagagtttgaagagaaatttataaaatctgcagaagatttggacaaggtaagaaatgatggatatttgatgttccagcaagtgccaatggttgagattgatgggatgaagctggtgcagaccagagccattctcaactacattgccagcagatacaacctctatgggaaagacataacggagagagccctgattgatatgtattataggaaggtattagccagatttggggtgaaattgatcctccttcttgcccgtatgttccacctgagggaaaaagatgcccaagctttgccttggatcaaagagaaaataaaaaatccgctacttccctgcctttgaaaaaagtcttaaagagccatgggacaagactaccttgttgggccaacaagcttgagccggggctggacattcatctggtgggaacttctctactacgtcgagggagcttggactccagtcttatctcccaacttcccctctgctgaaggccctgaaaaccagaatcagcaacctgcccacagtgaagaagtttctacagcctgggcagcccaaggaagcctcccatgggatgaggaaatctttaggaaggaaggcaagggaagatttttcaggtttttaataacggcagttcatgggaggccaagaacttggcaataccaatgtttctnaaagttttggcaacaataaagtacttttacctaagtgttagattgtggcctgttgtgaagctaatgaactctttcaaattatatgctaattaaataataaaaactcctattcgctgacttagttaaaattgatttgttttcattaggatctgatgtgaattcagatttccaatcttctcctagccaaccattttcctggaattaaaaattcagtaaa

SEQ ID NO: 15267 - DNA, 738 bp, Homo sapiens
  SIMILAR (457)..(735): 691254mologous to Homo sapiens ribosomal protein L31,accession number X69181,Smith-Waterman Score=300.
atggtaaagttagaggaagcagaagagagagaggaaaaaggagaaggaaaagaagaaggagaaggaggagggggacagaatggggaggtggaagagaaggaggagggggaggaggaaaaggagaagatggagaagaagaagaaaaaaaagaaatggggcctcatgtctacaatttatgaggatgtcagtcataagatatttttccagcatggaccaaatatagcatgtgttgaaacgtgtaaagaaagccagagggaagggtatgtgaagaaaagctgtggactgaggaatcaaagggtaactatgaaatcagagatgcacctgggcatactctatgacaatggaaattttcttaatcagttgtgtcaaaaccctttctgtgaggtatgcagtacagcaattgaagacaggggtcttctgctctttggagactcaacccagcaaaatggctcctgcaaagaagggcagcaagaagaaaaaaggccattctggatcattgaggtggtgacccaagaaaacaccatcaacattcagaagcatatccatgaagtgggcttcaagaagtgtgcccctcgggcactcaaagagattcagaaatttgccatgaaggagatgggaactccagttgtgctcattgataccaggctcaacaaagctgtctgggccaaaagaataaggaatgtcacaaacagaatccatctgtgtttgtccagaaaatgtaatgaggataaagagtaa

SEQ ID NO: 15268 - DNA, 323 bp, Homo sapiens
  SIMILAR (619)..(1056): 511254mologous to Homo sapiens p40,accession number U93567,Smith-Waterman Score=345.
cactctcctccctggctagcatgagcttcaccacttgctccgccttcaccaactactggtccccgggttctgtccaggtgcccagctatggcacccagcctgtcagccacgcagccagcgtctatgcaggcctggggggctctggttcccggatctccgtgtcccacttcaccaatggccgggggtctggcaggaatgggaggcatccagaacgagaaggagaccatgcaaagcctgagagaccgcctggcctcctacctggacagggtgaggggcctggagaccgagaattggaagctggagagcaaaatccaggagcacct

SEQ ID NO: 15269 - DNA, 991 bp, Homo sapiens
  SIMILAR (627)..(529): 721254mologous to Homo sapiens Human secreted protein HMDAL49, SEQ ID NO:219,accession number Y86304,Smith-Waterman Score =115.
atgaggaaaacttacggaatttgtgagaaagtatcaaaggataaaatatttgagtccataggagttagagaagcagaagagaaaaataaagggacaaaaagtgtatttaaagaaatgatagccaaaaaactttccaaacctggagaaagctctgtccttgcgaccacctacggcgcccggctggtcagcagcacagccagagtctatgcaggcgccgggggctctggttcccggatctctgtgtcccgctccaccagcttccagggcggcttggagtccgggggcctggccgcggggatggccgggggtctggcaggaataggaggcatccagcacgagaaggagaccatgcaaagccctgaaagactgcctggcctcctacctggacagaaccatccagaacctgaggattcagatcttcgcaaatactgtggacaatgcctgcatagttctgcagattgacaatgcccgtcttgccgctgatgactttagagtcaagtatgagacagagctggccatgcgccagtctgtggagaacgacatccacgggctccgcaatgtcattgatgacactgtcactcggctgcagctggagacagagatcgaggctgtcaaggaggagctgctcttcatgaagaagaacctcaaagaggaagcaaaaagcttacaagcccagattgccagctctgggttgatggtggaggtagatgcccccaaatctcaggacctcgccaaggtcatggcagacatccgggcccaatatgacgagctggctcagaagaacggagaggagctggacaagcattggcctcagcagattgaagagagcaccacagtggtcaccactcagtccgccgaggttggagctgctgagacgacgctcacggagatgagacgtacagtgcagttcttggagatgacatggactccaggagttatcgaggtcctcagtgtttttaagtacagggtcatcactgaagttgctttgtag

SEQ ID NO: 15270 - DNA, 1030 bp, Homo sapiens
  SIMILAR (431)..(919): 781254mologous to Homo sapiens cytokeratin 18,accession number X12881,Smith-Waterman Score=560.
aagaagacctggaagccttaggcctcgatacgcatgtgacggggcgacccacgcgtgcggcgacgtacgcaaagcctgagtcctgtcctttctctctccccggacagcatgagcttcaccactcgctccaccttctccaccaactaccggaccctgggctctgtccaggcgcccagctacggcgcccggccggtcagcagcgcggccagcgtctatgcaggcgctgggggctctggttcccggatctccgtgtcccgctccaccagcttcaggggcggcatggggtccgggggcctggccaccgggatagccgggggtctggcaggaatgggaggcatccagaacgagaaggagaccatgcaaagcctgaacgaccgcctggcctcttacctggacagagtgaggagcctggagaccgagaaccggaggcttggagagcaaaatccgggagcacttggagaagaagggaccccaggtcagagactggagccattacttcaagatcatcgaggacctgagggctcagatcttcgcaaatactgtggacaatgcccgcatcgttctgcagattgacaatgcccgtcttgctgctgatgactttagagtcaagtatgagacagagctggccatgcgccagtcttgtggagaaccgacatccatgggctccgcaacgtcatttgatgacaccaattatcacaccgacttgcagctggagacagagatcgaggctctcaaggaggagctgctcttcatgaagaagaaccacgaagaggaagtaaaaggcctacaagcccagattgccagctcctgggttgaccgtggaggtaagatgcccccaaaatctcaggacctcgccaagatcatggcaagacatccgggcccaatattgacgagctggctcgggaagaaccgagaggaagctagacaagtactggtctcagcagattgaggagagcaccacagtggtcaccacacagtctgctgaggttggagctgctgagacgacgctcacagagctgagacgtacagt

SEQ ID NO: 15271 - DNA, 438 bp, Homo sapiens
  SIMILAR (52)..(249): 811254mologous to Homo sapiens keratin 8,accession number M26513,Smith-Waterman Score=271.
ctgcattcagatgatttatctctacaaatgttgagatgcagcccagttgcaacagccgcttcctacacgagtggtcccggtgcccccatcagctcctcaagcttctcccgagtgggcagcagcagcttccagggtggcctgggtggaggctttggcggggccagcggtattggagggatcactgctgtcatggtcaaccagagcctgctgaggccccttaacctggaggtggaccccaacatccaggccaggttctgcacacccaggagaaggagcagatcaagacattcaaaacaagtttgcctccttcatcgacaaggtacggttcctggagcagcagaacaggatgctggaggccaagtggagcctcctgcagcagcagaagatggctcagagcaacatggacaacatgttccagagctacatcaacaaccttag

SEQ ID NO: 15272 - DNA, 1455 bp, Homo sapiens
  SIMILAR (634)..(1446): 571254mologous to Homo sapiens ORF2 contains a reverse transcriptase domain.; ORF2,accession number M80341,Smith-Waterman Score=834.
atgagcaccaactgcattagtgggactcttactattcctcttcaaccgctttgttccacccctaacattttccttatggatgaatttggtttcctcagtcatgatgcaggtattttcctgcagtatgcaatcatatggcaaagcagcagtcaagtggttaaatgtgcaatcgtgagaaattttcccactggtgatccagaagtcctacaaggtatccacctctggcccccgggccttcagcagccgcttcctacacgagtggtcccggtgcccccatcagctcctcaagcttctcccgagtgggcagcagcagcttccagggtggcctgggtggaggctttggcggggccagcggtattggagggatcactgctgtcatggccaggttctgcacacccaggagaaggagcagatcaagacattcaaaacaagtttgcctccttcatcgacaaggtacggttcctggagcagcagaacaggatgctggaggccaagtggagcctcctgcagcagcagaagatggctcagagcaacatggacaacatgttccagagctacatcaacaaccttaggtggcagctggagactctgggccaggagaagctgaagctggaggcagagcttggcaacatgcaggagctggtggaggacttcaagaagaagtaccatgatgagatcaataagcatacagagatggagaatgaatttgtcctcatcgagaaggatgtggatgaagcttacaagaacaaggtagagctggagtctcacctggaagggctgactgatgagatcaacttcctcaggcagctgcatgaagaggagatctgggagctgcagtccctgatctcggacacgtctgtggtgctgtccatagacagcagccactccctggacatggacaacatcatcactgaggtcaaggcccagtataaggagatcgccaactgcagctgggctaaggctgacagcatgtaccagatcaagtatgaggacctgcagatgctggccaggaagcacggggataacctgaggtgtacaaagactgacatctccgagatgaaccagaatgtcagctggctccaggctgagatcaagggcctcaaaggccagagggcttccctggaggccaccatcacagatgccgagaagcgcagggagctggccattaaggatgccaacaccaagctgttggagctggaggccgccctgcagtgggccaagcaggacatggcacagcagctgcgtgtataccaggagctgatgaatgtcaagctggccctggacatcaagactgccacctacaagaagctgctggagggtgaagagagctggcaagagtctaggatgcagaacatgagtatctactcaaagaccaccagtggctacgcaggagggctgagctcggcctatgggggcctcacaagcccccctcctcagctatggcctgagctctag

SEQ ID NO: 15273 - DNA, 982 bp, Homo sapiens
  SIMILAR (769)..(1509): 901254mologous to Homo sapiens p40,accession number U93573,Smith-Waterman Score=1131.
  misc_feature (1)...(982): n = a,t,c or g
gctcctttctagcatctccgcctggttcggcccgcctgcttcaactcctgcctttaccatgtccatcagggtgacccagaagtcctacaaggtgtccaacttcttgcccccgggccttcagcagccgctcctacacgagtgggcccggttcccgcatcagctcctcgagcttctcccgagtgggcagcagcaactttcgcggtggcctgggcggcggctatggtggggccagcggcatgggaggcatcaccgcagttacggtcaaccagagccctgctgagcccccttgtccttgaggtggaccccaacatccaggccgtgcgcacccaggagaaggagcagatcaagaccctcaacaacaagtttgcctccttcatagacaaggtacggttcctggagcagcagaacaagatgctggagaccaagtggagcctcctgcagcagcagaaagacggctcgaagcaacatggacaacatgttcgagagctacatcaacaaccttaggcggcacgtggagactctgggccaggagaagctgaagctggaggcggacgttggcaacatgcaggggctggtggaggacttcaagaacaagtatgaggatgagatcaataagcgtacagagatggagaacgaatttgtcctcatcaagaaggatgtggatgaagcttacatgaacaaggtagagctggagtctcgcctggaagggctgaccgacgagatcaacttcctcaggcagctgtatgaagaggagatccgggagctgcagtcccagatctcggacacatctgtggtgctgtccatggacaacagccgctccctggacatggacagcatcattgctgaggtcaaggcacagtacgaggatattgccaaccgcagccgggctgaggctgagagcatgtaccagatcaagtatgaggagctgcagagcctggctgggaagcacggngatgacctgcggcgcacaaagactgagatc

SEQ ID NO: 15274 - DNA, 376 bp, Homo sapiens; identical to SEQ ID NO: 4246
  SIMILAR (2)..(154): 981254mologous to Mus musculus surfeit 3 protein,accession number M14689,Smith-Waterman Score=263.
  misc_feature (1)...(376): n = a,t,c or g

SEQ ID NO: 15275 - DNA, 612 bp, Homo sapiens
  SIMILAR (150)..(599): 331254mologous to Streptococcus pneumoniae PspA,accession number AF255907,Smith-Waterman Score=119.
atgattcctgtgtctgaaaagtccaaaattgggcagcttaatttgatgctgaaaggaaagaagaccaaggggaagaaggtggctctggtccctgctgctgtgaagaagcaggaggccaagaaagtggtgaatctcttgtttgagaaaaggcctaagaatgttggcattggacagacatccagcccaaaagagacctgcacctgctttgtgaaatggccccgctatatcaggttgcagcagcagacagccatcctcgataatttatccaggccctggaccagcaaacagctactcagctgcttaagctggcccacaagtacagaccagagacaaagcaaaagaataagcagaggctattggcccagggctgagaagaaagctgccagcaaaggggacatccccaataagagaccacctgtccttcaagcaggagttaagactgtcaccaacttggtggagaacaagaaagctcagctggtggtgattgcacatgacgtggatcccgttgagctggttgtcttcctgcctgtcctacattgtaaaatgggggtcccttactgcattatcaaggggaaggcaagactgggacatctagtccacaggaagacctga

SEQ ID NO: 15276 - DNA, 913 bp, Homo sapiens
  SIMILAR (87)..(200): 941254mologous to Homo sapiens Human PRO1430 (UNQ736) amino acid sequence SEQ ID NO:116,accession number Y99372,Smith-Waterman Score=202.
cgtcgacgcccaagatgccgaaaggaaagaaggccaagggaaagaaggtggctccggccccagctgtcgtgaagaagcaggaggctaagaaagtggtgaatcccctgtttgagaaaaggcctaagaattttggcattggacaggacatccagcccaaaagagacctcacccgctttgtgaaatggccccgctatatcaggttgcagcggcagagagccatcctctataagcggctgaaagtgcctcctgcgattaaccagttcacccaggccctgggaccgccaaacagctactcagctgcttaagctggcccacaagtacagaccagagacaaagcaagagaagaagcagagactttttggcccgggccgaggaagaaggctgcttggccaaaggggacgttcccaacgaagagaccacctgtcccttcgagcaggagttaacaccgtcaccaccttggtggagaacaagaaagctcagctggtggtgattgcacacgacgtggatcccatcgagctggttgtcttcttgcctgccctggtgtcgtaaaatgggggtcccttactgcattatcaagggaaaggcaagtctgggacgtatagtccacaggaagacctgcaccactgtcgccttcacacaggtgaactcggaagacaaaggcagctttggctaaagctggtggaagctatcaggaccaattacaatgacagatacgatgagatccgccgtcactggggtggcaatgtcctggggtcctaagtctgtgggctcgtatcgccaagctcgaaaaaggcaaaggctaaagaacttgccactaaactggggttaaatgtacactgttgagttttctgtccataaaaataattgaaataatacaaattttccttcaaaaaaaagcggccgcgtcgacgtg

SEQ ID NO: 15277 - DNA, 1006 bp, Homo sapiens
  SIMILAR (275)..(469): 541254mologous to Homo sapiens nucleotide-binding site protein 1,accession number AF298547,Smith-Waterman Score=155.
atggataaatctaaaaggcaatttgctaagaaaacgaagcctgacgagcaacttctggccctgcaagctccgttcacgcaaaagacacacaaccagaaacctgaggatgaacctatggctctcctctcaccctccacagcaatcaaacaccaagccctggtgctgtcagctcagctgcagtacatcactcctaaccctgcttggaacatccttgcctctcctctcctatctaattcatctcattcctccaggcccaagacagtatccagttatccacagaacctcaacactactactccagcacatcagtgtgggaaaggagaagtttcacaaatcccaacattggggcttttgcaacaatgttatgatgttgcagctgcagctctcgccgctgaaggggctcagcctggtcgacaaggtgaacaggccgccggccctgagcgggacccgggttctggccagcaagactgcatggaggatcttccaggagcccgcgagccgaaaactaaagcagctgcccccggcgtggaggatgagccgctgctgagaggaaacccttgccgctttgtcatcttccccatcgagtaccatgatatctggcagatgtatgagaaggcggaggcttccttctggaccacccgaggaggtggacctgtccaaggacattcggcactgggaatccctgaagcccgaggagagatattttatatcccatgttctggttttctttgcagcaagtgatggcataataaatgaaaatttggtggagcgatttagccaaatagttcagattacagaagcccgctgtttctatggcttccaaattgccatggaaaacatacattctgaaatgtatagtctccttattgacacttacatcaaagatcccaaagaaagggaatttctcttcaatgccattgaacgatgccttgtgtcaagaagaaggcagattgggccttgcgctggattggggacaaagaggctacctatggtgaacgtgttgtag

SEQ ID NO: 15278 - DNA, 1371 bp, Homo sapiens
  SIMILAR (801)..(574): 931254mologous to synthetic construct chloramphenicol acetyltransferase,accession number A02739,Smith-Waterman Score=377.
cccaggcgcagccaatgggaagggtcggaggcatggcacagccaatgggaagggccggggcaccaaagccaatgggaagggccgggagcgcgcggcgcgggagatttaaaggctgctggagtgaggggtcgcccgtgcaccctgtcccagccgtcctgtcctggctgctcgctctgcttcgctgcgcctccactatgctctccctccgtgtcccgctcgcgcccatcacggacccgcagcagctgcagctctcgccgctgaaggggctcagcttggtcgacaaggagaacacgccgccggccctgagcgggaccccgcgtcctggccagcaagaccgcgaggaggatcttccaggagcccacggagccgaaaactaaagcagctgcccccggcgtggaggatgagccgctgctgagagaaaacccccgccgctttgtcatcttccccatcgagtaccatgatatctggcagatgtataagaaggcagaggcttccttttggaccgccgaggaggtaggacctctccaaggacattcagcactgggaatccctgaaacccgaggagagatattttatatcccatgttctggctttctttgcagcaagcgatggcatagtaaattgaaaacttggtggagcgatttagccaagaagttcagattacagaagccccgctgtttctatggcttccaaattgccatggaaaacatacattctgaaatgtatagtcttcttattgacacttacataaaagatcccaaagaaagggaatttctcttcaatgccatttgaaacgatgccttgtgtcaagaagaaggcagactgggccttgcgctgggattggggacaaagaggctacctatggtgaacgtgttgtagcctttgctgcagtggaaggcattttcttttccggttcttttgcgtcgatattctggctcaagaaacgaggactgatgcctggcctcacattttctaatgaacttattagcagagatgaggggtttacactgtgattttgcttgcctgatgttcaaacacctggtacacaaaccatcggaggagagagtaagagaaataattatcaatgctgttcggatagaacaggagttcctcactgaggccttgcctgtgaagctcattgggatgaattgcactctaatgaagcaatacattgagtttgtggcagacagacttatgctggaactgggttttagcaaggttttcagagtagagaacccatttgactttatggagaatatttcactggaaggaaagactaacttctttgagaagagagtaggcgagtatcagaggatgggagtgatgtcaagtccaacagagaattcttttaccttggatgctgacttctaa

SEQ ID NO: 15279 - DNA, 621 bp, Homo sapiens
  SIMILAR (50)..(523): 401254mologous to Saccharomyces cerevisiae Lpg21p,accession number U43281,Smith-Waterman Score=323.
aagatttataaagatgctcagtcgtcaccaccagcacgtgcaccatgtcctcccgctgctgcgtgctcctctgccagtggcaatggaagaagagatccccgcgctcttcattgacaatggctccggcatgtgaaaagcagctttgctgggacaatgccctccgagccatattcccctccatcatcgggcacccccggcaccagggcgtgatggtgggcatgggccagaaggactcctacgtgggcgaccaggcccagagcaagtgcggcatcctgaccctgaagtaccccatcaagcatggcatcgtcacaaactgggacgacatggagaagatctggcaccatgttttctacaacgagctgtgcgtggccctggaggagcaggtggtgctgctgaccgaggccccgctaaaccccagggccaatagggagaagatgactcagatcatgtttaagaccttcaacacccaggccatgtacgtggccattcaggccgtgctgaccctccacagctctggttgcaccactggcattgtcatggactctggagatggggtcacccacacagtgcccatctacgagcgccacaccctccctcacaccatcttgcatctggacctgg

SEQ ID NO: 15280 - DNA, 966 bp, Homo sapiens
  SIMILAR (118)..(1545): 521254mologous to Homo sapiens motor protein,accession number D21094,Smith-Waterman Score=1022.
atgaggagagaccccacgccgcccaggggcctcccgcggcagaggccgacgccgagcccaaggacacgctcccggggacaccaaagccaaaggccaaaggccaagtccgagccccagcccgcgcccgcggcgacccccggaggccgaagggcgtgggaaccacgggcgcaagccggctgcccacccccgccccgggccgcctctcccaggagattagtgcagggcgagcggccggaatccgggaaccgtagccgacaggcagcttacccacgccgcgccagccgggcacgaacctgcacaacgcgacttccaccaaccttgcgccagcgcgcactgacgcagcgcccatgctcgatgcatagagctctggctgctttaaaaaataaacctctaaatcatgttcacaaggtagtcaaggagcgtctgtgcccttggttgtgttcacgacaacctgagcctttcggggtcaaattccatcatgcccattgtaaaaagtttcattcgaaaaatggaaatgaccttcatccactcggtggaccagtgttctctcaagtatctgactgcgacaggcttgaacaaaatgttaaaaatgaggagagtcagatgttttacaggagactgagcaacttgacttcatcagaagaagtgctaagttttataagcacgatggaaaccctgcctgacactatggcagcaggagctttacaacgaatttgtgaagtggaaaaaaaggatggtgatcaagggctgccaaaagaaatactggagaatagcatctttcaagctttatgctttcagtttgaaaaggagccctcacagctgtcaaacactagtttagtgactgctttgcaagctctgattctgttgcatgtggatcctcaaagtagcctgttgctgaacctggtggcagatgccaaaatcgtctcgggtaccgagctcgattcgaatcatgtcatgccagaataa

SEQ ID NO: 15281 - DNA, 461 bp, Homo sapiens
  SIMILAR (98)..(154): 1001254mologous to Rattus norvegicus cMG1,accession number X86571,Smith-Waterman Score=92.
gcgtgtgggactccagacaggagaggctgcgccttccccgcaccgggaccttcgcgacacaccagatcctcgcccctggctcgcgcgaacgcacaggatgaccaccaccctcgtgtctgccaccatcttcgacttgagcgaagttttatgcaaggtaaaggggggcggagcatttgcttttcaaaaagtctttttcttttgccttaagaaagaaccccccaaaagttagggtcttggatggcaatggggaaagtggtgcagcgagatgattcttttctcctccggcatttctcccaagtttgaaggaatttggccccgtcctttccaccctttgaggttcaaccagtggctggcggggattacatgtgaatctggaggccagggttttgaggggcgaagtttgcctggcagggcagcccgggggcttcggggggagggctgggattgggacaagttttggg

SEQ ID NO: 15282 - DNA, 1272 bp, Homo sapiens
  SIMILAR (208)..(495): 971254mologous to Homo sapiens Berg36,accession number X99404,Smith-Waterman Score=482.
  misc_feature (1)...(1272): n = a,t,c or g
atggggagggcccggaagtcgggcctgggacagaggagccggcccaccgcctcccggtcggaagcggcagtgcagcccggagtcagaaaggcgaggggcgccgggaactggcgtgtgggactccagacaggagaggctgcgccttccccgcaccgggaccttcgcgacacaccagatcctcgcccctggctcgcgcgaacgcacaggatgaccaccaccctcgtgtctgccaccatcttcgacttgagcgaagttttatgcaagggtaacaagatgctcaactatagtgctcccagtgcagggggttgcctgctggacagaaaggcagtgggcacccctgctggtgggggcttccctcggaggcactcagtcaccctgcccagctccaagttccaccagaaccagctcctcagcagcctcaagggtgagccagcccccgctctgagctcgcgagacagccgcttccgagaccgctccttctcggaagggggcgatgcggctgctgcccacccagaagcagcccgggggcggcccaggtcaactccagccgctacaagacggagttgcgccgccccagcgaggaaaacggagccaggaagcacggggacaagtgccagcatagctttagctttgctgcgtttcccagtgccgctgccaccgccgctgccaccgggctgctggacagccccacgtccatcaccccacccccctattctgagcgccgatgacctcctgggctcacttaccctgcccgatggcaccaataaccccttttgccttctccagccaggagctggcaagcctctttgcccctagcatggggctgcccgggggtggctccccgaccaccttcctcttccggcccatgtccgagtcccctcacatgtttgactctccccccagccctcaggattctctctcggaccacagagggctacctgagcagctccagcagcagccacnattacctgctgccatgtaaaaccccactgtgttcctgcggcatcatcaggcttggaaaagagcaagtccaagggttctcccaagatgggcaagacctgaagcatatgctggttaagaagcttgcccaaggtcacacagctggttccagcaacctgctggtgaacactgacattatggtatttggatttacaacagccctgagaagttcaaaacaccagatccaggagataagtaaagccaagaccagcgctgcccaggatggagacacaggtgcctacatctccagtggtggctgcggcgaaggcagaa

SEQ ID NO: 15283 - DNA, 384 bp, Homo sapiens
  SIMILAR (107)..(1561): 891254mologous to Homo sapiens transmembrane protein,accession number L42572,Smith-Waterman Score=2065.
tgaagtcgtctgattggcaagaaaaacaaagtattcagtatttccatcaactgagtgttttcgtcattcacttctgacaaatcttgcaacagctcttggtttttatttaggaaatcaatggcaggcttagcaagaagctggaatcctcccataaccaggaaatttgtaatagatgtgcaatactctgtataactatccaagaagagacttgaatgcttcaggatgaccaaactcctggcttcctttaccccatgaaggaagctgctcaatgaggctccatgctgaccaatgaggtaacacagcttgctgaatcggctagccacctcctgcaacagctggactgtacctgtagtgcccaaattttctaaactgagaagaggcctg

SEQ ID NO: 15284 - DNA, 534 bp, Homo sapiens
  SIMILAR (105)..(527): 261254mologous to Arabidopsis thaliana putative protein,accession number AL132960,Smith-Waterman Score=86.
tacacctgttgttggtgtgagagctggctgctacttatgaagctggtgccttgtcactgaagaaagttatgaacttttatagtacaaccccttgtgaaactggagctcaggcaggcagtagtgccattggccccgaaggtttgaaagatagcagggaagaacaggttaaacaggaatcaatgcaaggaaagaaaagttcaagtcttgtggatatcagagaagaagaaacagagggaggcagtcgaagactctccctccctggattgttgtcacaagtttcccccaggctcttaagaaaggctgcacgggtgaaaacgaggacagtggttctgacccccacatacagtggagaagcagatgcgctcctgccttctctgagaacagaagtgtggacctgggggaaaagggaaggaaggggcagctgtgggcaccggcgatgtttctgcctaggtctttcaacccgtttgtgtgttaaaaatgtctgggatgggccaaaggaagttaatcccattctgggaaggccagggtgggttt

SEQ ID NO: 15285 - DNA, 482 bp, Homo sapiens
  SIMILAR (217)..(59): 431254mologous to Neisseria meningitidis Z2491 putative periplasmic protein,accession number AL162755,Smith-Waterman Score= 101.
tcaatggcccacataatggtcttctttgttcattgccttgtttgggatcctgtactctcccattcccatcttccaagccattcctgaacatgccagaatacatctttccatcaggccacttcaaaacccctctgccatgaggcttccctgaaagccagcgtccatcataggtggcatcctttaggcgaggatccttgtagaaagtatatttggcactgcgtgaaatgggtggttcctgtctctgaacactgctaccacttccataaggggggagatcagacatccctctcaaagcctgatctacggcttggcttatagctcgtagccacttttgtcttttcctggggtgtagatgaaatgagagtgaactgctcctcaggtgtagttatctttaagccattcacaccaccagcttcttcagacagtggctctgcccacagcgtggccagagggaaaacatggtgcggtggagaactgggcat

SEQ ID NO: 15286 - DNA, 5948 bp, Homo sapiens
  SIMILAR (841)..(1197): 991254mologous to Homo sapiens L protein (AA 1-558),accession number X16135,Smith-Waterman Score=621.
atgatagtcccttggatggcagtggccacctccttggagcaagtggccattgtagtccccagtggcaacaaacacctggaatctggtgtgctggccagtgcgcgtctgcttctgcactggcacaatcttcaaaacctcatccttgagagaggtccccaggaaaaagtcaatgatctcagactccttgatgggcagggagaagtgataggttttcagcaggacttcatcttcgtgtctttgaccaggcagctcagcttggtcatggatggtgaggtctacagctttgggactcttccctggagaagtggaccagtggagatttgtccaagtagccccattctagaaaatgccctggttgggcaatatgatattatttgtggcaacaggaagcttctatagtggagcagtgacagacaatggtgtcgcgtacatgtggggagagaattctgctggccagtgtgcagtagccaaccacgcagtatgtgccggaaccaaatcctgtcagcattgctgattctgaggccagccctttgtttagcagtcacggattttacagttggcgtgtggcagaggagcacactctggcattgtcaataagcagagagatttgggcatggggtaccggttgacagttgggtctcattaccactgccttcccagtggacaaagccgcaaaaggtagaacatcttgctgggcgagtggtgcttcaagttggcctgtggcgctttccaccagcttagcccttgtacaatgcctcctttcccaggatctgaagccagtcccagaacgatgcaaccagtgcagccagctcttgattactatgactgacaaagaaaaccatgtgattatatcagacagtcattgttgcccattaggtgtgacactgacagaatcttaggcagaaaaccatgccagcactgttctcagcccctccactgaaacccttgacaggcaggaaagaagtatttgagaacactcttgtagcaaatgatcagtctgttgctactgaaccgaatgcagtaggtgctcagatcacaagcagcgatgccatgtcctttcaaacaaatgtcatgggaacaactgaaatttccttttgccagaaacataccattatacccctgacacccaagcagtcaatgaatacctacggaaactgtcagatcattcagtaagagaggactcagagcatggtgaaaagccagtgccatctcagcctcttttagaagaagcaattcctaatctccacagcccgcctaccacaagcacctcagccctaaacaagcctggtggtctcttgtgcatctgctgttggtgtgagagtggctgctacttatgaagctggtgccttgtcactgaagaaagttatgaacttttatagtacaaccccttgtgaaactggagctcaggcaggcagtagtgccattggccccgaaggtttgaaagatagcagggaagaacaggttaaacaggaatcaatgcaaggaaagaaaagttcaagtcttgtggatatcagagaagaagaaacagagggaggcagtcgaagactctccctccctggattgttgtcacaagttcagcagtctcagccatctggacttaatgcttctcaagagtggcctgcagaccagcagcatcagcagcatctgggaacttgttacaaacgcagactctcagtttcccccaggctcttaagaaaggctgcacgggtgaaaacgaggacagtggttctgacccccacatacagtggagaagcagatgcgctcctgccttctctgagaacagaagtgtggacctgggggaaagggaaggaagggcagctggggcacggcgatgttctgcctagtgatttcctaaataaaaaccaagagctgttgcaagatttgtcagaagtgaatgacgaaaacactcagttgatggaaatactgaatactttgtttttcttgccaatcagacgacttcataattacgcaaaagttttgctaaagcttgctacttgttttgaagtggcatctccagaatatcagaaactgcaggattccagttcttgttatgagtgtcttgctctccatctcggcaggaaaaggaaggaagcagaatacacactgggcttctggaagaccttccccggaaaaatgacggattccttgaggaagccagagcgtcgactgctgtgtgagagtagtaaccgagccctgtctctgcagcatgctgggaggttttccgtgaattggttcattctctttaatgatgccctggtccatgcccagcttgagaatgagtgtcagccatgtgaagagggccctgcagcagagatggcaaggccctttgggttagctgtgttatggggacaatgtggcagaattggtggcacctacatgggcttaactatttcaaggggttctgcagcagagactgcaaggcccatgtgggttaatgacatgaaggggatatgggcagagtccccgaggtctacatgggctttcataaaagtgcctccgtgttctctgtttcagttctccacgcaccatgttttccctctggccacgctgtgggcagagccactgtctgaagaagctggtggtgtgaatggcttaaagataactacacctgaggagcagttcactctcatttcatctacaccccaggaaaagacaaagtggctacgagctataagccaagccgtagatcaggctttgagagggatgtctgatctccccccttatggaagtggtagcagtgttcagagacaggaaccacccatttcacgcagtgccaaatatactttctacaaggatcctcgcctaaaggatgccacctatgatggacgctggctttcagggaagcctcatggcaggtatggagaatacagaatcccaaacaaggcaatgaacaaagaagaccattatgtgggccattggaaagaaggaaaaatgtgcggtcaaggagtctacagctatgcttctggtgaagtatttgagggctgttttcaagataatatgcgtcatggtcatggtcttctacgaagtgggaaattgacgtcctcttctcctagtatgttcattggccagtgggtaatggataagaaagcaggatatggtgtctttgatgatatcactaggggggaaaagtatatgggaatgtggcaagatgatgtgtgtcaagggaatggtgtggtggttacccagtttggattatactacgagggcaactttcaccttaataaaatgatgggaaatggggttttgctttccgaagatgatactatctatgaaggagaattttcagatgactggactcttagtggaaagggaacactgactatgccaaatggagactacattgaaggttattttagtggagaatggggatctgggataaaaatcactggaacctacttcaaacctagtctatatgagagtgataaagacagacctaaagttttgaagctaggaaacctggcagtgccagctgatgagaagtggaaagcggtgtttgacgaatgttggcgccaactgggctgtgagggcccaggccaaggggaagtttggaaagcatgggacaatattgctgtggccttgaccaccagtcggcgccagcacagagacagtccagaaatactgagtcgttcacagactcagacactagagagtttggaattcattccacagcatgttggtgccttctctgtggagaaatatgatgacatcaggaaatatttaataaaggcctgtgacactcctctgcaccccctgggcaggcttgtggagacactggttgcagtgtatagaatgacatacgtgggcgtaggagccaaccgcaggttattgcaggaggctgtaaaggagattaagtcctatcttaagcgaattttccagctggtgaggttcttatttcctgagctgcctgaagaaggcagcacaattcctctctctgctcctctgccaaccgaaaggaagtctttttgcactggggaagtcagattcccgattctgaatcaccagagccaaggttatgtagtaacgaggttctgggattatttgcttcctgtgctgctacctcggctctacccaccgctgtttatgctttatgctttggataatgatcgcgaggaagacatttactgggaatgtgtccttcgactaaataagcagccagatattgctctcctgggctttcttggggtgcagaggaaattttggccagcaaccttgtcaatccttggagagagtaaaaaggttttgccaaccacgaaagatgcttgttttgcctcagcagtagaatgtctgcagcagatcagcacaacatttaccccatcagacaaacttaaggtcatccagcagacttttgaggagatctctcagagtgtcctggcgtcactccacgaagacttcttgtggtccatggatgacttgtttcctgttttcttatatgtggtgctacgggccaggattaggaatttaggctctgaggtacacctcattgaggatctaatggacccctatcttcagcatggggaacagggtataatggtcaccaccttgaagtctcaatcaagaattctcactctcaagatagcagaaatagataagcttcaactgacaaatttggtacagaagtcatggaaaggaagaagctccggccggggaggatgataccagtcagaccaaagggagcagatccacccagacaaggaaggacatgaaagcttttcttacagccaccaatccacagaatggcctctcccagatcctgaggcttgtgctgcaagagctgagtctgttctacagcaggagatgtgaatggagtgtgtctcttgtacgatctcctccacatcgccgtggcttcaggctctgctaaaggtgagtgcttctttgctcggaagcctttgcttgctgaaggggttatttatgactgcctccaggaatttaaagaaaagaaactagttcctgccacaccacatgcacaggtgttatcctatgaggccttgctcagtgcccatgacacgatagctcagaaagattttgaaccccttctccctccactgccagacaatatccctgagagtgaggaagcaatgaggattgtttgtttagtgaaaaaccaacagcccctgggagccaccatcaagcgccacgagatgacaggggacatcttggtggccaggatcatccacggtgggctggcggagagaagtgggttgctatatgctggagacaaactggtagaagtgaatggagtttcagttgagggactggaccctgaacaagtgatccatattctggctcccagaccttgtctgtcacccatgtcacttgctgacctccctcctctaccccgagaagttctggtcctggctgggaaacttcccgtcccaagcagctccttcctccttcagccacgggaagactgccagggcccccagcccagctccctcatcacctggtttgctccattggaaactgaacctggggtggacagagccatgtctcgaggcacaatcatgttcaaggtggttccagtctctgaccctcctgtgaatagccagcagatggtgtacgtccgtgccatgactgagtactggccccaggaggatcccgacatcccctgcatggacgctggattgcctttccagaagggggacatcctccagattgtggaccagaatgatgccctctggtggcaggcccgaaaaatctcagaccctgctacctgcgctgggcttgtcccttctaaccaccttctgaagagatatggactgagccaggaatctgcatcttcaccaagcgcctcaggtgctcagggaagcaacgggaattctggtggtctcagccgtaccagcctcacacctgcctcaagtcaaccctatgtgagtattgcaactgcccgacaggttcttcctgtttgcaataaagaccatggcattgcagtaaataaagagtctaattga

SEQ ID NO: 15287 - DNA, 408 bp, Homo sapiens
  SIMILAR (436)..(729): 871254mologous to Homo sapiens ADP/ATP carrier protein (adenine nucleotide translocator 2),accession number AC004000,Smith -Waterman Score=455.
atggagcctggtgacgcggcgcgccctggctcgggtcgggctaccggggcgccgccgccgcggctgctgctgctgccgctgctgctgggttgggggctgcgagtcgcggccgcggcctcggcctcctcctctggggcggcggcggaggacagcagcgccatggaggagctcgctactgagaaggaggcggaggagagccaccggcaagacagcgtgagcctgctcaccttcatcctgctgctcacgctcaccatcctcaccatctggctcttcaagcaccgccgggtgcgctttctgcacgagaccgggctggccatgatctatgggctcgagaaaataaccattggcgtgttagatatcaccggatggccatactgtacaatccaaccctacaacggcttcctttga

SEQ ID NO: 15288 - DNA, 3804 bp, Homo sapiens
  SIMILAR (386)..(988): 611254mologous to Homo sapiens adenine nucleotide translocator-2,accession number M57424,Smith-Waterman Score=529.
tttcgtgtcgcgccctcgagggagccagctgggccatggccgcgaggcaggggtgagaccggcggccacccgggagccctccgcacccgcaccatgcagaagagcgtgcgctacaacgaggggcacgccctgtacctggcctttctggcgcgcaaggagggcaccaagcgcggcttcctgagtaagaagacggccgaggcgagccgctggcacgagaagtggctcgccctctaccagaatgtgctcttctacttcgagggcgagcagagctgccgcccggcgggcatgtacctcctggagggctgcagctgcgaacgaacgcccgcgccacccagggccggcgccgggcagggaggcgtccgagacgcgctggacaagcagtattactttactgttctttttggccatgaaggtcagaagccactggagctgcgctgtgaggaggagcaggatggtaaagagtggatggaggccattcaccaagccagttatgcagacattttgattgagagggaagtattaatgcagaagtacattcatctagttcagatcgtagagacagaaaaaattgcagctaaccaactccgacatcaacttgaagatcaagacacagaaatcgaaaggcttaaatcagagattattgctcttaataaaaccaaagaacgaatgcgaccttaccaaagcaaccaagaagacgaagatccagacatcaagaagattaaaaaggttcagagcttcatgcgaggatggttgtgcagaaggaaatggaagaccatcgtgcaggattacatttgttctcctcatgctgaaagtatgaggaagagaaaccagattgtgttcaccatggtggaggcagagtcagagtacgttcaccagctctacatcctggtcaatggctttctccggcccctgcgtatggccgccagctccaagaagccccccatcagccacgacgacgtcagcagtatttttcttaacagtgaaacaatcatgtttcttcatgaaatatttcatcaaggactaaaggcaaggatagcaaactggcccactttaattttagctgatctgtttgatattttgctccccatgctgaacatttatcaagaatttgtgcgtaatcaccagtacagcctgcaagttctcgccaattgtaagcaaaacagagattttgacaaactcttaaaacagtatgaagccaatccagcctgtgaggggaggatgctggagacattcttgacctatcccatgttccagatccccagatatatcatcacactccatgagctccttgctcacacaccccatgagcatgtggaaaggaaaagcctggagtttgccaaatcaaagctagaggaactatccagagtaatgcacgatgaagtcagcgacactgaaaacataaggaaaaaccttgccatcgaaagaatgatcgtggagggctgtgacatcttgctggacaccagccaaacgttcatccgccaaggttctcttattcaagtaccttccgttgagagggggaaacttagtaaagttcgcctgggttcgttgtctttgaaaaaggaaggagagagacaatgcttcttatttacaaaacactttttaatatgtacaagaagttcaggagggaagcttcatctgctcaagacaggtggggttctgtctctaatagactgcacattgattgaggagccagatgcaagcgatgatgactctaaaggttctgggcaagtgtttgggcacctggattttaaaatagtggtggagcctcctgaccgtgccgccttcactgttgtcttgttagcaccctcacgccaggagaaagctgcctggatgagtgacatcagtcagtgtgtggacaatatacgatgtaatggtttaatgactatagtgtttgaagagaattccaaagtcactgtgccacatatgattaagtctgatgcccgtcttcataaagacgacactgacatttgcttcagtaaaacactcaactcctgcaaagtgccccagatccgttatgccagcgtggagcgcctcttggaacgactgacagacttgcggtttcttagtattgatttcctcaacacctttctgcacacctatcgtattttcactactgccgctgtggtgctggggaaactctccgacatatacaagaggcctttcacctccatccctgtcaggtcattggaattgttttttgctaccagccagaacaacagaggtgaacatttggtggatggcaaatccccacgtctgtgtcgcaaattctcttccccgccaccactggctgtgtccagaacatcttccccagtgagggccagaaagctgtctttgacttctcccttgaactcaaagataggagcattggacctgacaacttccagcagtcccaccaccaccacccagagtcccgctgcgtctccaccaccacacactggtcagataccactggatctcagcagaggcctctcttctccagagcaaagcccgggaacggtagaagagaatgtcgataacccacgcgtggatctgtgtaacaagctaaaacgaagtattcaaaaagcagtcctagagtctgcaccagcggaccgagcaggagtggaaagctcccctgcagcggacaccacagaactttcaccttgcagatccccctcaactcctcggcacctccgctatcgacagcctggaggacagacggcggacaatgcccactgctctgtttcaccggcttctgcttttgcaatagccacagctgcagcaggacatgggagtccaccaggctttaacaacaccgagagaacatgtgataaagagtttattatacggagaacggctaccaatcgagttctgaacgtcctccgtcactgggtctcaaagcacgcacaggatttcgaactcaacaatgaactaaagatgaatgtcctaaatttgctagaagaagttttgcgagacccagaccttcttccccaagaaaggaaagccgccgcgaatatcctcagggccctttcacaagatgaccaagatgacatccacctaaaattagaggatataattcaaatgactgactgcatgaaggccgaatgctttgagtccttgtcggccatggagctggcagaacagatcaccctcctggaccatgtcattttcagaagcattccctacgaggagtttcttgggcaggggtggatgaagctggataaaaacgaaagaactccttacattatgaaaaccagccaacacttcaatgacatgagtaacctggtggcctcccagataatgaactatgctgatgtcagctcccgtgccaacgccatcgagaaatgggtggcagtggcggacatctgccgatgcctgcacaactacaacggcgtgctggagatcacctcggccttaaacagaagtgccatctacaggctgaagaaaacctgggccaaggtctctaagcagacaaaagctctaatggacaaacttcaaaagactgtttcctctgaaggaagatttaaaaatcttagagaaacccttaaaaattgtaaccctcctgcagttccttatcttgggatgtacttgacagacctggcatttattgaagaaggaacaccaaactttactgaggaaggccttgtcaatttctccaaaatgagaatgatatcacacatcatcagagagatacgccagttccagcagacttcctacagaatagatcatcagccaaaggtcgcacagtacttgcttgacaaagaccttatcatagatgaagatacgctatatgagctgtcactcaaaattgaacctcgactccctgct

SEQ ID NO: 15289 - DNA, 1173 bp, Homo sapiens
  SIMILAR (1)..(204): 981254mologous to Homo sapiens ribosomal protein L23a,accession number U02032,Smith-Waterman Score=335.
tcatgatgttcttccctccctcatcctcctgtgatctgaggtcttccctcctcgggtgctgggttgttgctcttcctgcgcctccacgtattctgggtatctcattccagtagcactaacttcatgttttcccaataattccttagtcacacctagatgttttgtcttactaaagtgtatggaccaggaggagatgagggagagagggagctggacagccagttcattgttgagtatatagattcgttcaagagctacaatggtgtggctggaaacagctgaccagtaataatccgaaaaggtatcaacagtggtaaggcagcattgatagccctgagaggggtttgaaggcctgatgtagccaatctggcctttctggcgcgcaaggagggcaccaagcgcggcttcctgagtaagaagacggccgaggcgagccgctggcacgagaagtggttcgccctctaccagaatgtgctcttctacttcgagggcgagcagagctgccgcccgcggcatgtacctcctggagggctgcagcagtggcgggacatctccacgctccttccgatcttcatccagggattctcccatctccatacccctccaccccactgccaagtgatcagtcagaatagtggcccgacttgctttcattacccaaatgctgttattaattttggttctattaaccaggtttgccatttcgtaaaggtttgccccaagtgaattactaaaccgttctaagcctccaaacaccatgtctactttcccacttcctgtgttggttacccaaggggcttcctcagtgtgattcagaaacacttgtttttttctcttgcttttattcagtagttcatcaatttttattattcctttcttcaaaatatgtatgtccaccctttcctcttcattctcacagtctgccttaggggaggtatgaatcatttcatttactgattcagtattattctgatcatcccttgggtctccattcattctcccctcgtttccattgaacgaataccaccatgaggtcagtttagatctttcagcgtaagtgagctgcttagaaaccctcagtggcttcccatctgcctataggataaaattaaaattcaagactcctttctctatagcctgcctccaactgatttctctgtcctctctcttact

SEQ ID NO: 15290 - DNA, 483 bp, Homo sapiens
  SIMILAR (326)..(481): 1001254mologous to Homo sapiens ribosomal protein L26,accession number X69392,Smith-Waterman Score=270.
aatagaacttcgctccgcgctgcaggaattcggcacgagggcaagcgggtgtaatcagcagccatccgttcttgggcatggtggcttccgaccgcggggaccccgagagtctcttgtcggccgagtagcagccaggaaggagagactgggatgggtttttatctgttgctttcttaaatcaagggccgccgggccggagatggatggagggaccggggatttgggaactcgaaaacgagctgagggaagggagcctgtggaaatagactggagtctgggtagtgtcgtttcctagagaatggtctcgaagtaacttctcgccaaaatgaagtttaatccctttgtgacttccgaccgaagcaagaatcgcaaaaggcatttcaatgcaccttcccacattcgaaggaagattatgtcttcccctctttccaaagagctgagacagaagtacaacgtgcgatccatgcccatccgaaaggatga

SEQ ID NO: 15291 - DNA, 1155 bp, Homo sapiens
  SIMILAR (1126)..(1899): 1001254mologous to Homo sapiens similar to human bromodomain protein BR140(JC2069),accession number D87076,Smith-Waterman Score= 1404.
agtgtggcggaattccgggcaagcgggtgtaatcagcagccatccgttcttgggcatggtggcttccgaccgcggggaccccgagagtctcttgtcggccgagtagcagccaggaaggagagactgggatggttttttatctgttgctttcttaaatcaagggccgccgggccggagatggatggagggaccggggatttgggaactcgaaaacgagctgagggaagggagcctgtggaaatagactggagtctgggtagtgtcgtttcctagagaatggtctcgaagtaacttctcggtaaagtcttcacggaatttccagaccacacttgcccactgggaggcttttaggacccgagacgtgtgcaggcttttccagccaaaatgaagtttaatccctttgtgacttccgaccgaagcaagaatcgcaaaaggcatttcaatgcacccttcacacattcgaaggaagattatgtcttcccctctttccaaagagctgagacagaagtacaacgtgcgatccatgcccatccgaaaggatgatgaagttcaggttgtacgtggacactataaaggtcagcaaattggcaaagtagtccaggtttacaggaagaaatatgttatctacattgaacgggtgcagcgggaaaaggctaatggcacaactgtccacgtagggcattcaccccagcagggtggttatcactaggctaaaactggacaaagaaccgcaaaagaatctctgaccggaaggccaaatctcgccaagtaggaaaggaaaagggcaaatacaaggaagaaaccattgagaagatgcaggaataaagtaatcttatatacagagctttgattaaaacttgaaacaaaaaaaaaggggaagaaacgacagcctcacttctgtatggactgctgatgtggcctgccatcctgttcagcgggcattgtctttggagcagcaggagactaggatgcctctcactcacatcgagttcctggctggccagctgctcagggctcaggctggggcctcccattgacatcctccccctacactccctctctgagcctccgtcgcccctcctgttgggtaagggtgttgagtgtgacttgtgctgaaaacctggttcatatataataaataatggtgatgaaaag

SEQ ID NO: 15292 - DNA, 471 bp, Homo sapiens
  SIMILAR (80)..(469): 891254mologous to Homo sapiens Zen GTPase interacting protein ZIP,accession number Y06518,Smith-Waterman Score=608.
  misc_feature (1)...(471): n = a,t,c or g
aggtgtagcccccccccttttgaagccgttcgagagccatccgaaancncaannncnggnncgacgaaaacgtgccgctatggcgaacggtccgcgggcanntttttgtgagaatttccaggcggcgctcgctctgtcgcgggtgggactgcataaaaatccggagaaggaaccatacaagtccaaatacagcgcccgggcgctactggaagaagtcaaggcgctgctcggccctgcgcctgaggacgaggatgagcggcctgaggccgaggacggcccgggtgccggagaccacgccctggggctgcccgtcgcccagcgagcggtgaggctggcagtcatcgagttccacctcggggtgaaccacatcgacacggaggagctgtcggcgggggaggagcacctggtgaaatgcctgcggctgctgcgcaggtaccggctctcgcacgactgcatctctctctgcatcca

SEQ ID NO: 15293 - DNA, 891 bp, Homo sapiens
  SIMILAR (381)..(136): 981254mologous to Homo sapiens cell recognition molecule Caspr2,accession number AF193613,Smith-Waterman Score=432.
gagccagtaagtaaagtgtcgcaaagcagaaggaaggcgggagtcccgactgcaaacatttgaggaaagccaggcagtagaggccgctatggcgaacgttccgtgggcagaggtctgcgagaaattccaggcggcgctcgctctgtcgcgggtggaactgcataaaaatccggagaaggaaccatacaagtccaaatacagcgcccgggcgaacatgagaagaggtcaaggcgctgctcggccctgcgccctgaggacgaggatgagcggcctgaggccgaggacggcccgggtgccggttgaccacgccctggggctgccggctgaagtggtggagcccgaggggcccgtcgcccaagcgaaccggttgaggcttggcagtcatccgagttccacctcggggtgaaccacatcgacacggaggagctgtcggcgggggaggagcacctggtgaaatgcctgcggctgctgcgcaggtaccggctctcgcacgactgcatctctctctgcatccaggcgcagacgtggcgatgcattggtgtccgagaccctcctacatcgtcatgcgctttcctctccaccagtccaactcctgttcattctgttaagaaaatccaaactccggggcctctgagaccttctaacagtactttggtggatgacatggagtcatctttccagacttgctttgcctctccgttaagtcaggactatgtcaatggcagcaatcaggaagaaattggaactggtgttgatcggtgtatacacaagtttctggatattgcaagacagaatatttctttcctacaaaaaagattgcaattatctgtccagaaaccagagcaagttatcaatgaggatgtcgatgtctccgaactaagaaatgaataa

SEQ ID NO: 15294 - DNA, 4596 bp, Homo sapiens
  SIMILAR (1117)..(1581): 1001254mologous to Homo sapiens sperm protein 10,accession number M82968,Smith-Waterman Score=809.
aagcgggggactgtgccgtgtggaacgtgtagctgttgagaggtggactctgttaccattgaggatgtttggaggatgagtatgtgtggcagaggcacacataaacaggcagagaccctttgcccctgcctttctcccccaacccaaggctgacctgtgttctcccaggtctgggattctaagtgacctgctctgtgtttggtctctctcaggatgagcacaagcctgggagatggcagtgatggaaatggcctgcccaggtgcccctggctcagcagtggggcagcagaaggaactccccaagccaaaggagaagacgccgccactggggaagaaacagagctccgtctacaagcttgaggccgtggagaagagccctgtgttctgcggaaagtgggagatcctgaatgacgtgattaccaagggcacagccaaggaaggctccgaggcagggccagctgccatctctatcatcgcccaggctgagtgtgagaatagccaagagttcagccccaccttttcagaacgcattttcatcgctgggtccaaacagtacagccagtccgagagtcttgatcagatccccaacaatgtggcccatgctacagagggcaaaatggcccgtgtgtgttggaagggaaagcgtcgcagcaaagcccggaagaaacggaagaagaagagctcaaagtccctggctcatgcaggagtggccttggccaaacccctccccaggacccctgagcaggagagctgcaccatcccagtgcaggaggatgagtctccactcggcgccccatatgttagaaacaccccgcagttcaccaagcctctgaaggaaccaggccttgggcaactctgttttaagcagcttggcgagggcctacggccggctctgcctcgatcagaactccacaaactgatcagccccttgcaatgtctgaaccacgtgtggaaactgcaccacccccaggacggaggccccctgcccctgcccacgcaccccttcccctatagcagactgcctcatcccttcccattccaccctctccagccctggaaacctcaccctctggagtccttcctgggcaaactggcctgtgtagacagccagaaacccttgcctgacccacacctgagcaaactggcctgtgtagacagtccaaagcccctgcctggcccacacctggagcccagctgcctgtctcgtggtgcccatgagaagttttctgtggaggaatacctagtgcatgctctgcaaggcagcgtgagctcaagccaggcccacagcctgaccagcctggccaagacctgggcagcacggggctccagatcccgggagcccagccccaaaactgaggacaacgagggtgtcctgctcactgagaaactcaagccagtggattatgagtaccgagaagaagtccactgggccacgcaccagctccgcctgggcagaggctccttcggagaggtgcacaggatggaggacaagcagactggcttccagtgcgctgtcaaaaaggtgcggctggaagtatttcgggcagaggagctgatggcatgtgcaggattgacctcacccagaattgtccctttgtatggagctgtgagagaagggccttgggtcaacatcttcatggagctgctggaaggtggctccctgggccagctggtcaaggagcagggctgtctcccagaggaccgggccctgtactacctgggccaggccctggagggtctggaatacctccactcacgaaggattctgcatggggacgtcaaagctgacaacgtgctcctgtccagcgatgggagccacgcagccctctgtgactttggccatgctgtgtgtcttcaacctgatggcctgggaaagtccttgctcacaggggactacatccctggcacagagacccacatggctccggaggtggtgctgggcaggagctgcgacgccaaggtggatgtctggagcagctgctgtatgatgctgcacatgctcaacggctgccacccctggactcagttcttccgagggccgctctgcctcaagattgccagcgagcctccgcctgtgagggagatcccaccctcctgcgcccctctcacagcccaggccatccaagaggggctgaggaaagagcccatccaccgcgtgtctgcagcggagctgggagggaaggtgaaccgggcactacagcaagtgggaggtctgaagagcccttggaggggagaatataaagaaccaagacatccaccgccaaatcaagccaattaccaccagaccctccatgcccagccgagagagctttcgccaagggccccagggccccggccagctgaggagacaacaggcagagcccctaagctccagcctcctctcccaccagagcccccagagccaaacaagtctcctcccttgactttgagcaaggaggagtctgggatgtgggaacccttacctctgtcctccctggagccagcccctgccagaaaccccagctcaccagagcggaaagcaaccgtcccggagcaggaactgcagcagctggaaatagaattattcctcaacagcctgtcccagccattttctctggaggagcaggagcaaattctctcgtgcctcagcatcgacagcctctccctgtcggatgacagtgagaagaacccatcaaaggcctctcaaagctcgcgggacaccctgagctcaggcgtacactcctggagcagccaggccgaggctcgaagctccagctggaacatggtgctggcccgggggcggcccaccgacaccccaagctatttcaatggtgtgaaagtccaaatacagtctcttaatggtgaacacctgcacatccgggagttccaccgggtcaaagtgggagacatcgccactggcatcagcagccagatcccagctgcagccttcagcttggtcaccaaagacgggcagcctgttcgctacgacatggaggtgccagactcgggcatcgacctgcagtgcacactggcccctgatggcagcttcgcctggagctggagggtcaagcatggccagctggagaacaggccctaaccctgccctccaccgccggctccacactgccggaaagcagccttcctgctcggtgcacgatgctgccctgaaaacacaggctcagccgttcccaggggattgccagccccccggctcacagtgggaaccagggcctcgcagcagcaaggtgggggcaagcagaatgcctcccaggatttcacacctgagccctgccccaccctgctgaaaaaacatccgccacgtgaagagacagaaggaggatggcaggagttacctggggaaacaaaacagggatctttttctgcccctgctccagtcgagttggcctgacccgcttggatcagtgaccatttgttggcagacaggggagagcagcttccagcctgggtcagaaggggtgggcgagcccttcggcccctcaccctccaggctgctgtgagagtgtcaagtgtgtaagggcccaaactcaggttcagtgcagaaccaggtcagcaggtatgcccgcccgtaggttaagggggccctctaaaccccttgcctggcctcacctggccagctcaccccttttgggtgtaggggaaaagaatgcctgaccctgggaaggctccctggtagaatacaccacacttttcaggttgttgcaacacaggtcctgagttgacctctggttcagccaaggaccaaagaaggtgtgtaagtgaagtggttctcagtccccagacatgtgcccctttgctgctggctaccactcttccccagagcagcaggccccgagccccttcaggcccagcactgccccagactcgctggcactcagttccctcatctgtaaaggtgaagggtgatgcaggatatgcctgacaggaacagtctgtggatggacatgatcagtgctaaggaaagcagcagagagagacgtccggcgccccagccccactatcagtgtccagcgtgctggttccccagagcacagctcagcatcacactgacactcaccctgccctgcccctggccagagggtactgccgacggcactttgcactctgatgacctcaaagcactttcatggctgccctctggcagggcagggcagggcagtgacactgtaggagcatagcaagccaggagatggggtgaagggacacagtcttgagctgtccacatgcatgtgactcctcaaacctcttccagatttctctaagaatagcacccccttccccattgccccagcttagcctcttctcccaggggagctactcaggactcacgtagcattaaatcagctgtgaatcgtcagggggtgtctgctagcctcaacctcctggggcaggggacgccgagactccgtgggagaagctcattcccacatcttgccaagacagcctttgtccagctgtccacattgagtcagactgctcccggggagagagccccggcccccagcacataaagaactgcagccttggtactgcagagtctgggttgtagagaactctttgtaagcaataaagtttggggtgatgacaaatgttaaaaaa
